United States Patent Application Publication US 2025/0074962 A1 - sequence listing, part 8

SEQ ID NO: 12394 - DNA, 444 bp, synthetic construct
  misc_feature 1..444: note = Description of Artificial Sequence: Synthetic coding sequence
  source 1..444: mol_type = other DNA
atgaaggagggcagactggaggagagcgtggccctgagaatcatcaccgagggcgccagcatcctgagacaggagaagaacctgctggacatcgacgcccccgtgaccgtgtgcggcgacatccacggccagttcttcgacctgatgaagctgttcgaggtgggcggcagccccgccaacaccagatacctgttcctgggcgactacgtggacagaggctacttcagcatcgagtgcgtgctgtacctgtgggccctgaagatcctgtaccccaagaccctgttcctgctgagaggcaaccacgagtgcagacacctgaccgagtacttcaccttcaagcaggagtgcaagatcaagtacagcgagagagtgtacgacgcctgcatggacgccttcgactgcctgcccctggccgccctgatgaaccagcagttcctgtgctag

SEQ ID NO: 12395 - DNA, 1491 bp, synthetic construct
  misc_feature 1..1491: note = Description of Artificial Sequence: Synthetic coding sequence
  source 1..1491: mol_type = other DNA
atggccgcccccgagcccgccagagccgcccccccccccccccccccccccccccccccccccggcgccgacagagtggtgaaggccgtgcccttcccccccacccacagactgaccagcgaggaggtgttcgacctggacggcatccccagagtggacgtgctgaagaaccacctggtgaaggagggcagagtggacgaggagatcgccctgagaatcatcaacgagggcgccgccatcctgagaagagagaagaccatgatcgaggtggaggcccccatcaccgtgtgcggcgacatccacggccagttcttcgacctgatgaagctgttcgaggtgggcggcagccccgccaacaccagatacctgttcctgggcgactacgtggacagaggctacttcagcatcgagtgcgtgctgtacctgtgggtgctgaagatcctgtaccccagcaccctgttcctgctgagaggcaaccacgagtgcagacacctgaccgagtacttcaccttcaagcaggagtgcaagatcaagtacagcgagagagtgtacgaggcctgcatggaggccttcgacagcctgcccctggccgccctgctgaaccagcagttcctgtgcgtgcacggcggcctgagccccgagatccacaccctggacgacatcagaagactggacagattcaaggagccccccgccttcggccccatgtgcgacctgctgtggagcgaccccagcgaggacttcggcaacgagaagagccaggagcacttcagccacaacaccgtgagaggctgcagctacttctacaactaccccgccgtgtgcgagttcctgcagaacaacaacctgctgagcatcatcagagcccacgaggcccaggacgccggctacagaatgtacagaaagagccagaccaccggcttccccagcctgatcaccatcttcagcgcccccaactacctggacgtgtacaacaacaaggccgccgtgctgaagtacgagaacaacgtgatgaacatcagacagttcaactgcagcccccacccctactggctgcccaacttcatggacgtgttcacctggagcctgcccttcgtgggcgagaaggtgaccgagatgctggtgaacgtgctgagcatctgcagcgacgacgagctgatgaccgagggcgaggaccagttcgacggcagcgccgccgccagaaaggagatcatcagaaacaagatcagagccatcggcaagatggccagagtgttcagcgtgctgagagaggagagcgagagcgtgctgaccctgaagggcctgacccccaccggcatgctgcccagcggcgtgctggccggcggcagacagaccctgcagagcggcaacgacgtgatgcagctggccgtgccccagatggactggggcaccccccacagcttcgccaacaacagccacaacgcctgcagagagttcctgctgttcttcagcagctgcctgagcagctag

SEQ ID NO: 12396 - DNA, 1575 bp, synthetic construct
  misc_feature 1..1575: note = Description of Artificial Sequence: Synthetic coding sequence
  source 1..1575: mol_type = other DNA
atggccgcccccgagcccgccagagccgcccccccccccccccccccccccccccccccccccggcgccgacagagtggtgaaggccgtgcccttcccccccacccacagactgaccagcgaggaggtgttcgacctggacggcatccccagagtggacgtgctgaagaaccacctggtgaaggagggcagagtggacgaggagatcgccctgagaatcatcaacgagggcgccgccatcctgagaagagagaagaccatgatcgaggtggaggcccccatcaccgtgtgcggcgacatccacggccagttcttcgacctgatgaagctgttcgaggtgggcggcagccccgccaacaccagatacctgttcctgggcgactacgtggacagaggctacttcagcatcgagtgcgtgctgtacctgtgggtgctgaagatcctgtaccccagcaccctgttcctgctgagaggcaaccacgagtgcagacacctgaccgagtacttcaccttcaagcaggagtgcaagatcaagtacagcgagagagtgtacgaggcctgcatggaggccttcgacagcctgcccctggccgccctgctgaaccagcagttcctgtgcgtgcacggcggcctgagccccgagatccacaccctggacgacatcagaagactggacagattcaaggagccccccgccttcggccccatgtgcgacctgctgtggagcgaccccagcgaggacttcggcaacgagaagagccaggagcacttcagccacaacaccgtgagaggctgcagctacttctacaactaccccgccgtgtgcgagttcctgcagaacaacaacctgctgagcatcatcagagcccacgaggcccaggacgccggctacagaatgtacagaaagagccagaccaccggcttccccagcctgatcaccatcttcagcgcccccaactacctggacgtgtacaacaacaaggccgccgtgctgaagtacgagaacaacgtgatgaacatcagacagttcaactgcagcccccacccctactggctgcccaacttcatggacgtgttcacctggagcctgcccttcgtgggcgagaaggtgaccgagatgctggtgaacgtgctgagcatctgcagcgacgacgagctgatgaccgagggcgaggaccagttcgacggcagcgccgccgccagaaaggagatcatcagaaacaagatcagagccatcggcaagatggccagagtgttcagcgtgctgagagaggagagcgagagcgtgctgaccctgaagggcctgacccccaccggcatgctgcccagcggcgtgctggccggcggcagacagaccctgcagagcgccaccgtggaggccatcgaggccgagaaggccatcagaggcttcagccccccccacagaatctgcagcttcgaggaggccaagggcctggacagaatcaacgagagaatgccccccagaaaggacgccgtgcagcaggacggcttcaacagcctgaacaccgcccacgccaccgagaaccacggcaccggcaaccacaccgcccagtag

SEQ ID NO: 12397 - DNA, 1545 bp, synthetic construct
  misc_feature 1..1545: note = Description of Artificial Sequence: Synthetic coding sequence
  source 1..1545: mol_type = other DNA
atggccgcccccgagcccgccagagccgcccccccccccccccccccccccccccccccccccggcgccgacagagtggtgaaggccgtgcccttcccccccacccacagactgaccagcgaggaggtgttcgacctggacggcatccccagagtggacgtgctgaagaaccacctggtgaaggagggcagagtggacgaggagatcgccctgagaatcatcaacgagggcgccgccatcctgagaagagagaagaccatgatcgaggtggaggcccccatcaccgtgtgcggcgacatccacggccagttcttcgacctgatgaagctgttcgaggtgggcggcagccccgccaacaccagatacctgttcctgggcgactacgtggacagaggctacttcagcatcgagcacgtgctgggcaccgaggacatcagcatcaacccccacaacaacatcaacgagtgcgtgctgtacctgtgggtgctgaagatcctgtaccccagcaccctgttcctgctgagaggcaaccacgagtgcagacacctgaccgagtacttcaccttcaagcaggagtgcaagatcaagtacagcgagagagtgtacgaggcctgcatggaggccttcgacagcctgcccctggccgccctgctgaaccagcagttcctgtgcgtgcacggcggcctgagccccgagatccacaccctggacgacatcagaagactggacagattcaaggagccccccgccttcggccccatgtgcgacctgctgtggagcgaccccagcgaggacttcggcaacgagaagagccaggagcacttcagccacaacaccgtgagaggctgcagctacttctacaactaccccgccgtgtgcgagttcctgcagaacaacaacctgctgagcatcatcagagcccacgaggcccaggacgccggctacagaatgtacagaaagagccagaccaccggcttccccagcctgatcaccatcttcagcgcccccaactacctggacgtgtacaacaacaaggccgccgtgctgaagtacgagaacaacgtgatgaacatcagacagttcaactgcagcccccacccctactggctgcccaacttcatggacgtgttcacctggagcctgcccttcgtgggcgagaaggtgaccgagatgctggtgaacgtgctgagcatctgcagcgacgacgagctgatgaccgagggcgaggaccagttcgacggcagcgccgccgccagaaaggagatcatcagaaacaagatcagagccatcggcaagatggccagagtgttcagcgtgctgagagaggagagcgagagcgtgctgaccctgaagggcctgacccccaccggcatgctgcccagcggcgtgctggccggcggcagacagaccctgcagagcggcaacgacgtgatgcagctggccgtgccccagatggactggggcaccccccacagcttcgccaacaacagccacaacgcctgcagagagttcctgctgttcttcagcagctgcctgagcagctag

SEQ ID NO: 12398 - DNA, 591 bp, synthetic construct
  misc_feature 1..591: note = Description of Artificial Sequence: Synthetic coding sequence
  source 1..591: mol_type = other DNA
atgaacatcagacagttcaactgcagcccccacccctactggctgcccaacttcatggacgtgttcacctggagcctgcccttcgtgggcgagaaggtgaccgagatgctggtgaacgtgctgagcatctgcagcgacgacgagctgatgaccgagggcgaggaccagttcgacgagagactgatctacggcaacaagaagggcagcgccgccgccagaaaggagatcatcagaaacaagatcagagccatcggcaagatggccagagtgttcagcgtgctgagagaggagagcgagagcgtgctgaccctgaagggcctgacccccaccggcatgctgcccagcggcgtgctggccggcggcagacagaccctgcagagcgccaccgtggaggccatcgaggccgagaaggccatcagaggcttcagccccccccacagaatctgcagcttcgaggaggccaagggcctggacagaatcaacgagagaatgccccccagaaaggacgccgtgcagcaggacggcttcaacagcctgaacaccgcccacgccaccgagaaccacggcaccggcaaccacaccgcccagtag

SEQ ID NO: 12399 - DNA, 1548 bp, synthetic construct
  misc_feature 1..1548: note = Description of Artificial Sequence: Synthetic coding sequence
  source 1..1548: mol_type = other DNA
atggccgcccccgagcccgccagagccgcccccccccccccccccccccccccccccccccccggcgccgacagagtggtgaaggccgtgcccttcccccccacccacagactgaccagcgaggaggtgttcgacctggacggcatccccagagtggacgtgctgaagaaccacctggtgaaggagggcagagtggacgaggagatcgccctgagaatcatcaacgagggcgccgccatcctgagaagagagaagaccatgatcgaggtggaggcccccatcaccgtgtgcggcgacatccacggccagttcttcgacctgatgaagctgttcgaggtgggcggcagccccgccaacaccagatacctgttcctgggcgactacgtggacagaggctacttcagcatcgagtgcgtgctgtacctgtgggtgctgaagatcctgtaccccagcaccctgttcctgctgagaggcaaccacgagtgcagacacctgaccgagtacttcaccttcaagcaggagtgcaagatcaagtacagcgagagagtgtacgaggcctgcatggaggccttcgacagcctgcccctggccgccctgctgaaccagcagttcctgtgcgtgcacggcggcctgagccccgagatccacaccctggacgacatcagaagactggacagattcaaggagccccccgccttcggccccatgtgcgacctgctgtggagcgaccccagcgaggacttcggcaacgagaagagccaggagcacttcagccacaacaccgtgagaggctgcagctacttctacaactaccccgccgtgtgcgagttcctgcagaacaacaacctgctgagcatcatcagagcccacgaggcccaggacgccggctacagaatgtacagaaagagccagaccaccggcttccccagcctgatcaccatcttcagcgcccccaactacctggacgtgtacaacaacaaggccgccgtgctgaagtacgagaacaacgtgatgaacatcagacagttcaactgcagcccccacccctactggctgcccaacttcatggacgtgttcacctggagcctgcccttcgtgggcgagaaggtgaccgagatgctggtgaacgtgctgagcatctgcagcgacgacgagctgatgaccgagggcgaggaccagttcgacgtgggcagcgccgccgccagaaaggagatcatcagaaacaagatcagagccatcggcaagatggccagagtgttcagcgtgctgagagaggagagcgagagcgtgctgaccctgaagggcctgacccccaccggcatgctgcccagcggcgtgctggccggcggcagacagaccctgcagagcgccatcagaggcttcagccccccccacagaatctgcagcttcgaggaggccaagggcctggacagaatcaacgagagaatgccccccagaaaggacgccgtgcagcaggacggcttcaacagcctgaacaccgcccacgccaccgagaaccacggcaccggcaaccacaccgcccagtag

SEQ ID NO: 12400 - DNA, 1578 bp, synthetic construct
  misc_feature 1..1578: note = Description of Artificial Sequence: Synthetic coding sequence
  source 1..1578: mol_type = other DNA
atggccgcccccgagcccgccagagccgcccccccccccccccccccccccccccccccccccggcgccgacagagtggtgaaggccgtgcccttcccccccacccacagactgaccagcgaggaggtgttcgacctggacggcatccccagagtggacgtgctgaagaaccacctggtgaaggagggcagagtggacgaggagatcgccctgagaatcatcaacgagggcgccgccatcctgagaagagagaagaccatgatcgaggtggaggcccccatcaccgtgtgcggcgacatccacggccagttcttcgacctgatgaagctgttcgaggtgggcggcagccccgccaacaccagatacctgttcctgggcgactacgtggacagaggctacttcagcatcgagtgcgtgctgtacctgtgggtgctgaagatcctgtaccccagcaccctgttcctgctgagaggcaaccacgagtgcagacacctgaccgagtacttcaccttcaagcaggagtgcaagatcaagtacagcgagagagtgtacgaggcctgcatggaggccttcgacagcctgcccctggccgccctgctgaaccagcagttcctgtgcgtgcacggcggcctgagccccgagatccacaccctggacgacatcagaagactggacagattcaaggagccccccgccttcggccccatgtgcgacctgctgtggagcgaccccagcgaggacttcggcaacgagaagagccaggagcacttcagccacaacaccgtgagaggctgcagctacttctacaactaccccgccgtgtgcgagttcctgcagaacaacaacctgctgagcatcatcagagcccacgaggcccaggacgccggctacagaatgtacagaaagagccagaccaccggcttccccagcctgatcaccatcttcagcgcccccaactacctggacgtgtacaacaacaaggccgccgtgctgaagtacgagaacaacgtgatgaacatcagacagttcaactgcagcccccacccctactggctgcccaacttcatggacgtgttcacctggagcctgcccttcgtgggcgagaaggtgaccgagatgctggtgaacgtgctgagcatctgcagcgacgacgagctgatgaccgagggcgaggaccagttcgacgtgggcagcgccgccgccagaaaggagatcatcagaaacaagatcagagccatcggcaagatggccagagtgttcagcgtgctgagagaggagagcgagagcgtgctgaccctgaagggcctgacccccaccggcatgctgcccagcggcgtgctggccggcggcagacagaccctgcagagcgccaccgtggaggccatcgaggccgagaaggccatcagaggcttcagccccccccacagaatctgcagcttcgaggaggccaagggcctggacagaatcaacgagagaatgccccccagaaaggacgccgtgcagcaggacggcttcaacagcctgaacaccgcccacgccaccgagaaccacggcaccggcaaccacaccgcccagtag

SEQ ID NO: 12401 - DNA, 561 bp, synthetic construct
  misc_feature 1..561: note = Description of Artificial Sequence: Synthetic coding sequence
  source 1..561: mol_type = other DNA
cacccctactggctgcccaacttcatggacgtgttcacctggagcctgcccttcgtgggcgagaaggtgaccgagatgctggtgaacgtgctgagcatctgcagcgacgacgagctgatgaccgagggcgaggaccagttcgacgagagactgatctacggcaacaagaagggcagcgccgccgccagaaaggagatcatcagaaacaagatcagagccatcggcaagatggccagagtgttcagcgtgctgagagaggagagcgagagcgtgctgaccctgaagggcctgacccccaccggcatgctgcccagcggcgtgctggccggcggcagacagaccctgcagagcgccaccgtggaggccatcgaggccgagaaggccatcagaggcttcagccccccccacagaatctgcagcttcgaggaggccaagggcctggacagaatcaacgagagaatgccccccagaaaggacgccgtgcagcaggacggcttcaacagcctgaacaccgcccacgccaccgagaaccacggcaccggcaaccacaccgcccagtag

SEQ ID NO: 12402 - DNA, 459 bp, synthetic construct
  misc_feature 1..459: note = Description of Artificial Sequence: Synthetic coding sequence
  source 1..459: mol_type = other DNA
atgctggtgaacgtgctgagcatctgcagcgacgacgagctgatgaccgagggcgaggaccagttcgacggcagcgccgccgccagaaaggagatcatcagaaacaagatcagagccatcggcaagatggccagagtgttcagcgtgctgagagaggagagcgagagcgtgctgaccctgaagggcctgacccccaccggcatgctgcccagcggcgtgctggccggcggcagacagaccctgcagagcgccaccgtggaggccatcgaggccgagaaggccatcagaggcttcagccccccccacagaatctgcagcttcgaggaggccaagggcctggacagaatcaacgagagaatgccccccagaaaggacgccgtgcagcaggacggcttcaacagcctgaacaccgcccacgccaccgagaaccacggcaccggcaaccacaccgcccagtag

SEQ ID NO: 12403 - DNA, 1236 bp, synthetic construct
  misc_feature 1..1236: note = Description of Artificial Sequence: Synthetic coding sequence
  source 1..1236: mol_type = other DNA
atgatcgaggtggaggcccccatcaccgtgtgcggcgacatccacggccagttcttcgacctgatgaagctgttcgaggtgggcggcagccccgccaacaccagatacctgttcctgggcgactacgtggacagaggctacttcagcatcgagtgcgtgctgtacctgtgggtgctgaagatcctgtaccccagcaccctgttcctgctgagaggcaaccacgagtgcagacacctgaccgagtacttcaccttcaagcaggagtgcaagatcaagtacagcgagagagtgtacgaggcctgcatggaggccttcgacagcctgcccctggccgccctgctgaaccagcagttcctgtgcgtgcacggcggcctgagccccgagatccacaccctggacgacatcagaagactggacagattcaaggagccccccgccttcggccccatgtgcgacctgctgtggagcgaccccagcgaggacttcggcaacgagaagagccaggagcacttcagccacaacaccgtgagaggctgcagctacttctacaactaccccgccgtgtgcgagttcctgcagaacaacaacctgctgagcatcatcagagcccacgaggcccaggacgccggctacagaatgtacagaaagagccagaccaccggcttccccagcctgatcaccatcttcagcgcccccaactacctggacgtgtacaacaacaaggccgccgtgctgaagtacgagaacaacgtgatgaacatcagacagttcaactgcagcccccacccctactggctgcccaacttcatggacgtgttcacctggagcctgcccttcgtgggcgagaaggtgaccgagatgctggtgaacgtgctgagcatctgcagcgacgacgagctgatgaccgagggcgaggaccagttcgacgtgggcagcgccgccgccagaaaggagatcatcagaaacaagatcagagccatcggcaagatggccagagtgttcagcgtgctgagagaggagagcgagagcgtgctgaccctgaagggcctgacccccaccggcatgctgcccagcggcgtgctggccggcggcagacagaccctgcagagcggcaacgacgtgatgcagctggccgtgccccagatggactggggcaccccccacagcttcgccaacaacagccacaacgcctgcagagagttcctgctgttcttcagcagctgcctgagcagctag

SEQ ID NO: 12404 - DNA, 1539 bp, synthetic construct
  misc_feature 1..1539: note = Description of Artificial Sequence: Synthetic coding sequence
  source 1..1539: mol_type = other DNA
atgagcggcagaagattccacctgagcaccaccgacagagtgatcaaggccgtgcccttcccccccacccagagactgaccttcaaggaggtgttcgagaacggcaagcccaaggtggacgtgctgaagaaccacctggtgaaggagggcagactggaggaggaggtggccctgaagatcatcaacgacggcgccgccatcctgagacaggagaagaccatgatcgaggtggacgcccccatcaccgtgtgcggcgacatccacggccagttcttcgacctgatgaagctgttcgaggtgggcggcagccccagcaacaccagatacctgttcctgggcgactacgtggacagaggctacttcagcatcgagtgcgtgctgtacctgtggagcctgaagatcaaccaccccaagaccctgttcctgctgagaggcaaccacgagtgcagacacctgaccgactacttcaccttcaagcaggagtgcagaatcaagtacagcgagcaggtgtacgacgcctgcatggagaccttcgactgcctgcccctggccgccctgctgaaccagcagttcctgtgcgtgcacggcggcatgagccccgagatcaccagcctggacgacatcagaaagctggacagattcaccgagccccccgccttcggccccgtgtgcgacctgctgtggagcgaccccagcgaggactacggcaacgagaagaccctggagcactacacccacaacaccgtgagaggctgcagctacttctacagctaccccgccgtgtgcgagttcctgcagaacaacaacctgctgagcatcatcagagcccacgaggcccaggacgccggctacagaatgtacagaaagagccaggccaccggcttccccagcctgatcaccatcttcagcgcccccaactacctggacgtgtacaacaacaaggccgccgtgctgaagtacgagaacaacgtgatgaacatcagacagttcaactgcagcccccacccctactggctgcccaacttcatggacgtgttcacctggagcctgcccttcgtgggcgagaaggtgaccgagatgctggtgaacgtgctgaacatctgcagcgacgacgagctgatcagcgacgacgaggccgagggcagcaccaccgtgagaaaggagatcatcagaaacaagatcagagccatcggcaagatggccagagtgttcagcatcctgagacaggagagcgagagcgtgctgaccctgaagggcctgacccccaccggcaccctgcccctgggcgtgctgagcggcggcaagcagaccatcgagaccgccaccgtggaggccgtggaggccagagaggccatcagaggcttcagcctgcagcacaagatcagaagcttcgaggaggccagaggcctggacagaatcaacgagagaatgccccccagaaaggacagcatccacgccggcggccccatgaagagcgtgaccagcgcccacagccacgccgcccacagaagcgaccagggcaagaaggcccacagctag

SEQ ID NO: 12405 - DNA, 1509 bp, synthetic construct
  misc_feature 1..1509: note = Description of Artificial Sequence: Synthetic coding sequence
  source 1..1509: mol_type = other DNA
atgagcggcagaagattccacctgagcaccaccgacagagtgatcaaggccgtgcccttcccccccacccagagactgaccttcaaggaggtgttcgagaacggcaagcccaaggtggacgtgctgaagaaccacctggtgaaggagggcagactggaggaggaggtggccctgaagatcatcaacgacggcgccgccatcctgagacaggagaagaccatgatcgaggtggacgcccccatcaccgtgtgcggcgacatccacggccagttcttcgacctgatgaagctgttcgaggtgggcggcagccccagcaacaccagatacctgttcctgggcgactacgtggacagaggctacttcagcatcgagtgcgtgctgtacctgtggagcctgaagatcaaccaccccaagaccctgttcctgctgagaggcaaccacgagtgcagacacctgaccgactacttcaccttcaagcaggagtgcagaatcaagtacagcgagcaggtgtacgacgcctgcatggagaccttcgactgcctgcccctggccgccctgctgaaccagcagttcctgtgcgtgcacggcggcatgagccccgagatcaccagcctggacgacatcagaaagctggacagattcaccgagccccccgccttcggccccgtgtgcgacctgctgtggagcgaccccagcgaggactacggcaacgagaagaccctggagcactacacccacaacaccgtgagaggctgcagctacttctacagctaccccgccgtgtgcgagttcctgcagaacaacaacctgctgagcatcatcagagcccacgaggcccaggacgccggctacagaatgtacagaaagagccaggccaccggcttccccagcctgatcaccatcttcagcgcccccaactacctggacgtgtacaacaacaaggccgccgtgctgaagtacgagaacaacgtgatgaacatcagacagttcaactgcagcccccacccctactggctgcccaacttcatggacgtgttcacctggagcctgcccttcgtgggcgagaaggtgaccgagatgctggtgaacgtgctgaacatctgcagcgacgacgagctgatcagcgacgacgaggccgagggcagcaccaccgtgagaaaggagatcatcagaaacaagatcagagccatcggcaagatggccagagtgttcagcatcctgagacaggagagcgagagcgtgctgaccctgaagggcctgacccccaccggcaccctgcccctgggcgtgctgagcggcggcaagcagaccatcgagaccgccatcagaggcttcagcctgcagcacaagatcagaagcttcgaggaggccagaggcctggacagaatcaacgagagaatgccccccagaaaggacagcatccacgccggcggccccatgaagagcgtgaccagcgcccacagccacgccgcccacagaagcgaccagggcaagaaggcccacagctag

SEQ ID NO: 12406 - DNA, 345 bp, synthetic construct
  misc_feature 1..345: note = Description of Artificial Sequence: Synthetic coding sequence
  source 1..345: mol_type = other DNA
atgtactacaagttcagcggcttcacccagaagctggccggcgcctgggccagcgaggcctacagcccccagggcctgaagcccgtggtgagcaccgaggccccccccatcatcttcgccacccccaccaagctgaccagcgacagcaccgtgtacgactacgccggcaagaacaaggtgcccgagctgcagaagttcttccagaaggccgacggcgtgcccgtgtacctgaagagaggcctgcccgaccagatgctgtacagaaccaccatggccctgaccgtgggcggcaccatctactgcctgatcgccctgtacatggccagccagcccaagaacaagtag

SEQ ID NO: 12407 - DNA, 522 bp, synthetic construct
  misc_feature 1..522: note = Description of Artificial Sequence: Synthetic coding sequence
  source 1..522: mol_type = other DNA
atgagcaccatgggcaacgaggccagctaccccgccgagatgtgcagccacttcgacaacgacgagatcaagagactgggcagaagattcaagaagctggacctggacaagagcggcagcctgagcgtggaggagttcatgagcctgcccgagctgagacacaaccccctggtgagaagagtgatcgacgtgttcgacaccgacggcgacggcgaggtggacttcaaggagttcatcctgggcaccagccagttcagcgtgaagggcgacgaggagcagaagctgagattcgccttcagcatctacgacatggacaaggacggctacatcagcaacggcgagctgttccaggtgctgaagatgatggtgggcaacaacctgaccgactggcagctgcagcagctggtggacaagaccatcatcatcctggacaaggacggcgacggcaagatcagcttcgaggagttcagcgccgtggtgagagacctggagatccacaagaagctggtgctgatcgtgtag

SEQ ID NO: 12408 - DNA, 420 bp, synthetic construct
  misc_feature 1..420: note = Description of Artificial Sequence: Synthetic coding sequence
  source 1..420: mol_type = other DNA
atgagcaccatgggcaacgaggccagctaccccgccgagatgtgcagccacttcgacaacgacgagatcaagagactgggcagaagattcaagaagctggacctggacaagagcggcagcctgagcgtggaggagttcatgagcctgcccgagctgagacacaaccccctggtgagaagagtgatcgacgtgttcgacaccgacggcgacggcgaggtggacttcaaggagttcatcctgggcaccagccagttcagcgtgaagggcgacgaggagcagaagctgagattcgccttcagcatctacgacatggacaaggacggctacatcagcaacggcgagctgttccaggtgctgaagatgatggtgggcaacaacctgaccgactggcagctgcagcagctggtgctgatcgtgtag

SEQ ID NO: 12409 - DNA, 1818 bp, synthetic construct
  misc_feature 1..1818: note = Description of Artificial Sequence: Synthetic coding sequence
  source 1..1818: mol_type = other DNA
atggccggcctgtacagcctgggcgtgagcgtgttcagcgaccagggcggcagaaagtacatggaggacgtgacccagatcgtggtggagcccgagcccaccgccgaggagaagcccagccccagaagaagcctgagccagcccctgccccccagacccagccccgccgccctgcccggcggcgaggtgagcggcaagggccccgccgtggccgccagagaggccagagaccccctgcccgacgccggcgccagccccgcccccagcagatgctgcagaagaagaagcagcgtggccttcttcgccgtgtgcgacggccacggcggcagagaggccgcccagttcgccagagagcacctgtggggcttcatcaagaagcagaagggcttcaccagcagcgagcccgccaaggtgtgcgccgccatcagaaagggcttcctggcctgccacctggccatgtggaagaagctggccgagtggcccaagaccatgaccggcctgcccagcaccagcggcaccaccgccagcgtggtgatcatcagaggcatgaagatgtacgtggcccacgtgggcgacagcggcgtggtgctgggcatccaggacgaccccaaggacgacttcgtgagagccgtggaggtgacccaggaccacaagcccgagctgcccaaggagagagagagaatcgagggcctgggcggcagcgtgatgaacaagagcggcgtgaacagagtggtgtggaagagacccagactgacccacaacggccccgtgagaagaagcaccgtgatcgaccagatccccttcctggccgtggccagagccctgggcgacctgtggagctacgacttcttcagcggcgagttcgtggtgagccccgagcccgacaccagcgtgcacaccctggacccccagaagcacaagtacatcatcctgggcagcgacggcctgtggaacatgatccccccccaggacgccatcagcatgtgccaggaccaggaggagaagaagtacctgatgggcgagcacggccagagctgcgccaagatgctggtgaacagagccctgggcagatggagacagagaatgctgagagccgacaacaccagcgccatcgtgatctgcatcagccccgaggtggacaaccagggcaacttcaccaacgaggacgagctgtacctgaacctgaccgacagccccagctacaacagccaggagacctgcgtgatgacccccagcccctgcagcaccccccccgtgaagagcctggaggaggacccctggcccagagtgaacagcaaggaccacatccccgccctggtgagaagcaacgccttcagcgagaacttcctggaggtgagcgccgagatcgccagagagaacgtgcagggcgtggtgatccccagcaaggaccccgagcccctggaggagaactgcgccaaggccctgaccctgagaatccacgacagcctgaacaacagcctgcccatcggcctggtgcccaccaacagcaccaacaccgtgatggaccagaagaacctgaagatgagcacccccggccagatgaaggcccaggagatcgagagaaccccccccaccaacttcaagagaaccctggaggagagcaacagcggccccctgatgaagaagcacagaagaaacggcctgagcagaagcagcggcgcccagcccgccagcctgcccaccaccagccagagaaagaacagcgtgaagctgaccatgagaagaagactgagaggccagaagaagatcggcaaccccctgctgcaccagcacagaaagaccgtgtgcgtgtgctag

SEQ ID NO: 12410 - DNA, 1293 bp, synthetic construct
  misc_feature 1..1293: note = Description of Artificial Sequence: Synthetic coding sequence
  source 1..1293: mol_type = other DNA
atggccggcctgtacagcctgggcgtgagcgtgttcagcgaccagggcggcagaaagtacatggaggacgtgacccagatcgtggtggagcccgagcccaccgccgaggagaagcccagccccagaagaagcctgagccagcccctgccccccagacccagccccgccgccctgcccggcggcgaggtgagcggcaagggccccgccgtggccgccagagaggccagagaccccctgcccgacgccggcgccagccccgcccccagcagatgctgcagaagaagaagcagcgtggccttcttcgccgtgtgcgacggccacggcggcagagaggccgcccagttcgccagagagcacctgtggggcttcatcaagaagcagaagggcttcaccagcagcgagcccgccaaggtgtgcgccgccatcagaaagggcttcctggcctgccacctggccatgtggaagaagctggccgagtggcccaagaccatgaccggcctgcccagcaccagcggcaccaccgccagcgtggtgatcatcagaggcatgaagatgtacgtggcccacgtgggcgacagcggcgtggtgctgggcatccaggacgaccccaaggacgacttcgtgagagccgtggaggtgacccaggaccacaagcccgagctgcccaaggagagagagagaatcgagggcctgggcggcagcgtgatgaacaagagcggcgtgaacagagtggtgtggaagagacccagactgacccacaacggccccgtgagaagaagcaccgtgatcgaccagatccccttcctggccgtggccagagccctgggcgacctgtggagctacgacttcttcagcggcgagttcgtggtgagccccgagcccgacaccagcgtgcacaccctggacccccagaagcacaagtacatcatcctgggcagcgacggcctgtggaacatgatccccccccaggacgccatcagcatgtgccaggaccaggaggagaagaagtacctgatgggcgagcacggccagagctgcgccaagatgctggtgaacagagccctgggcagatggagacagagaatgctgagagccgacaacaccagcgccatcgtgatctgcatcagccccgaggtggacaaccagggcaacttcaccaacgaggacgagctgtacctgaacctgaccgacagccccagctacaacagccaggagacctgcgtgatgacccccagcccctgcagcaccccccccgtgaaggacttcggcttcgagctggacagcagaaagtag

SEQ ID NO: 12411 - DNA, 837 bp, synthetic construct
  misc_feature 1..837: note = Description of Artificial Sequence: Synthetic coding sequence
  source 1..837: mol_type = other DNA
atgtggaagaagctggccgagtggcccaagaccatgaccggcctgcccagcaccagcggcaccaccgccagcgtggtgatcatcagaggcatgaagatgtacgtggcccacgtgggcgacagcggcgtggtgctgggcatccaggacgaccccaaggacgacttcgtgagagccgtggaggtgacccaggaccacaagcccgagctgcccaaggagagagagagaatcgagggcctgggcggcagcgtgatgaacaagagcggcgtgaacagagtggtgtggaagagacccagactgacccacaacggccccgtgagaagaagcaccgtgatcgaccagatccccttcctggccgtggccagagccctgggcgacctgtggagctacgacttcttcagcggcgagttcgtggtgagccccgagcccgacaccagcgtgcacaccctggacccccagaagcacaagtacatcatcctgggcagcgacggcctgtggaacatgatccccccccaggacgccatcagcatgtgccaggaccaggaggagaagaagtacctgatgggcgagcacggccagagctgcgccaagatgctggtgaacagagccctgggcagatggagacagagaatgctgagagccgacaacaccagcgccatcgtgatctgcatcagccccgaggtggacaaccagggcaacttcaccaacgaggacgagctgtacctgaacctgaccgacagccccagctacaacagccaggagacctgcgtgatgacccccagcccctgcagcaccccccccgtgaaggacttcggcttcgagctggacagcagaaagtag

SEQ ID NO: 12412 - DNA, 3432 bp, synthetic construct
  misc_feature 1..3432: note = Description of Artificial Sequence: Synthetic coding sequence
  source 1..3432: mol_type = other DNA
atgtacctgtggctgaagctgctggccttcggcttcgccttcctggacaccgaggtgttcgtgaccggccagagccccacccccagccccaccgacgcctacctgaacgccagcgagaccaccaccctgagccccagcggcagcgccgtgatcagcaccaccaccatcgccaccacccccagcaagcccacctgcgacgagaagtacgccaacatcaccgtggactacctgtacaacaaggagaccaagctgttcaccgccaagctgaacgtgaacgagaacgtggagtgcggcaacaacacctgcaccaacaacgaggtgcacaacctgaccgagtgcaagaacgccagcgtgagcatcagccacaacagctgcaccgcccccgacaagaccctgatcctggacgtgccccccggcgtggagaagttccagctgcacgactgcacccaggtggagaaggccgacaccaccatctgcctgaagtggaagaacatcgagaccttcacctgcgacacccagaacatcacctacagattccagtgcggcaacatgatcttcgacaacaaggagatcaagctggagaacctggagcccgagcacgagtacaagtgcgacagcgagatcctgtacaacaaccacaagttcaccaacgccagcaagatcatcaagaccgacttcggcagccccggcgagccccagatcatcttctgcagaagcgaggccgcccaccagggcgtgatcacctggaaccccccccagagaagcttccacaacttcaccctgtgctacatcaaggagaccgagaaggactgcctgaacctggacaagaacctgatcaagtacgacctgcagaacctgaagccctacaccaagtacgtgctgagcctgcacgcctacatcatcgccaaggtgcagagaaacggcagcgccgccatgtgccacttcaccaccaagagcgccccccccagccaggtgtggaacatgaccgtgagcatgaccagcgacaacagcatgcacgtgaagtgcagaccccccagagacagaaacggcccccacgagagataccacctggaggtggaggccggcaacaccctggtgagaaacgagagccacaagaactgcgacttcagagtgaaggacctgcagtacagcaccgactacaccttcaaggcctacttccacaacggcgactaccccggcgagcccttcatcctgcaccacagcaccagctacaacagcaaggccctgatcgccttcctggccttcctgatcatcgtgaccagcatcgccctgctggtggtgctgtacaagatctacgacctgcacaagaagagaagctgcaacctggacgagcagcaggagctggtggagagagacgacgagaagcagctgatgaacgtggagcccatccacgccgacatcctgctggagacctacaagagaaagatcgccgacgagggcagactgttcctggccgagttccagagcatccccagagtgttcagcaagttccccatcaaggaggccagaaagcccttcaaccagaacaagaacagatacgtggacatcctgccctacgactacaacagagtggagctgagcgagatcaacggcgacgccggcagcaactacatcaacgccagctacatcgacggcttcaaggagcccagaaagtacatcgccgcccagggccccagagacgagaccgtggacgacttctggagaatgatctgggagcagaaggccaccgtgatcgtgatggtgaccagatgcgaggagggcaacagaaacaagtgcgccgagtactggcccagcatggaggagggcaccagagccttcggcgacgtggtggtgaagatcaaccagcacaagagatgccccgactacatcatccagaagctgaacatcgtgaacaagaaggagaaggccaccggcagagaggtgacccacatccagttcaccagctggcccgaccacggcgtgcccgaggacccccacctgctgctgaagctgagaagaagagtgaacgccttcagcaacttcttcagcggccccatcgtggtgcactgcagcgccggcgtgggcagaaccggcacctacatcggcatcgacgccatgctggagggcctggaggccgagaacaaggtggacgtgtacggctacgtggtgaagctgagaagacagagatgcctgatggtgcaggtggaggcccagtacatcctgatccaccaggccctggtggagtacaaccagttcggcgagaccgaggtgaacctgagcgagctgcacccctacctgcacaacatgaagaagagagacccccccagcgagcccagccccctggaggccgagttccagagactgcccagctacagaagctggagaacccagcacatcggcaaccaggaggagaacaagagcaagaacagaaacagcaacgtgatcccctacgactacaacagagtgcccctgaagcacgagctggagatgagcaaggagagcgagcacgacagcgacgagagcagcgacgacgacagcgacagcgaggagcccagcaagtacatcaacgccagcttcatcatgagctactggaagcccgaggtgatgatcgccgcccagggccccctgaaggagaccatcggcgacttctggcagatgatcttccagagaaaggtgaaggtgatcgtgatgctgaccgagctgaagcacggcgaccaggagatctgcgcccagtactggggcgagggcaagcagacctacggcgacatcgaggtggacctgaaggacaccgacaagagcagcacctacaccctgagagtgttcgagctgagacacagcaagagaaaggacagcagaaccgtgtaccagtaccagtacaccaactggagcgtggagcagctgcccgccgagcccaaggagctgatcagcatgatccaggtggtgaagcagaagctgccccagaagaacagcagcgagggcaacaagcaccacaagagcacccccctgctgatccactgcagagacggcagccagcagaccggcatcttctgcgccctgctgaacctgctggagagcgccgagaccgaggaggtggtggacatcttccaggtggtgaaggccctgagaaaggccagacccggcatggtgagcaccttcgagcagtaccagttcctgtacgacgtgatcgccagcacctaccccgcccagaacggccaggtgaagaagaacaaccaccaggaggacaagatcgagttcgacaacgaggtggacaaggtgaagcaggacgccaactgcgtgaaccccctgggcgcccccgagaagctgcccgaggccaaggagcaggccgagggcagcgagcccaccagcggcaccgagggccccgagcacagcgtgaacggccccgccagccccgccctgaaccagggcagctag

SEQ ID NO: 12413 - DNA, 105 bp, synthetic construct
  misc_feature 1..105: note = Description of Artificial Sequence: Synthetic coding sequence
  source 1..105: mol_type = other DNA
atgtacctgtggctgaagctgctggccttcggcttcgccttcctggacaccgaggtgttcgtgaccggccagagccccacccccagccccaccggcaagaactag

SEQ ID NO: 12414 - DNA, 447 bp, synthetic construct
  misc_feature 1..447: note = Description of Artificial Sequence: Synthetic coding sequence
  source 1..447: mol_type = other DNA
atggccagaatgaacagacccgcccccgtggaggtgacctacaagaacatgagattcctgatcacccacaaccccaccaacgccaccctgaacaagttcatcgaggagctgaagaagtacggcgtgaccaccatcgtgagagtgtgcgaggccacctacgacaccaccctggtggagaaggagggcatccacgtgctggactggcccttcgacgacggcgccccccccagcaaccagatcgtggacgactggctgagcctggtgaagatcaagttcagagaggagcccggctgctgcatcgccgtgcactgcgtggccggcctgggcagaaagagaagaggcgccttcaacagcaagcagctgctgtacctggagaagtacagacccaagatgagactgagattcaaggacagcaacggccacagaaacaactgctgcatccagtag

SEQ ID NO: 12415 - DNA, 447 bp, synthetic construct; identical to SEQ ID NO: 12414
  misc_feature 1..447: note = Description of Artificial Sequence: Synthetic coding sequence
  source 1..447: mol_type = other DNA

SEQ ID NO: 12416 - DNA, 522 bp, synthetic construct
  misc_feature 1..522: note = Description of Artificial Sequence: Synthetic coding sequence
  source 1..522: mol_type = other DNA
atggccagaatgaacagacccgcccccgtggaggtgacctacaagaacatgagattcctgatcacccacaaccccaccaacgccaccctgaacaagttcatcgaggagctgaagaagtacggcgtgaccaccatcgtgagagtgtgcgaggccacctacgacaccaccctggtggagaaggagggcatccacgtgctggactggcccttcgacgacggcgccccccccagcaaccagatcgtggacgactggctgagcctggtgaagatcaagttcagagaggagcccggctgctgcatcgccgtgcactgcgtggccggcctgggcagagcccccgtgctggtggccctggccctgatcgagggcggcatgaagtacgaggacgccgtgcagttcatcagacagaagagaagaggcgccttcaacagcaagcagctgctgtacctggagaagtacagacccaagatgagactgagattcaaggacagcaacggccacagaaacaactgctgcatccagtag

SEQ ID NO: 12417 - DNA, 1308 bp, synthetic construct
  misc_feature 1..1308: note = Description of Artificial Sequence: Synthetic coding sequence
  source 1..1308: mol_type = other DNA
atggagatggagaaggagttcgagcagatcgacaagagcggcagctgggccgccatctaccaggacatcagacacgaggccagcgacttcccctgcagagtggccaagctgcccaagaacaagaacagaaacagatacagagacgtgagccccttcgaccacagcagaatcaagctgcaccaggaggacaacgactacatcaacgccagcctgatcaagatggaggaggcccagagaagctacatcctgacccagggccccctgcccaacacctgcggccacttctgggagatggtgtgggagcagaagagcagaggcgtggtgatgctgaacagagtgatggagaagggcagcctgaagtgcgcccagtactggccccagaaggaggagaaggagatgatcttcgaggacaccaacctgaagctgaccctgatcagcgaggacatcaagagctactacaccgtgagacagctggagctggagaacctgaccacccaggagaccagagagatcctgcacttccactacaccacctggcccgacttcggcgtgcccgagagccccgccagcttcctgaacttcctgttcaaggtgagagagagcggcagcctgagccccgagcacggccccgtggtggtgcactgcagcgccggcatcggcagaagcggcaccttctgcctggccgacacctgcctgctgctgatggacaagagaaaggaccccagcagcgtggacatcaagaaggtgctgctggagatgagaaagttcagaatgggcctgatccagaccgccgaccagctgagattcagctacctggccgtgatcgagggcgccaagttcatcatgggcgacagcagcgtgcaggaccagtggaaggagctgagccacgaggacctggagcccccccccgagcacatcccccccccccccagaccccccaagagaatcctggagccccacaacggcaagtgcagagagttcttccccaaccaccagtgggtgaaggaggagacccaggaggacaaggactgccccatcaaggaggagaagggcagccccctgaacgccgccccctacggcatcgagagcatgagccaggacaccgaggtgagaagcagagtggtgggcggcagcctgagaggcgcccaggccgccagccccgccaagggcgagcccagcctgcccgagaaggacgaggaccacgccctgagctactggaagcccttcctggtgaacatgtgcgtggccaccgtgctgaccgccggcgcctacctgtgctacagattcctgttcaacagcaacacctag

SEQ ID NO: 12418 - DNA, 1089 bp, synthetic construct
  misc_feature 1..1089: note = Description of Artificial Sequence: Synthetic coding sequence
  source 1..1089: mol_type = other DNA
atggaggaggcccagagaagctacatcctgacccagggccccctgcccaacacctgcggccacttctgggagatggtgtgggagcagaagagcagaggcgtggtgatgctgaacagagtgatggagaagggcagcctgaagtgcgcccagtactggccccagaaggaggagaaggagatgatcttcgaggacaccaacctgaagctgaccctgatcagcgaggacatcaagagctactacaccgtgagacagctggagctggagaacctgaccacccaggagaccagagagatcctgcacttccactacaccacctggcccgacttcggcgtgcccgagagccccgccagcttcctgaacttcctgttcaaggtgagagagagcggcagcctgagccccgagcacggccccgtggtggtgcactgcagcgccggcatcggcagaagcggcaccttctgcctggccgacacctgcctgctgctgatggacaagagaaaggaccccagcagcgtggacatcaagaaggtgctgctggagatgagaaagttcagaatgggcctgatccagaccgccgaccagctgagattcagctacctggccgtgatcgagggcgccaagttcatcatgggcgacagcagcgtgcaggaccagtggaaggagctgagccacgaggacctggagcccccccccgagcacatcccccccccccccagaccccccaagagaatcctggagccccacaacggcaagtgcagagagttcttccccaaccaccagtgggtgaaggaggagacccaggaggacaaggactgccccatcaaggaggagaagggcagccccctgaacgccgccccctacggcatcgagagcatgagccaggacaccgaggtgagaagcagagtggtgggcggcagcctgagaggcgcccaggccgccagccccgccaagggcgagcccagcctgcccgagaaggacgaggaccacgccctgagctactggaagcccttcctggtgaacatgtgcgtggccaccgtgctgaccgccggcgcctacctgtgctacagattcctgttcaacagcaacacctag

SEQ ID NO: 12419 - DNA, 1782 bp, synthetic construct
  misc_feature 1..1782: note = Description of Artificial Sequence: Synthetic coding sequence
  source 1..1782: mol_type = other DNA
atgaccagcagaagatggttccaccccaacatcaccggcgtggaggccgagaacctgctgctgaccagaggcgtggacggcagcttcctggccagacccagcaagagcaaccccggcgacttcaccctgagcgtgagaagaaacggcgccgtgacccacatcaagatccagaacaccggcgactactacgacctgtacggcggcgagaagttcgccaccctggccgagctggtgcagtactacatggagcaccacggccagctgaaggagaagaacggcgacgtgatcgagctgaagtaccccctgaactgcgccgaccccaccagcgagagatggttccacggccacctgagcggcaaggaggccgagaagctgctgaccgagaagggcaagcacggcagcttcctggtgagagagagccagagccaccccggcgacttcgtgctgagcgtgagaaccggcgacgacaagggcgagagcaacgacggcaagagcaaggtgacccacgtgatgatcagatgccaggagctgaagtacgacgtgggcggcggcgagagattcgacagcctgaccgacctggtggagcactacaagaagaaccccatggtggagaccctgggcaccgtgctgcagctgaagcagcccctgaacaccaccagaatcaacgccgccgagatcgagagcagagtgagagagctgagcaagctggccgagaccaccgacaaggtgaagcagggcttctgggaggagttcgagaccctgcagcagcaggagtgcaagctgctgtacagcagaaaggagggccagagacaggagaacaagaacaagaacagatacaagaacatcctgcccttcgaccacaccagagtggtgctgcacgacggcgaccccaacgagcccgtgagcgactacatcaacgccaacatcatcatgcccgagttcgagaccaagtgcaacaacagcaagcccaagaagagctacatcgccacccagggctgcctgcagaacaccgtgaacgacttctggagaatggtgttccaggagaacagcagagtgatcgtgatgaccaccaaggaggtggagagaggcaagagcaagtgcgtgaagtactggcccgacgagtacgccctgaaggagtacggcgtgatgagagtgagaaacgtgaaggagagcgccgcccacgactacaccctgagagagctgaagctgagcaaggtgggccagggcaacaccgagagaaccgtgtggcagtaccacttcagaacctggcccgaccacggcgtgcccagcgaccccggcggcgtgctggacttcctggaggaggtgcaccacaagcaggagagcatcatggacgccggccccgtggtggtgcactgcagcgccggcatcggcagaaccggcaccttcatcgtgatcgacatcctgatcgacatcatcagagagaagggcgtggactgcgacatcgacgtgcccaagaccatccagatggtgagaagccagagaagcggcatggtgcagaccgaggcccagtacagattcatctacatggccgtgcagcactacatcgagaccctgcagagaagaatcgaggaggagcagaagagcaagagaaagggccacgagtacaccaacatcaagtacagcctggccgaccagaccagcggcgaccagagccccctgcccccctgcacccccacccccccctgcgccgagatgagagaggacagcgccagagtgtacgagaacgtgggcctgatgcagcagcagaagagcttcagatag

SEQ ID NO: 12420 - DNA, 651 bp, synthetic construct
  misc_feature 1..651: note = Description of Artificial Sequence: Synthetic coding sequence
  source 1..651: mol_type = other DNA
atgaccagcagaagatggttccaccccaacatcaccggcgtggaggccgagaacctgctgctgaccagaggcgtggacggcagcttcctggccagacccagcaagagcaaccccggcgacttcaccctgagcgtgagaagaaacggcgccgtgacccacatcaagatccagaacaccggcgactactacgacctgtacggcggcgagaagttcgccaccctggccgagctggtgcagtactacatggagcaccacggccagctgaaggagaagaacggcgacgtgatcgagctgaagtaccccctgaactgcgccgaccccaccagcgagagatggttccacggccacctgagcggcaaggaggccgagaagctgctgaccgagaagggcaagcacggcagcttcctggtgagagagagccagagccaccccggcgacttcgtgctgagcgtgagaaccggcgacgacaagggcgagagcaacgacggcaagagcaaggtgacccacgtgatgatcagatgccaggagctgaagtacgacgtgggcggcggcgagagattcgacagcctgaccgacctggtggagcactacaagaagaaccccatggtggagaccctgggcaccgtgctgcagctgaagcagcccctgtag

SEQ ID NO: 12421 - DNA, 1383 bp, synthetic construct
  misc_feature 1..1383: note = Description of Artificial Sequence: Synthetic coding sequence
  source 1..1383: mol_type = other DNA
atgaccagcagaagatggttccaccccaacatcaccggcgtggaggccgagaacctgctgctgaccagaggcgtggacggcagcttcctggccagacccagcaagagcaaccccggcgacttcaccctgagcgtgagaagaaacggcgccgtgacccacatcaagatccagaacaccggcgactactacgacctgtacggcggcgagaagttcgccaccctggccgagctggtgcagtactacatggagcaccacggccagctgaaggagaagaacggcgacgtgatcgagctgaagtaccccctgaactgcgccgaccccaccagcgagagatggttccacggccacctgagcggcaaggaggccgagaagctgctgaccgagaagggcaagcacggcagcttcctggtgagagagagccagagccaccccggcgacttcgtgctgagcgtgagaaccggcgacgacaagggcgagagcaacgacggcaagagcaaggtgacccacgtgatgatcagatgccaggagctgaagtacgacgtgggcggcggcgagagattcgacagcctgaccgacctggtggagcactacaagaagaaccccatggtggagaccctgggcaccgtgctgcagctgaagcagcccctgaacaccaccagaatcaacgccgccgagatcgagagcagagtgagagagctgagcaagctggccgagaccaccgacaaggtgaagcagggcttctgggaggagttcgagaccctgcagcagcaggagtgcaagctgctgtacagcagaaaggagggccagagacaggagaacaagaacaagaacagatacaagaacatcctgcccttcgaccacaccagagtggtgctgcacgacggcgaccccaacgagcccgtgagcgactacatcaacgccaacatcatcatgcccgagttcgagaccaagtgcaacaacagcaagcccaagaagagctacatcgccacccagggctgcctgcagaacaccgtgaacgacttctggagaatggtgttccaggagaacagcagagtgatcgtgatgaccaccaaggaggtggagagaggcaagagcaagtgcgtgaagtactggcccgacgagtacgccctgaaggagtacggcgtgatgagagtgagaaacgtgaaggagagcgccgcccacgactacaccctgagagagctgaagctgagcaaggtgggccagggcaacaccgagagaaccgtgtggcagtaccacttcagaacctggcccgaccacggcgtgcccagcgaccccggcggcgtgctggacttcctggaggaggtgcaccacaagcaggagagcatcatggacgccggccccgtggtggtgcactgcagatag

SEQ ID NO: 12422 - DNA, 723 bp, synthetic construct
  misc_feature 1..723: note = Description of Artificial Sequence: Synthetic coding sequence
  source 1..723: mol_type = other DNA
atgtacctgtggctgaagctgctggccttcggcttcgccttcctggacaccgaggtgttcgtgaccggccagagccccacccccagccccaccggccacctgcaggccgaggagcagggcagccagagcaagagccccaacctgaagagcagagaggccgacagcagcgccttcagctggtggcccaaggccagagagcccctgaccaaccactggagactgaccaccgccaagatgcccagcgtgcccctgagcagcgaccccctgcccacccacaccaccgccttcagccccgccagcaccttcgagagagagaacgacttcagcgagaccaccaccagcctgagccccgacaacaccagcacccaggtgagccccgacagcctggacaacgccagcgccttcaacaccaccggcgtgagcagcgtgcagaccccccacctgcccacccacgccgacagccagacccccagcgccggcaccgacacccagaccttcagcggcagcgccgccaacgccaagctgaaccccacccccggcagcaacgccatcagcgacgtgcccggcgagagaagcaccgccagcaccttccccaccgaccccgtgagccccctgaccaccaccctgagcctggcccaccacagcagcgccgccctgcccgccagaaccagcaacaccaccatcaccgccaacaccagcgacgcctacctgaacgccagctag

SEQ ID NO: 12423 - DNA, 3432 bp, synthetic construct; identical to SEQ ID NO: 12412
  misc_feature 1..3432: note = Description of Artificial Sequence: Synthetic coding sequence
  source 1..3432: mol_type = other DNA

SEQ ID NO: 12424 - DNA, 3771 bp, synthetic construct
  misc_feature 1..3771: note = Description of Artificial Sequence: Synthetic coding sequence
  source 1..3771: mol_type = other DNA
atgtacctgtggctgaagctgctggccttcggcttcgccttcctggacaccgaggtgttcgtgaccggccagagccccacccccagccccaccggcctgaccaccgccaagatgcccagcgtgcccctgagcagcgaccccctgcccacccacaccaccgccttcagccccgccagcaccttcgagagagagaacgacttcagcgagaccaccaccagcctgagccccgacaacaccagcacccaggtgagccccgacagcctggacaacgccagcgccttcaacaccaccggcgtgagcagcgtgcagaccccccacctgcccacccacgccgacagccagacccccagcgccggcaccgacacccagaccttcagcggcagcgccgccaacgccaagctgaaccccacccccggcagcaacgccatcagcgacgcctacctgaacgccagcgagaccaccaccctgagccccagcggcagcgccgtgatcagcaccaccaccatcgccaccacccccagcaagcccacctgcgacgagaagtacgccaacatcaccgtggactacctgtacaacaaggagaccaagctgttcaccgccaagctgaacgtgaacgagaacgtggagtgcggcaacaacacctgcaccaacaacgaggtgcacaacctgaccgagtgcaagaacgccagcgtgagcatcagccacaacagctgcaccgcccccgacaagaccctgatcctggacgtgccccccggcgtggagaagttccagctgcacgactgcacccaggtggagaaggccgacaccaccatctgcctgaagtggaagaacatcgagaccttcacctgcgacacccagaacatcacctacagattccagtgcggcaacatgatcttcgacaacaaggagatcaagctggagaacctggagcccgagcacgagtacaagtgcgacagcgagatcctgtacaacaaccacaagttcaccaacgccagcaagatcatcaagaccgacttcggcagccccggcgagccccagatcatcttctgcagaagcgaggccgcccaccagggcgtgatcacctggaaccccccccagagaagcttccacaacttcaccctgtgctacatcaaggagaccgagaaggactgcctgaacctggacaagaacctgatcaagtacgacctgcagaacctgaagccctacaccaagtacgtgctgagcctgcacgcctacatcatcgccaaggtgcagagaaacggcagcgccgccatgtgccacttcaccaccaagagcgccccccccagccaggtgtggaacatgaccgtgagcatgaccagcgacaacagcatgcacgtgaagtgcagaccccccagagacagaaacggcccccacgagagataccacctggaggtggaggccggcaacaccctggtgagaaacgagagccacaagaactgcgacttcagagtgaaggacctgcagtacagcaccgactacaccttcaaggcctacttccacaacggcgactaccccggcgagcccttcatcctgcaccacagcaccagctacaacagcaaggccctgatcgccttcctggccttcctgatcatcgtgaccagcatcgccctgctggtggtgctgtacaagatctacgacctgcacaagaagagaagctgcaacctggacgagcagcaggagctggtggagagagacgacgagaagcagctgatgaacgtggagcccatccacgccgacatcctgctggagacctacaagagaaagatcgccgacgagggcagactgttcctggccgagttccagagcatccccagagtgttcagcaagttccccatcaaggaggccagaaagcccttcaaccagaacaagaacagatacgtggacatcctgccctacgactacaacagagtggagctgagcgagatcaacggcgacgccggcagcaactacatcaacgccagctacatcgacggcttcaaggagcccagaaagtacatcgccgcccagggccccagagacgagaccgtggacgacttctggagaatgatctgggagcagaaggccaccgtgatcgtgatggtgaccagatgcgaggagggcaacagaaacaagtgcgccgagtactggcccagcatggaggagggcaccagagccttcggcgacgtggtggtgaagatcaaccagcacaagagatgccccgactacatcatccagaagctgaacatcgtgaacaagaaggagaaggccaccggcagagaggtgacccacatccagttcaccagctggcccgaccacggcgtgcccgaggacccccacctgctgctgaagctgagaagaagagtgaacgccttcagcaacttcttcagcggccccatcgtggtgcactgcagcgccggcgtgggcagaaccggcacctacatcggcatcgacgccatgctggagggcctggaggccgagaacaaggtggacgtgtacggctacgtggtgaagctgagaagacagagatgcctgatggtgcaggtggaggcccagtacatcctgatccaccaggccctggtggagtacaaccagttcggcgagaccgaggtgaacctgagcgagctgcacccctacctgcacaacatgaagaagagagacccccccagcgagcccagccccctggaggccgagttccagagactgcccagctacagaagctggagaacccagcacatcggcaaccaggaggagaacaagagcaagaacagaaacagcaacgtgatcccctacgactacaacagagtgcccctgaagcacgagctggagatgagcaaggagagcgagcacgacagcgacgagagcagcgacgacgacagcgacagcgaggagcccagcaagtacatcaacgccagcttcatcatgagctactggaagcccgaggtgatgatcgccgcccagggccccctgaaggagaccatcggcgacttctggcagatgatcttccagagaaaggtgaaggtgatcgtgatgctgaccgagctgaagcacggcgaccaggagatctgcgcccagtactggggcgagggcaagcagacctacggcgacatcgaggtggacctgaaggacaccgacaagagcagcacctacaccctgagagtgttcgagctgagacacagcaagagaaaggacagcagaaccgtgtaccagtaccagtacaccaactggagcgtggagcagctgcccgccgagcccaaggagctgatcagcatgatccaggtggtgaagcagaagctgccccagaagaacagcagcgagggcaacaagcaccacaagagcacccccctgctgatccactgcagagacggcagccagcagaccggcatcttctgcgccctgctgaacctgctggagagcgccgagaccgaggaggtggtggacatcttccaggtggtgaaggccctgagaaaggccagacccggcatggtgagcaccttcgagcagtaccagttcctgtacgacgtgatcgccagcacctaccccgcccagaacggccaggtgaagaagaacaaccaccaggaggacaagatcgagttcgacaacgaggtggacaaggtgaagcaggacgccaactgcgtgaaccccctgggcgcccccgagaagctgcccgaggccaaggagcaggccgagggcagcgagcccaccagcggcaccgagggccccgagcacagcgtgaacggccccgccagccccgccctgaaccagggcagctag

SEQ ID NO: 12425 - DNA, 2208 bp, synthetic construct
  misc_feature 1..2208: note = Description of Artificial Sequence: Synthetic coding sequence
  source 1..2208: mol_type = other DNA
atgaccatgtacctgtggctgaagctgctggccttcggcttcgccttcctggacaccgaggtgttcgtgaccggccagagccccacccccagccccaccggcgtgagcagcgtgcagaccccccacctgcccacccacgccgacagccagacccccagcgccggcaccgacacccagaccttcagcggcagcgccgccaacgccaagctgaaccccacccccggcagcaacgccatcagcgacgtgcccggcgagagaagcaccgccagcaccttccccaccgaccccgtgagccccctgaccaccaccctgagcctggcccaccacagcagcgccgccctgcccgccagaaccagcaacaccaccatcaccgccaacaccagcgacgcctacctgaacgccagcgagaccaccaccctgagccccagcggcagcgccgtgatcagcaccaccaccatcgccaccacccccagcaagcccacctgcgacgagaagtacgccaacatcaccgtggactacctgtacaacaaggagaccaagctgttcaccgccaagctgaacgtgaacgagaacgtggagtgcggcaacaacacctgcaccaacaacgaggtgcacaacctgaccgagtgcaagaacgccagcgtgagcatcagccacaacagctgcaccgcccccgacaagaccctgatcctggacgtgccccccggcgtggagaagttccagctgcacgactgcacccaggtggagaaggccgacaccaccatctgcctgaagtggaagaacatcgagaccttcacctgcgacacccagaacatcacctacagattccagtgcggcaacatgatcttcgacaacaaggagatcaagctggagaacctggagcccgagcacgagtacaagtgcgacagcgagatcctgtacaacaaccacaagttcaccaacgccagcaagatcatcaagaccgacttcggcagccccggcgagccccagatcatcttctgcagaagcgaggccgcccaccagggcgtgatcacctggaaccccccccagagaagcttccacaacttcaccctgtgctacatcaaggagaccgagaaggactgcctgaacctggacaagaacctgatcaagtacgacctgcagaacctgaagccctacaccaagtacgtgctgagcctgcacgcctacatcatcgccaaggtgcagagaaacggcagcgccgccatgtgccacttcaccaccaagagcgccccccccagccaggtgtggaacatgaccgtgagcatgaccagcgacaacagcatgcacgtgaagtgcagaccccccagagacagaaacggcccccacgagagataccacctggaggtggaggccggcaacaccctggtgagaaacgagagccacaagaactgcgacttcagagtgaaggacctgcagtacagcaccgactacaccttcaaggcctacttccacaacggcgactaccccggcgagcccttcatcctgcaccacagcaccagctacaacagcaaggccctgatcgccttcctggccttcctgatcatcgtgaccagcatcgccctgctggtggtgctgtacaagatctacgacctgcacaagaagagaagctgcaacctggacgagcagcaggagctggtggagagagacgacgagaagcagctgatgaacgtggagcccatccacgccgacatcctgctggagacctacaagagaaagatcgccgacgagggcagactgttcctggccgagttccagagcatccccagagtgttcagcaagttccccatcaaggaggccagaaagcccttcaaccagaacaagaacagatacgtggacatcctgccctacgactacaacagagtggagctgagcgagatcaacggcgacgccggcagcaactacatcaacgccagctacatcgacggcttcaaggagcccagaaagtacatcgccgcccagggccccagagacgagaccgtggacgacttctggagaatgatctgggagcagaaggccaccgtgatcgtgatggtgaccagatgcgaggagggcaacagaaacaagtgcgccgagtactggcccagcatggaggagggcaccagagccttcggcgacgtggtggtgaagatcaaccagcacaagagatgccccgactacatcatccagaagctgaacatcgtgaactag

SEQ ID NO: 12426 - DNA, 2202 bp, synthetic construct
  misc_feature 1..2202: note = Description of Artificial Sequence: Synthetic coding sequence
  source 1..2202: mol_type = other DNA
atgtacctgtggctgaagctgctggccttcggcttcgccttcctggacaccgaggtgttcgtgaccggccagagccccacccccagccccaccggcgtgagcagcgtgcagaccccccacctgcccacccacgccgacagccagacccccagcgccggcaccgacacccagaccttcagcggcagcgccgccaacgccaagctgaaccccacccccggcagcaacgccatcagcgacgtgcccggcgagagaagcaccgccagcaccttccccaccgaccccgtgagccccctgaccaccaccctgagcctggcccaccacagcagcgccgccctgcccgccagaaccagcaacaccaccatcaccgccaacaccagcgacgcctacctgaacgccagcgagaccaccaccctgagccccagcggcagcgccgtgatcagcaccaccaccatcgccaccacccccagcaagcccacctgcgacgagaagtacgccaacatcaccgtggactacctgtacaacaaggagaccaagctgttcaccgccaagctgaacgtgaacgagaacgtggagtgcggcaacaacacctgcaccaacaacgaggtgcacaacctgaccgagtgcaagaacgccagcgtgagcatcagccacaacagctgcaccgcccccgacaagaccctgatcctggacgtgccccccggcgtggagaagttccagctgcacgactgcacccaggtggagaaggccgacaccaccatctgcctgaagtggaagaacatcgagaccttcacctgcgacacccagaacatcacctacagattccagtgcggcaacatgatcttcgacaacaaggagatcaagctggagaacctggagcccgagcacgagtacaagtgcgacagcgagatcctgtacaacaaccacaagttcaccaacgccagcaagatcatcaagaccgacttcggcagccccggcgagccccagatcatcttctgcagaagcgaggccgcccaccagggcgtgatcacctggaaccccccccagagaagcttccacaacttcaccctgtgctacatcaaggagaccgagaaggactgcctgaacctggacaagaacctgatcaagtacgacctgcagaacctgaagccctacaccaagtacgtgctgagcctgcacgcctacatcatcgccaaggtgcagagaaacggcagcgccgccatgtgccacttcaccaccaagagcgccccccccagccaggtgtggaacatgaccgtgagcatgaccagcgacaacagcatgcacgtgaagtgcagaccccccagagacagaaacggcccccacgagagataccacctggaggtggaggccggcaacaccctggtgagaaacgagagccacaagaactgcgacttcagagtgaaggacctgcagtacagcaccgactacaccttcaaggcctacttccacaacggcgactaccccggcgagcccttcatcctgcaccacagcaccagctacaacagcaaggccctgatcgccttcctggccttcctgatcatcgtgaccagcatcgccctgctggtggtgctgtacaagatctacgacctgcacaagaagagaagctgcaacctggacgagcagcaggagctggtggagagagacgacgagaagcagctgatgaacgtggagcccatccacgccgacatcctgctggagacctacaagagaaagatcgccgacgagggcagactgttcctggccgagttccagagcatccccagagtgttcagcaagttccccatcaaggaggccagaaagcccttcaaccagaacaagaacagatacgtggacatcctgccctacgactacaacagagtggagctgagcgagatcaacggcgacgccggcagcaactacatcaacgccagctacatcgacggcttcaaggagcccagaaagtacatcgccgcccagggccccagagacgagaccgtggacgacttctggagaatgatctgggagcagaaggccaccgtgatcgtgatggtgaccagatgcgaggagggcaacagaaacaagtgcgccgagtactggcccagcatggaggagggcaccagagccttcggcgacgtggtggtgaagatcaaccagcacaagagatgccccgactacatcatccagaagctgaacatcgtgaactag

SEQ ID NO: 12427 - DNA, 3921 bp, synthetic construct
  misc_feature 1..3921: note = Description of Artificial Sequence: Synthetic coding sequence
  source 1..3921: mol_type = other DNA
atgaccatgtacctgtggctgaagctgctggccttcggcttcgccttcctggacaccgaggtgttcgtgaccggccagagccccacccccagccccaccggcctgaccaccgccaagatgcccagcgtgcccctgagcagcgaccccctgcccacccacaccaccgccttcagccccgccagcaccttcgagagagagaacgacttcagcgagaccaccaccagcctgagccccgacaacaccagcacccaggtgagccccgacagcctggacaacgccagcgccttcaacaccaccggcgtgagcagcgtgcagaccccccacctgcccacccacgccgacagccagacccccagcgccggcaccgacacccagaccttcagcggcagcgccgccaacgccaagctgaaccccacccccggcagcaacgccatcagcgacgtgcccggcgagagaagcaccgccagcaccttccccaccgaccccgtgagccccctgaccaccaccctgagcctggcccaccacagcagcgccgccctgcccgccagaaccagcaacaccaccatcaccgccaacaccagcgacgcctacctgaacgccagcgagaccaccaccctgagccccagcggcagcgccgtgatcagcaccaccaccatcgccaccacccccagcaagcccacctgcgacgagaagtacgccaacatcaccgtggactacctgtacaacaaggagaccaagctgttcaccgccaagctgaacgtgaacgagaacgtggagtgcggcaacaacacctgcaccaacaacgaggtgcacaacctgaccgagtgcaagaacgccagcgtgagcatcagccacaacagctgcaccgcccccgacaagaccctgatcctggacgtgccccccggcgtggagaagttccagctgcacgactgcacccaggtggagaaggccgacaccaccatctgcctgaagtggaagaacatcgagaccttcacctgcgacacccagaacatcacctacagattccagtgcggcaacatgatcttcgacaacaaggagatcaagctggagaacctggagcccgagcacgagtacaagtgcgacagcgagatcctgtacaacaaccacaagttcaccaacgccagcaagatcatcaagaccgacttcggcagccccggcgagccccagatcatcttctgcagaagcgaggccgcccaccagggcgtgatcacctggaaccccccccagagaagcttccacaacttcaccctgtgctacatcaaggagaccgagaaggactgcctgaacctggacaagaacctgatcaagtacgacctgcagaacctgaagccctacaccaagtacgtgctgagcctgcacgcctacatcatcgccaaggtgcagagaaacggcagcgccgccatgtgccacttcaccaccaagagcgccccccccagccaggtgtggaacatgaccgtgagcatgaccagcgacaacagcatgcacgtgaagtgcagaccccccagagacagaaacggcccccacgagagataccacctggaggtggaggccggcaacaccctggtgagaaacgagagccacaagaactgcgacttcagagtgaaggacctgcagtacagcaccgactacaccttcaaggcctacttccacaacggcgactaccccggcgagcccttcatcctgcaccacagcaccagctacaacagcaaggccctgatcgccttcctggccttcctgatcatcgtgaccagcatcgccctgctggtggtgctgtacaagatctacgacctgcacaagaagagaagctgcaacctggacgagcagcaggagctggtggagagagacgacgagaagcagctgatgaacgtggagcccatccacgccgacatcctgctggagacctacaagagaaagatcgccgacgagggcagactgttcctggccgagttccagagcatccccagagtgttcagcaagttccccatcaaggaggccagaaagcccttcaaccagaacaagaacagatacgtggacatcctgccctacgactacaacagagtggagctgagcgagatcaacggcgacgccggcagcaactacatcaacgccagctacatcgacggcttcaaggagcccagaaagtacatcgccgcccagggccccagagacgagaccgtggacgacttctggagaatgatctgggagcagaaggccaccgtgatcgtgatggtgaccagatgcgaggagggcaacagaaacaagtgcgccgagtactggcccagcatggaggagggcaccagagccttcggcgacgtggtggtgaagatcaaccagcacaagagatgccccgactacatcatccagaagctgaacatcgtgaacaagaaggagaaggccaccggcagagaggtgacccacatccagttcaccagctggcccgaccacggcgtgcccgaggacccccacctgctgctgaagctgagaagaagagtgaacgccttcagcaacttcttcagcggccccatcgtggtgcactgcagcgccggcgtgggcagaaccggcacctacatcggcatcgacgccatgctggagggcctggaggccgagaacaaggtggacgtgtacggctacgtggtgaagctgagaagacagagatgcctgatggtgcaggtggaggcccagtacatcctgatccaccaggccctggtggagtacaaccagttcggcgagaccgaggtgaacctgagcgagctgcacccctacctgcacaacatgaagaagagagacccccccagcgagcccagccccctggaggccgagttccagagactgcccagctacagaagctggagaacccagcacatcggcaaccaggaggagaacaagagcaagaacagaaacagcaacgtgatcccctacgactacaacagagtgcccctgaagcacgagctggagatgagcaaggagagcgagcacgacagcgacgagagcagcgacgacgacagcgacagcgaggagcccagcaagtacatcaacgccagcttcatcatgagctactggaagcccgaggtgatgatcgccgcccagggccccctgaaggagaccatcggcgacttctggcagatgatcttccagagaaaggtgaaggtgatcgtgatgctgaccgagctgaagcacggcgaccaggagatctgcgcccagtactggggcgagggcaagcagacctacggcgacatcgaggtggacctgaaggacaccgacaagagcagcacctacaccctgagagtgttcgagctgagacacagcaagagaaaggacagcagaaccgtgtaccagtaccagtacaccaactggagcgtggagcagctgcccgccgagcccaaggagctgatcagcatgatccaggtggtgaagcagaagctgccccagaagaacagcagcgagggcaacaagcaccacaagagcacccccctgctgatccactgcagagacggcagccagcagaccggcatcttctgcgccctgctgaacctgctggagagcgccgagaccgaggaggtggtggacatcttccaggtggtgaaggccctgagaaaggccagacccggcatggtgagcaccttcgagcagtaccagttcctgtacgacgtgatcgccagcacctaccccgcccagaacggccaggtgaagaagaacaaccaccaggaggacaagatcgagttcgacaacgaggtggacaaggtgaagcaggacgccaactgcgtgaaccccctgggcgcccccgagaagctgcccgaggccaaggagcaggccgagggcagcgagcccaccagcggcaccgagggccccgagcacagcgtgaacggccccgccagccccgccctgaaccagggcagctag

SEQ ID NO: 12428 - DNA, 441 bp, synthetic construct
  misc_feature 1..441: note = Description of Artificial Sequence: Synthetic coding sequence
  source 1..441: mol_type = other DNA
atgtacctgtggctgaagctgctggccttcggcttcgccttcctggacaccgaggtgttcgtgaccggccagagccccacccccagccccaccgacgcctacctgaacgccagcgagaccaccaccctgagccccagcggcagcgccgtgatcagcaccaccaccatcgccaccacccccagcaagcccacctgcgacgagaagtacgccaacatcaccgtggactacctgtacaacaaggagaccaagctgttcaccgccaagctgaacgtgaacgagaacgtggagtgcggcaacaacacctgcaccaacaacgaggtgcacaacctgaccgagtgcaagaacgccagcgtgagcatcagccacaacagctgcaccgcccccgacaagaccctgatcctggacgtgccccccggcgtggagaagttccagctgcactag

SEQ ID NO: 12429 - DNA, 351 bp, synthetic construct
  misc_feature 1..351: note = Description of Artificial Sequence: Synthetic coding sequence
  source 1..351: mol_type = other DNA
atgtacctgtggctgaagctgctggccttcggcttcgccttcctggacaccgaggtgttcgtgaccggccagagccccacccccagccccaccggcctgaccaccgccaagatgcccagcgtgcccctgagcagcgaccccctgcccacccacaccaccgccttcagccccgccagcaccttcgagagagagaacgacttcagcgagaccaccaccagcctgagccccgacaacaccagcacccaggtgagccccgacagcctggacaacgccagcgccttcaacaccaccggcgtgagcagcgtgcagaccccccacctgcccacccacgccgacagccagaccccctag

SEQ ID NO: 12430 - DNA, 3915 bp, synthetic construct
  misc_feature 1..3915: note = Description of Artificial Sequence: Synthetic coding sequence
  source 1..3915: mol_type = other DNA
atgtacctgtggctgaagctgctggccttcggcttcgccttcctggacaccgaggtgttcgtgaccggccagagccccacccccagccccaccggcctgaccaccgccaagatgcccagcgtgcccctgagcagcgaccccctgcccacccacaccaccgccttcagccccgccagcaccttcgagagagagaacgacttcagcgagaccaccaccagcctgagccccgacaacaccagcacccaggtgagccccgacagcctggacaacgccagcgccttcaacaccaccggcgtgagcagcgtgcagaccccccacctgcccacccacgccgacagccagacccccagcgccggcaccgacacccagaccttcagcggcagcgccgccaacgccaagctgaaccccacccccggcagcaacgccatcagcgacgtgcccggcgagagaagcaccgccagcaccttccccaccgaccccgtgagccccctgaccaccaccctgagcctggcccaccacagcagcgccgccctgcccgccagaaccagcaacaccaccatcaccgccaacaccagcgacgcctacctgaacgccagcgagaccaccaccctgagccccagcggcagcgccgtgatcagcaccaccaccatcgccaccacccccagcaagcccacctgcgacgagaagtacgccaacatcaccgtggactacctgtacaacaaggagaccaagctgttcaccgccaagctgaacgtgaacgagaacgtggagtgcggcaacaacacctgcaccaacaacgaggtgcacaacctgaccgagtgcaagaacgccagcgtgagcatcagccacaacagctgcaccgcccccgacaagaccctgatcctggacgtgccccccggcgtggagaagttccagctgcacgactgcacccaggtggagaaggccgacaccaccatctgcctgaagtggaagaacatcgagaccttcacctgcgacacccagaacatcacctacagattccagtgcggcaacatgatcttcgacaacaaggagatcaagctggagaacctggagcccgagcacgagtacaagtgcgacagcgagatcctgtacaacaaccacaagttcaccaacgccagcaagatcatcaagaccgacttcggcagccccggcgagccccagatcatcttctgcagaagcgaggccgcccaccagggcgtgatcacctggaaccccccccagagaagcttccacaacttcaccctgtgctacatcaaggagaccgagaaggactgcctgaacctggacaagaacctgatcaagtacgacctgcagaacctgaagccctacaccaagtacgtgctgagcctgcacgcctacatcatcgccaaggtgcagagaaacggcagcgccgccatgtgccacttcaccaccaagagcgccccccccagccaggtgtggaacatgaccgtgagcatgaccagcgacaacagcatgcacgtgaagtgcagaccccccagagacagaaacggcccccacgagagataccacctggaggtggaggccggcaacaccctggtgagaaacgagagccacaagaactgcgacttcagagtgaaggacctgcagtacagcaccgactacaccttcaaggcctacttccacaacggcgactaccccggcgagcccttcatcctgcaccacagcaccagctacaacagcaaggccctgatcgccttcctggccttcctgatcatcgtgaccagcatcgccctgctggtggtgctgtacaagatctacgacctgcacaagaagagaagctgcaacctggacgagcagcaggagctggtggagagagacgacgagaagcagctgatgaacgtggagcccatccacgccgacatcctgctggagacctacaagagaaagatcgccgacgagggcagactgttcctggccgagttccagagcatccccagagtgttcagcaagttccccatcaaggaggccagaaagcccttcaaccagaacaagaacagatacgtggacatcctgccctacgactacaacagagtggagctgagcgagatcaacggcgacgccggcagcaactacatcaacgccagctacatcgacggcttcaaggagcccagaaagtacatcgccgcccagggccccagagacgagaccgtggacgacttctggagaatgatctgggagcagaaggccaccgtgatcgtgatggtgaccagatgcgaggagggcaacagaaacaagtgcgccgagtactggcccagcatggaggagggcaccagagccttcggcgacgtggtggtgaagatcaaccagcacaagagatgccccgactacatcatccagaagctgaacatcgtgaacaagaaggagaaggccaccggcagagaggtgacccacatccagttcaccagctggcccgaccacggcgtgcccgaggacccccacctgctgctgaagctgagaagaagagtgaacgccttcagcaacttcttcagcggccccatcgtggtgcactgcagcgccggcgtgggcagaaccggcacctacatcggcatcgacgccatgctggagggcctggaggccgagaacaaggtggacgtgtacggctacgtggtgaagctgagaagacagagatgcctgatggtgcaggtggaggcccagtacatcctgatccaccaggccctggtggagtacaaccagttcggcgagaccgaggtgaacctgagcgagctgcacccctacctgcacaacatgaagaagagagacccccccagcgagcccagccccctggaggccgagttccagagactgcccagctacagaagctggagaacccagcacatcggcaaccaggaggagaacaagagcaagaacagaaacagcaacgtgatcccctacgactacaacagagtgcccctgaagcacgagctggagatgagcaaggagagcgagcacgacagcgacgagagcagcgacgacgacagcgacagcgaggagcccagcaagtacatcaacgccagcttcatcatgagctactggaagcccgaggtgatgatcgccgcccagggccccctgaaggagaccatcggcgacttctggcagatgatcttccagagaaaggtgaaggtgatcgtgatgctgaccgagctgaagcacggcgaccaggagatctgcgcccagtactggggcgagggcaagcagacctacggcgacatcgaggtggacctgaaggacaccgacaagagcagcacctacaccctgagagtgttcgagctgagacacagcaagagaaaggacagcagaaccgtgtaccagtaccagtacaccaactggagcgtggagcagctgcccgccgagcccaaggagctgatcagcatgatccaggtggtgaagcagaagctgccccagaagaacagcagcgagggcaacaagcaccacaagagcacccccctgctgatccactgcagagacggcagccagcagaccggcatcttctgcgccctgctgaacctgctggagagcgccgagaccgaggaggtggtggacatcttccaggtggtgaaggccctgagaaaggccagacccggcatggtgagcaccttcgagcagtaccagttcctgtacgacgtgatcgccagcacctaccccgcccagaacggccaggtgaagaagaacaaccaccaggaggacaagatcgagttcgacaacgaggtggacaaggtgaagcaggacgccaactgcgtgaaccccctgggcgcccccgagaagctgcccgaggccaaggagcaggccgagggcagcgagcccaccagcggcaccgagggccccgagcacagcgtgaacggccccgccagccccgccctgaaccagggcagctag

SEQ ID NO: 12431 - DNA, 1797 bp, synthetic construct
  misc_feature 1..1797: note = Description of Artificial Sequence: Synthetic coding sequence
  source 1..1797: mol_type = other DNA
atgtacctgtggctgaagctgctggccttcggcttcgccttcctggacaccgaggtgttcgtgaccggccagagccccacccccagccccaccggcgtgagcagcgtgcagaccccccacctgcccacccacgccgacagccagacccccagcgccggcaccgacacccagaccttcagcggcagcgccgccaacgccaagctgaaccccacccccggcagcaacgccatcagcgacgcctacctgaacgccagcgagaccaccaccctgagccccagcggcagcgccgtgatcagcaccaccaccatcgccaccacccccagcaagcccacctgcgacgagaagtacgccaacatcaccgtggactacctgtacaacaaggagaccaagctgttcaccgccaagctgaacgtgaacgagaacgtggagtgcggcaacaacacctgcaccaacaacgaggtgcacaacctgaccgagtgcaagaacgccagcgtgagcatcagccacaacagctgcaccgcccccgacaagaccctgatcctggacgtgccccccggcgtggagaagttccagctgcacgactgcacccaggtggagaaggccgacaccaccatctgcctgaagtggaagaacatcgagaccttcacctgcgacacccagaacatcacctacagattccagtgcggcaacatgatcttcgacaacaaggagatcaagctggagaacctggagcccgagcacgagtacaagtgcgacagcgagatcctgtacaacaaccacaagttcaccaacgccagcaagatcatcaagaccgacttcggcagccccggcgagccccagatcatcttctgcagaagcgaggccgcccaccagggcgtgatcacctggaaccccccccagagaagcttccacaacttcaccctgtgctacatcaaggagaccgagaaggactgcctgaacctggacaagaacctgatcaagtacgacctgcagaacctgaagccctacaccaagtacgtgctgagcctgcacgcctacatcatcgccaaggtgcagagaaacggcagcgccgccatgtgccacttcaccaccaagagcgccccccccagccaggtgtggaacatgaccgtgagcatgaccagcgacaacagcatgcacgtgaagtgcagaccccccagagacagaaacggcccccacgagagataccacctggaggtggaggccggcaacaccctggtgagaaacgagagccacaagaactgcgacttcagagtgaaggacctgcagtacagcaccgactacaccttcaaggcctacttccacaacggcgactaccccggcgagcccttcatcctgcaccacagcaccagctacaacagcaaggccctgatcgccttcctggccttcctgatcatcgtgaccagcatcgccctgctggtggtgctgtacaagatctacgacctgcacaagaagagaagctgcaacctggacgagcagcaggagctggtggagagagacgacgagaagcagctgatgaacgtggagcccatccacgccgacatcctgctggagacctacaagagaaagatcgccgacgagggcagactgttcctggccgagttccagagcatccccagagtgttcagcaagttccccatcaaggaggccagaaagcccttcaaccagaacaagaacagatacgtggacatcctgccctacgactacaacagagtggagctgagcgagatcaacggcgacgccggcagcaactacatcaacgccagctacatcgactag

SEQ ID NO: 12432 - DNA, 2271 bp, synthetic construct
  misc_feature 1..2271: note = Description of Artificial Sequence: Synthetic coding sequence
  source 1..2271: mol_type = other DNA
atgtacctgtggctgaagctgctggccttcggcttcgccttcctggacaccgaggtgttcgtgaccggccagagccccacccccagccccaccggcctgaccaccgccaagatgcccagcgtgcccctgagcagcgaccccctgcccacccacaccaccgccttcagccccgccagcaccttcgagagagagaacgacttcagcgagaccaccaccagcctgagccccgacaacaccagcacccaggtgagccccgacagcctggacaacgccagcgccttcaacaccaccggcgtgagcagcgtgcagaccccccacctgcccacccacgccgacagccagacccccagcgccggcaccgacacccagaccttcagcggcagcgccgccaacgccaagctgaaccccacccccggcagcaacgccatcagcgacgcctacctgaacgccagcgagaccaccaccctgagccccagcggcagcgccgtgatcagcaccaccaccatcgccaccacccccagcaagcccacctgcgacgagaagtacgccaacatcaccgtggactacctgtacaacaaggagaccaagctgttcaccgccaagctgaacgtgaacgagaacgtggagtgcggcaacaacacctgcaccaacaacgaggtgcacaacctgaccgagtgcaagaacgccagcgtgagcatcagccacaacagctgcaccgcccccgacaagaccctgatcctggacgtgccccccggcgtggagaagttccagctgcacgactgcacccaggtggagaaggccgacaccaccatctgcctgaagtggaagaacatcgagaccttcacctgcgacacccagaacatcacctacagattccagtgcggcaacatgatcttcgacaacaaggagatcaagctggagaacctggagcccgagcacgagtacaagtgcgacagcgagatcctgtacaacaaccacaagttcaccaacgccagcaagatcatcaagaccgacttcggcagccccggcgagccccagatcatcttctgcagaagcgaggccgcccaccagggcgtgatcacctggaaccccccccagagaagcttccacaacttcaccctgtgctacatcaaggagaccgagaaggactgcctgaacctggacaagaacctgatcaagtacgacctgcagaacctgaagccctacaccaagtacgtgctgagcctgcacgcctacatcatcgccaaggtgcagagaaacggcagcgccgccatgtgccacttcaccaccaagagcgccccccccagccaggtgtggaacatgaccgtgagcatgaccagcgacaacagcatgcacgtgaagtgcagaccccccagagacagaaacggcccccacgagagataccacctggaggtggaggccggcaacaccctggtgagaaacgagagccacaagaactgcgacttcagagtgaaggacctgcagtacagcaccgactacaccttcaaggcctacttccacaacggcgactaccccggcgagcccttcatcctgcaccacagcaccagctacaacagcaaggccctgatcgccttcctggccttcctgatcatcgtgaccagcatcgccctgctggtggtgctgtacaagatctacgacctgcacaagaagagaagctgcaacctggacgagcagcaggagctggtggagagagacgacgagaagcagctgatgaacgtggagcccatccacgccgacatcctgctggagacctacaagagaaagatcgccgacgagggcagactgttcctggccgagttccagagcatccccagagtgttcagcaagttccccatcaaggaggccagaaagcccttcaaccagaacaagaacagatacgtggacatcctgccctacgactacaacagagtggagctgagcgagatcaacggcgacgccggcagcaactacatcaacgccagctacatcgacggcttcaaggagcccagaaagtacatcgccgcccagggccccagagacgagaccgtggacgacttctggagaatgatctgggagcagaaggccaccgtgatcgtgatggtgaccagatgcgaggagggcaacagaaacaagtgcgccgagtactggcccagcatggaggagggcaccagagccttcggcgacgtggtggtgaagatcaaccagcacaagagatgccccgactacatcatccagaagctgaacatcgtgaacaagcagaagagcaagtag

SEQ ID NO: 12433 - DNA, 1662 bp, synthetic construct
  misc_feature 1..1662: note = Description of Artificial Sequence: Synthetic coding sequence
  source 1..1662: mol_type = other DNA
agcgactacatgatcatcaagaagaagagcaactacgaggtgctggagaaggacgtgggcctgaagagattcttccccaagagcctgctggacagcgtgaaggccaagaccctgagaaagctgatccagcagaccttcagacagttcgccaacctgaacagagaggagagcatcctgaagttcttcgagatcctgagccccgtgtacagattcgacaaggagtgcttcaagtgcgccctgggcagcagctggatcatcagcgtggagctggccatcggccccgaggagggcatcagctacctgaccgacaagggctgcaaccccacccacctggccgacttcacccaggtgcagaccatccagtacagcaacagcgaggacaaggacagaaagggcatgctgcagctgaagatcgccggcgcccccgagcccctgaccgtgaccgcccccagcctgaccatcgccgagaacatggccgacctgatcgacggctactgcagactggtgaacggcaccagccagagcttcatcatcagaccccagaaggagggcgagagagccctgcccagcatccccaagctggccaacagcgagaagcagggcatgagaacccacgccgtgagcgtgagcgagaccgacgactacgccgagatcatcgacgaggaggacacctacaccatgcccagcaccagagactacgagatccagagagagagaatcgagctgggcagatgcatcggcgagggccagttcggcgacgtgcaccagggcatctacatgagccccgagaaccccgccctggccgtggccatcaagacctgcaagaactgcaccagcgacagcgtgagagagaagttcctgcaggaggcctgccactacaccagcctgcactggaactggtgcagatacatcagcgaccccaacgtggactgccccgaccccagaaacgccgaggtgaccatgagacagttcgaccacccccacatcgtgaagctgatcggcgtgatcaccgagaaccccgtgtggatcatcatggagctgtgcaccctgggcgagctgagaagcttcctgcaggtgagaaagtacagcctggacctggccagcctgatcctgtacgcctaccagctgagcaccgccctggcctacctggagagcaagagattcgtgcacagagacatcgccgccagaaacgtgctggtgagcagcaacgactgcgtgaagctgggcgacttcggcctgagcagatacatggaggacagcacctactacaaggccagcaagggcaagctgcccatcaagtggatggcccccgagagcatcaacttcagaagattcaccagcgccagcgacgtgtggatgttcggcgtgtgcatgtgggagatcctgatgcacggcgtgaagcccttccagggcgtgaagaacaacgacgtgatcggcagaatcgagaacggcgagagactgcccatgccccccaactgcccccccaccctgtacagcctgatgaccaagtgctgggcctacgaccccagcagaagacccagattcaccgagctgaaggcccagctgagcttccagaaccccgcccagatgctgcccgccagcggcagactgcccaaccagccctgccccgagagagagaactacagcttcgccaccttctag

SEQ ID NO: 12434 - DNA, 2931 bp, synthetic construct
  misc_feature 1..2931: note = Description of Artificial Sequence: Synthetic coding sequence
  source 1..2931: mol_type = other DNA
agaagcttcatcatcctgaaggccatcgtgagccagccccccggccccgtgctgagcggcatggagatgctgctgatgagcggctacgagctgagaatcagatacctgcccaagggcttcctgaaccagttcaccgaggacaagcccaccctgaacttcttctaccagcaggtgaagagcgactacatgctggagatcgccgaccaggtggaccaggagatcgccctgaagctgggctgcctggagatcagaagaagctactgggagatgagaggcaacgccctggagaagaagagcaactacgaggtgctggagaaggacgtgggcctgaagagattcttccccaagagcctgctggacagcgtgaaggccaagaccctgagaaagctgatccagcagaccttcagacagttcgccaacctgaacagagaggagagcatcctgaagttcttcgagatcctgagccccgtgtacagattcgacaaggagtgcttcaagtgcgccctgggcagcagctggatcatcagcgtggagctggccatcggccccgaggagggcatcagctacctgaccgacaagggctgcaaccccacccacctggccgacttcacccaggtgcagaccatccagtacagcaacagcgaggacaaggacagaaagggcatgctgcagctgaagatcgccggcgcccccgagcccctgaccgtgaccgcccccagcctgaccatcgccgagaacatggccgacctgatcgacggctactgcagactggtgaacggcaccagccagagcttcatcatcagaccccagaaggagggcgagagagccctgcccagcatccccaagctggccaacagcgagaagcagggcatgagaacccacgccgtgagcgtgagcgacgagatccccggcgccgagaccgacgactacgccgagatcatcgacgaggaggacacctacaccatgcccagcatcaagagctactgcatcgacgtggccagagactacgagatccagagagagagaatcgagctgggcagatgcatcggcgagggccagttcggcgacgtgcaccagggcatctacatgagccccgagaaccccgccctggccgtggccatcaagacctgcaagaactgcaccagcgacagcgtgagagagaagttcctgcaggaggccctgaccatgagacagttcgaccacccccacatcgtgaagctgatcggcgtgatcaccgagaaccccgtgtggatcatcatggagctgtgcaccctgggcgagctgagaagcttcctgcaggtgagaaagtacagcctggacctggccagcctgatcctgtacgcctaccagctgagcaccgccctggcctacctggagagcaagagattcgtgcacagagacatcgccgccagaaacgtgctggtgagcagcaacgactgcgtgaagctgggcgacttcggcctgagcagatacatggaggacagcacctactacaaggccagcaagggcaagctgcccatcaagtggatggcccccgagagcatcaacttcagaagattcaccagcgccagcgacgtgtggatgttcggcgtgtgcatgtgggagatcctgatgcacggcgtgaagcccttccagggcgtgaagaacaacgacgtgatcggcagaatcgagaacggcgagagactgcccatgccccccaactgcccccccaccctgtacagcctgatgaccaagtgctgggcctacgaccccagcagaagacccagattcaccgagctgaaggcccagctgagcaccatcctggaggaggagaaggcccagcaggaggagagaatgagaatggagagcagaagacaggccaccgtgagctgggacagcggcggcagcgacgaggccccccccaagcccagcagacccggctaccccagccccagaagcagcgagggcttctaccccagcccccagcacatggtgcagaccaaccactaccaggtgagcggctaccccggcagccacggcatcaccgccatggccggcagcatctaccccggccaggccagcctgctggaccagaccgacagctggaaccacagaccccaggagatcgccatgtggcagcccaacgtggaggacagcaccgtgctggacctgagaggcatcggccaggtgctgcccacccacctgatggaggagagactgatcagacagcagcaggagatggaggaggaccagagatggctggagaaggaggagagattcctgaagcccgacgtgagactgagcagaggcagcatcgacagagaggacggcagcctgcagggccccatcggcaaccagcacatctaccagcccgtgggcaagcccgaccccgccgccccccccaagaagccccccagacccggcgcccccggccacctgggcagcctggccagcctgagcagccccgccgacagctacaacgagggcgtgaagcccctgagactgcagccccaggagatcagccccccccccaccgccaacctggacagaagcaacgacaaggtgtacgagaacgtgaccggcctggtgaaggccgtgatcgagatgagcagcaagatccagcccgccccccccgaggagtacgtgcccatggtgaaggaggtgggcctggccctgagaaccctgctggccaccgtggacgagaccatccccctgctgcccgccagcacccacagagagatcgagatggcccagaagctgctgaacagcgacctgggcgagctgatcaacaagatgaagctggcccagcagtacgtgatgaccagcctgcagcaggagtacaagaagcagatgctgaccgccgcccacgccctggccgtggacgccaagaacctgctggacgtgatcgaccaggccagactgaagatgctgggccagaccagaccccactag

SEQ ID NO: 12435 - DNA, 3024 bp, synthetic construct
  misc_feature 1..3024: note = Description of Artificial Sequence: Synthetic coding sequence
  source 1..3024: mol_type = other DNA
aaggccgagtacgacagatacctggccagcagcaagatcatggccgccgcctacctggaccccaacctgaaccacacccccaaggagtggaagtacgagctgagaatcagatacctgcccaagggcttcctgaaccagttcaccgaggacaagcccaccctgaacttcttctaccagcaggtgaagagcgactacatgctggagatcgccgaccaggtggaccaggagatcgccctgaagctgggctgcctggagatcagaagaagctactgggagatgagaggcaacgccctggagaagaagagcaactacgaggtgctggagaaggacgtgggcctgaagagattcttccccaagagcctgctggacagcgtgaaggccaagaccctgagaaagctgatccagcagaccttcagacagttcgccaacctgaacagagaggagagcatcctgaagttcttcgagatcctgagccccgtgtacagattcgacaaggagtgcttcaagtgcgccctgggcagcagctggatcatcagcgtggagctggccatcggccccgaggagggcatcagctacctgaccgacaagggctgcaaccccacccacctggccgacttcacccaggtgcagaccatccagtacagcaacagcgaggacaaggacagaaagggcatgctgcagctgaagatcgccggcgcccccgagcccctgaccgtgaccgcccccagcctgaccatcgccgagaacatggccgacctgatcgacggctactgcagactggtgaacggcaccagccagagcttcatcatcagaccccagaaggagggcgagagagccctgcccagcatccccaagctggccaacagcgagaagcagggcatgagaacccacgccgtgagcgtgagcggcgtgagccactgccagcacaaggtgaagaaggccagaagattcctgcccctggtgttctgcagccacgacccccccagcaccgacgagatcagcggcgacgagaccgacgactacgccgagatcatcgacgaggaggacacctacaccatgcccagcatcaagagctactgcatcgacgtggccagagactacgagatccagagagagagaatcgagctgggcagatgcatcggcgagggccagttcggcgacgtgcaccagggcatctacatgagccccgagaaccccgccctggccgtggccatcaagacctgcaagaactgcaccagcgacagcgtgagagagaagttcctgcaggaggccctgaccatgagacagttcgaccacccccacatcgtgaagctgatcggcgtgatcaccgagaaccccgtgtggatcatcatggagctgtgcaccctgggcgagctgagaagcttcctgcaggtgagaaagtacagcctggacctggccagcctgatcctgtacgcctaccagctgagcaccgccctggcctacctggagagcaagagattcgtgcacagagacatcgccgccagaaacgtgctggtgagcagcaacgactgcgtgaagctgggcgacttcggcctgagcagatacatggaggacagcacctactacaaggccagcaagggcaagctgcccatcaagtggatggcccccgagagcatcaacttcagaagattcaccagcgccagcgacgtgtggatgttcggcgtgtgcatgtgggagatcctgatgcacggcgtgaagcccttccagggcgtgaagaacaacgacgtgatcggcagaatcgagaacggcgagagactgcccatgccccccaactgcccccccaccctgtacagcctgatgaccaagtgctgggcctacgaccccagcagaagacccagattcaccgagctgaaggcccagctgagcaccatcctggaggaggagaaggcccagcaggaggagagaatgagaatggagagcagaagacaggccaccgtgagctgggacagcggcggcagcgacgaggccccccccaagcccagcagacccggctaccccagccccagaagcagcgagggcttctaccccagcccccagcacatggtgcagaccaaccactaccaggtgagcggctaccccggcagccacggcatcaccgccatggccggcagcatctaccccggccaggccagcctgctggaccagaccgacagctggaaccacagaccccaggagatcgccatgtggcagcccaacgtggaggacagcaccgtgctggacctgagaggcatcggccaggtgctgcccacccacctgatggaggagagactgatcagacagcagcaggagatggaggaggaccagagatggctggagaaggaggagagattcctgaagcccgacgtgagactgagcagaggcagcatcgacagagaggacggcagcctgcagggccccatcggcaaccagcacatctaccagcccgtgggcaagcccgaccccgccgccccccccaagaagccccccagacccggcgcccccggccacctgggcagcctggccagcctgagcagccccgccgacagctacaacgagggcgtgaagcccctgagactgcagccccaggagatcagccccccccccaccgccaacctggacagaagcaacgacaaggtgtacgagaacgtgaccggcctggtgaaggccgtgatcgagatgagcagcaagatccagcccgccccccccgaggagtacgtgcccatggtgaaggaggtgggcctggccctgagaaccctgctggccaccgtggacgagaccatccccctgctgcccgccagcacccacagagagatcgagatggcccagaagctgctgaacagcgacctgggcgagctgatcaacaagatgaagctggcccagcagtacgtgatgaccagcctgcagcaggagtacaagaagcagatgctgaccgccgcccacgccctggccgtggacgccaagaacctgctggacgtgatcgaccaggccagactgaagatgctgggccagaccagaccccactag

SEQ ID NO: 12436 - DNA, 3198 bp, synthetic construct
  misc_feature 1..3198: note = Description of Artificial Sequence: Synthetic coding sequence
  source 1..3198: mol_type = other DNA
atggccgccgcctacctggaccccaacctgaaccacacccccaacagcagcaccaagacccacctgggcaccggcatggagagaagccccggcgccatggagagagtgctgaaggtgttccactacttcgagagcaacagcgagcccaccacctgggccagcatcatcagacacggcgacgccaccgacgtgagaggcatcatccagaagatcgtggacagccacaaggtgaagcacgtggcctgctacggcttcagactgagccacctgagaagcgaggaggtgcactggctgcacgtggacatgggcgtgagcagcgtgagagagaagtacgagctggcccacccccccgaggagtggaagtacgagctgagaatcagatacctgcccaagggcttcctgaaccagttcaccgaggacaagcccaccctgaacttcttctaccagcaggtgaagagcgactacatgctggagatcgccgaccaggtggaccaggagatcgccctgaagctgggctgcctggagatcagaagaagctactgggagatgagaggcaacgccctggagaagaagagcaactacgaggtgctggagaaggacgtgggcctgaagagattcttccccaagagcctgctggacagcgtgaaggccaagaccctgagaaagctgatccagcagaccttcagacagttcgccaacctgaacagagaggagagcatcctgaagttcttcgagatcctgagccccgtgtacagattcgacaaggagtgcttcaagtgcgccctgggcagcagctggatcatcagcgtggagctggccatcggccccgaggagggcatcagctacctgaccgacaagggctgcaaccccacccacctggccgacttcacccaggtgcagaccatccagtacagcaacagcgaggacaaggacagaaagggcatgctgcagctgaagatcgccggcgcccccgagcccctgaccgtgaccgcccccagcctgaccatcgccgagaacatggccgacctgatcgacggctactgcagactggtgaacggcaccagccagagcttcatcatcagaccccagaaggagggcgagagagccctgcccagcatccccaagctggccaacagcgagaagcagggcatgagaacccacgccgtgagcgtgagcgagaccgacgactacgccgagatcatcgacgaggaggacacctacaccatgcccagcaccagagactacgagatccagagagagagaatcgagctgggcagatgcatcggcgagggccagttcggcgacgtgcaccagggcatctacatgagccccgagaaccccgccctggccgtggccatcaagacctgcaagaactgcaccagcgacagcgtgagagagaagttcctgcaggaggccctgaccatgagacagttcgaccacccccacatcgtgaagctgatcggcgtgatcaccgagaaccccgtgtggatcatcatggagctgtgcaccctgggcgagctgagaagcttcctgcaggtgagaaagtacagcctggacctggccagcctgatcctgtacgcctaccagctgagcaccgccctggcctacctggagagcaagagattcgtgcacagagacatcgccgccagaaacgtgctggtgagcagcaacgactgcgtgaagctgggcgacttcggcctgagcagatacatggaggacagcacctactacaaggccagcaagggcaagctgcccatcaagtggatggcccccgagagcatcaacttcagaagattcaccagcgccagcgacgtgtggatgttcggcgtgtgcatgtgggagatcctgatgcacggcgtgaagcccttccagggcgtgaagaacaacgacgtgatcggcagaatcgagaacggcgagagactgcccatgccccccaactgcccccccaccctgtacagcctgatgaccaagtgctgggcctacgaccccagcagaagacccagattcaccgagctgaaggcccagctgagcaccatcctggaggaggagaaggcccagcaggaggagagaatgagaatggagagcagaagacaggccaccgtgagctgggacagcggcggcagcgacgaggccccccccaagcccagcagacccggctaccccagccccagaagcagcgagggcttctaccccagcccccagcacatggtgcagaccaaccactaccaggtgagcggctaccccggcagccacggcatcaccgccatggccggcagcatctaccccggccaggccagcctgctggaccagaccgacagctggaaccacagaccccaggagatcgccatgtggcagcccaacgtggaggacagcaccgtgctggacctgagaggcatcggccaggtgctgcccacccacctgatggaggagagactgatcagacagcagcaggagatggaggaggaccagagatggctggagaaggaggagagattcctgaagcccgacgtgagactgagcagaggcagcatcgacagagaggacggcagcctgcagggccccatcggcaaccagcacatctaccagcccgtgggcaagcccggcaaggaggagaagaactgggccgagagaaaccccgccgccccccccaagaagccccccagacccggcgcccccggccacctgggcagcctggccagcctgagcagccccgccgacagctacaacgagggcgtgaagcccaaccagctgcagccccaggagatcagccccccccccaccgccaacctggacagaagcaacgacaaggtgtacgagaacgtgaccggcctggtgaaggccgtgatcgagatgagcagcaagatccagcccgccccccccgaggagtacgtgcccatggtgaaggaggtgggcctggccctgagaaccctgctggccaccgtggacgagaccatccccctgctgcccgccagcacccacagagagatcgagatggcccagaagctgctgaacagcgacctgggcgagctgatcaacaagatgaagctggcccagcagtacgtgatgaccagcctgcagcaggagtacaagaagcagatgctgaccgccgcccacgccctggccgtggacgccaagaacctgctggacgtgatcgaccaggccagactgaagatgctgggccagaccagaccccactag

SEQ ID NO: 12437 - DNA, 2253 bp, synthetic construct
  misc_feature 1..2253: note = Description of Artificial Sequence: Synthetic coding sequence
  source 1..2253: mol_type = other DNA
atggccgacctgatcgacggctactgcagactggtgaacggcaccagccagagcttcatcatcagaccccagaaggagggcgagagagccctgcccagcatccccaagctggccaacagcgagaagcagggcatgagaacccacgccgtgagcgtgagcggcgtgagccactgccagcacaaggtgaagaaggccagaagattcctgcccctggtgttctgcagccacgacccccccagcaccgacgagatcagcggcgacgagaccgacgactacgccgagatcatcgacgaggaggacacctacaccatgcccagcaccagagactacgagatccagagagagagaatcgagctgggcagatgcatcggcgagggccagttcggcgacgtgcaccagggcatctacatgagccccgagaaccccgccctggccgtggccatcaagacctgcaagaactgcaccagcgacagcgtgagagagaagttcctgcaggaggccctgaccatgagacagttcgaccacccccacatcgtgaagctgatcggcgtgatcaccgagaaccccgtgtggatcatcatggagctgtgcaccctgggcgagctgagaagcttcctgcaggtgagaaagtacagcctggacctggccagcctgatcctgtacgcctaccagctgagcaccgccctggcctacctggagagcaagagattcgtgcacagagacatcgccgccagaaacgtgctggtgagcagcaacgactgcgtgaagctgggcgacttcggcctgagcagatacatggaggacagcacctactacaaggccagcaagggcaagctgcccatcaagtggatggcccccgagagcatcaacttcagaagattcaccagcgccagcgacgtgtggatgttcggcgtgtgcatgtgggagatcctgatgcacggcgtgaagcccttccagggcgtgaagaacaacgacgtgatcggcagaatcgagaacggcgagagactgcccatgccccccaactgcccccccaccctgtacagcctgatgaccaagtgctgggcctacgaccccagcagaagacccagattcaccgagctgaaggcccagctgagcaccatcctggaggaggagaaggcccagcaggaggagagaatgagaatggagagcagaagacaggccaccgtgagctgggacagcggcggcagcgacgaggccccccccaagcccagcagacccggctaccccagccccagaagcagcgagggcttctaccccagcccccagcacatggtgcagaccaaccactaccaggtgagcggctaccccggcagccacggcatcaccgccatggccggcagcatctaccccggccaggccagcctgctggaccagaccgacagctggaaccacagaccccaggagatcgccatgtggcagcccaacgtggaggacagcaccgtgctggacctgagaggcatcggccaggtgctgcccacccacctgatggaggagagactgatcagacagcagcaggagatggaggaggaccagagatggctggagaaggaggagagattcctgaagcccgacgtgagactgagcagaggcagcatcgacagagaggacggcagcctgcagggccccatcggcaaccagcacatctaccagcccgtgggcaagcccgaccccgccgccccccccaagaagccccccagacccggcgcccccggccacctgggcagcctggccagcctgagcagccccgccgacagctacaacgagggcgtgaagccctgcagactgcagccccaggagatcagccccccccccaccgccaacctggacagaagcaacgacaaggtgtacgagaacgtgaccggcctggtgaaggccgtgatcgagatgagcagcaagatccagcccgccccccccgaggagtacgtgcccatggtgaaggaggtgggcctggccctgagaaccctgctggccaccgtggacgagaccatccccctgctgcccgccagcacccacagagagatcgagatggcccagaagctgctgaacagcgacctgggcgagctgatcaacaagatgaagctggcccagcagtacgtgatgaccagcctgcagcaggagtacaagaagcagatgctgaccgccgcccacgccctggccgtggacgccaagaacctgctggacgtgatcgaccaggccagactgaagatgctgggccagaccagaccccactag

SEQ ID NO: 12438 - DNA, 1089 bp, synthetic construct
  misc_feature 1..1089: note = Description of Artificial Sequence: Synthetic coding sequence
  source 1..1089: mol_type = other DNA
atgagaatggagagcagaagacaggccaccgtgagctgggacagcggcggcagcgacgaggccccccccaagcccagcagacccggctaccccagccccagaagcagcgagggcttctaccccagcccccagcacatggtgcagaccaaccactaccaggtgagcggctaccccggcagccacggcatcaccgccatggccggcagcatctaccccggccaggccagcctgctggaccagaccgacagctggaaccacagaccccaggagatcgccatgtggcagcccaacgtggaggacagcaccgtgctggacctgagaggcatcggccaggtgctgcccacccacctgatggaggagagactgatcagacagcagcaggagatggaggaggaccagagatggctggagaaggaggagagattcctgaagcccgacgtgagactgagcagaggcagcatcgacagagaggacggcagcctgcagggccccatcggcaaccagcacatctaccagcccgtgggcaagcccgaccccgccgccccccccaagaagccccccagacccggcgcccccggccacctgggcagcctggccagcctgagcagccccgccgacagctacaacgagggcgtgaagctgcagccccaggagatcagccccccccccaccgccaacctggacagaagcaacgacaaggtgtacgagaacgtgaccggcctggtgaaggccgtgatcgagatgagcagcaagatccagcccgccccccccgaggagtacgtgcccatggtgaaggaggtgggcctggccctgagaaccctgctggccaccgtggacgagaccatccccctgctgcccgccagcacccacagagagatcgagatggcccagaagctgctgaacagcgacctgggcgagctgatcaacaagatgaagctggcccagcagtacgtgatgaccagcctgcagcaggagtacaagaagcagatgctgaccgccgcccacgccctggccgtggacgccaagaacctgctggacgtgatcgaccaggccagactgaagatgctgggccagaccagaccccactag

SEQ ID NO: 12439 - DNA, 354 bp, synthetic construct
  misc_feature 1..354: note = Description of Artificial Sequence: Synthetic coding sequence
  source 1..354: mol_type = other DNA
atggccgccgcctacctggaccccaacctgaaccacacccccaacagcagcaccaagacccacctgggcaccggcatggagagaagccccggcgccatggagagagtgctgaaggtgttccactacttcgagagcaacagcgagcccaccacctgggccagcatcatcagacacggcgacgccaccgacgtgagaggcatcatccagaagatcgtggacagccacaaggtgaagcacgtggcctgctacggcttcagactgagccacctgagaagcgaggaggtgcactggctgcacgtggacatgggcgtgagcagcgtgagagagaagtacgagctggcccaccccccctag

SEQ ID NO: 12440 - DNA, 3291 bp, synthetic construct
  misc_feature 1..3291: note = Description of Artificial Sequence: Synthetic coding sequence
  source 1..3291: mol_type = other DNA
atgctgctggagctggccggccaggaggccctgaagcccgccggcgccatctacatggagaagagcggctgcagccccttccccgtgtgctgggccaaggagtacgacagatacctggccagcagcaagatcatggccgccgcctacctggaccccaacctgaaccacacccccaacagcagcaccaagacccacctgggcaccggcatggagagaagccccggcgccatggagagagtgctgaaggtgttccactacttcgagagcaacagcgagcccaccacctgggccagcatcatcagacacggcgacgccaccgacgtgagaggcatcatccagaagatcgtggacagccacaaggtgaagcacgtggcctgctacggcttcagactgagccacctgagaagcgaggaggtgcactggctgcacgtggacatgggcgtgagcagcgtgagagagaagtacgagctggcccacccccccgaggagtggaagtacgagctgagaatcagatacctgcccaagggcttcctgaaccagttcaccgaggacaagcccaccctgaacttcttctaccagcaggtgaagagcgactacatgctggagatcgccgaccaggtggaccaggagatcgccctgaagctgggctgcctggagatcagaagaagctactgggagatgagaggcaacgccctggagaagaagagcaactacgaggtgctggagaaggacgtgggcctgaagagattcttccccaagagcctgctggacagcgtgaaggccaagaccctgagaaagctgatccagcagaccttcagacagttcgccaacctgaacagagaggagagcatcctgaagttcttcgagatcctgagccccgtgtacagattcgacaaggagtgcttcaagtgcgccctgggcagcagctggatcatcagcgtggagctggccatcggccccgaggagggcatcagctacctgaccgacaagggctgcaaccccacccacctggccgacttcacccaggtgcagaccatccagtacagcaacagcgaggacaaggacagaaagggcatgctgcagctgaagatcgccggcgcccccgagcccctgaccgtgaccgcccccagcctgaccatcgccgagaacatggccgacctgatcgacggctactgcagactggtgaacggcaccagccagagcttcatcatcagaccccagaaggagggcgagagagccctgcccagcatccccaagctggccaacagcgagaagcagggcatgagaacccacgccgtgagcgtgagcgagaccgacgactacgccgagatcatcgacgaggaggacacctacaccatgcccagcaccagagactacgagatccagagagagagaatcgagctgggcagatgcatcggcgagggccagttcggcgacgtgcaccagggcatctacatgagccccgagaaccccgccctggccgtggccatcaagacctgcaagaactgcaccagcgacagcgtgagagagaagttcctgcaggaggccctgaccatgagacagttcgaccacccccacatcgtgaagctgatcggcgtgatcaccgagaaccccgtgtggatcatcatggagctgtgcaccctgggcgagctgagaagcttcctgcaggtgagaaagtacagcctggacctggccagcctgatcctgtacgcctaccagctgagcaccgccctggcctacctggagagcaagagattcgtgcacagagacatcgccgccagaaacgtgctggtgagcagcaacgactgcgtgaagctgggcgacttcggcctgagcagatacatggaggacagcacctactacaaggccagcaagggcaagctgcccatcaagtggatggcccccgagagcatcaacttcagaagattcaccagcgccagcgacgtgtggatgttcggcgtgtgcatgtgggagatcctgatgcacggcgtgaagcccttccagggcgtgaagaacaacgacgtgatcggcagaatcgagaacggcgagagactgcccatgccccccaactgcccccccaccctgtacagcctgatgaccaagtgctgggcctacgaccccagcagaagacccagattcaccgagctgaaggcccagctgagcaccatcctggaggaggagaaggcccagcaggaggagagaatgagaatggagagcagaagacaggccaccgtgagctgggacagcggcggcagcgacgaggccccccccaagcccagcagacccggctaccccagccccagaagcagcgagggcttctaccccagcccccagcacatggtgcagaccaaccactaccaggtgagcggctaccccggcagccacggcatcaccgccatggccggcagcatctaccccggccaggccagcctgctggaccagaccgacagctggaaccacagaccccaggagatcgccatgtggcagcccaacgtggaggacagcaccgtgctggacctgagaggcatcggccaggtgctgcccacccacctgatggaggagagactgatcagacagcagcaggagatggaggaggaccagagatggctggagaaggaggagagattcctgaagcccgacgtgagactgagcagaggcagcatcgacagagaggacggcagcctgcagggccccatcggcaaccagcacatctaccagcccgtgggcaagcccgaccccgccgccccccccaagaagccccccagacccggcgcccccggccacctgggcagcctggccagcctgagcagccccgccgacagctacaacgagggcgtgaagctgcagccccaggagatcagccccccccccaccgccaacctggacagaagcaacgacaaggtgtacgagaacgtgaccggcctggtgaaggccgtgatcgagatgagcagcaagatccagcccgccccccccgaggagtacgtgcccatggtgaaggaggtgggcctggccctgagaaccctgctggccaccgtggacgagaccatccccctgctgcccgccagcacccacagagagatcgagatggcccagaagctgctgaacagcgacctgggcgagctgatcaacaagatgaagctggcccagcagtacgtgatgaccagcctgcagcaggagtacaagaagcagatgctgaccgccgcccacgccctggccgtggacgccaagaacctgctggacgtgatcgaccaggccagactgaagatgctgggccagaccagaccccactag

SEQ ID NO: 12441 - DNA, 3291 bp, synthetic construct; identical to SEQ ID NO: 12440
  misc_feature 1..3291: note = Description of Artificial Sequence: Synthetic coding sequence
  source 1..3291: mol_type = other DNA

SEQ ID NO: 12442 - DNA, 2043 bp, synthetic construct
  misc_feature 1..2043: note = Description of Artificial Sequence: Synthetic coding sequence
  source 1..2043: mol_type = other DNA
atgaagtaccaggaggtgagatgcctgaccagcttcaacatcagcgtgagcttccccgccgagaccgacgactacgccgagatcatcgacgaggaggacacctacaccatgcccagcaccagagactacgagatccagagagagagaatcgagctgggcagatgcatcggcgagggccagttcggcgacgtgcaccagggcatctacatgagccccgagaaccccgccctggccgtggccatcaagacctgcaagaactgcaccagcgacagcgtgagagagaagttcctgcaggaggccctgaccatgagacagttcgaccacccccacatcgtgaagctgatcggcgtgatcaccgagaaccccgtgtggatcatcatggagctgtgcaccctgggcgagctgagaagcttcctgcaggtgagaaagtacagcctggacctggccagcctgatcctgtacgcctaccagctgagcaccgccctggcctacctggagagcaagagattcgtgcacagagacatcgccgccagaaacgtgctggtgagcagcaacgactgcgtgaagctgggcgacttcggcctgagcagatacatggaggacagcacctactacaaggccagcaagggcaagctgcccatcaagtggatggcccccgagagcatcaacttcagaagattcaccagcgccagcgacgtgtggatgttcggcgtgtgcatgtgggagatcctgatgcacggcgtgaagcccttccagggcgtgaagaacaacgacgtgatcggcagaatcgagaacggcgagagactgcccatgccccccaactgcccccccaccctgtacagcctgatgaccaagtgctgggcctacgaccccagcagaagacccagattcaccgagctgaaggcccagctgagcaccatcctggaggaggagaaggcccagcaggaggagagaatgagaatggagagcagaagacaggccaccgtgagctgggacagcggcggcagcgacgaggccccccccaagcccagcagacccggctaccccagccccagaagcagcgagggcttctaccccagcccccagcacatggtgcagaccaaccactaccaggtgagcggctaccccggcagccacggcatcaccgccatggccggcagcatctaccccggccaggccagcctgctggaccagaccgacagctggaaccacagaccccaggagatcgccatgtggcagcccaacgtggaggacagcaccgtgctggacctgagaggcatcggccaggtgctgcccacccacctgatggaggagagactgatcagacagcagcaggagatggaggaggaccagagatggctggagaaggaggagagattcctgaagcccgacgtgagactgagcagaggcagcatcgacagagaggacggcagcctgcagggccccatcggcaaccagcacatctaccagcccgtgggcaagcccgaccccgccgccccccccaagaagccccccagacccggcgcccccggccacctgggcagcctggccagcctgagcagccccgccgacagctacaacgagggcgtgaagctgcagccccaggagatcagccccccccccaccgccaacctggacagaagcaacgacaaggtgtacgagaacgtgaccggcctggtgaaggccgtgatcgagatgagcagcaagatccagcccgccccccccgaggagtacgtgcccatggtgaaggaggtgggcctggccctgagaaccctgctggccaccgtggacgagaccatccccctgctgcccgccagcacccacagagagatcgagatggcccagaagctgctgaacagcgacctgggcgagctgatcaacaagatgaagctggcccagcagtacgtgatgaccagcctgcagcaggagtacaagaagcagatgctgaccgccgcccacgccctggccgtggacgccaagaacctgctggacgtgatcgaccaggccagactgaagatgctgggccagaccagaccccactag

SEQ ID NO: 12443 - DNA, 3054 bp, synthetic construct
  misc_feature 1..3054: note = Description of Artificial Sequence: Synthetic coding sequence
  source 1..3054: mol_type = other DNA
tgatacgacagatacctggccagcagcaagatcatggccgccgcctacctggaccccaacctgaaccacacccccaacagcagcaccaagacccacctgggcaccggcatggagagaagccccggcgccatggagagagtgctgaaggtgttccactacttcgagagcaacagcgagcccaccacctgggccagcatcatcagacacggcgacgccaccgacgtgagaggcatcatccagaagatcgtggacagccacaaggtgaagcacgtggcctgctacggcttcagactgagccacctgagaagcgaggaggtgcactggctgcacgtggacatgggcgtgagcagcgtgagagagaagtacgagctggcccacccccccgaggagtggaagtacgagctgagaatcagatacctgcccaagggcttcctgaaccagttcaccgaggacaagcccaccctgaacttcttctaccagcaggtgaagagcgactacatgctggagatcgccgaccaggtggaccaggagatcgccctgaagctgggctgcctggagatcagaagaagctactgggagatgagaggcaacgccctggagaagaagagcaactacgaggtgctggagaaggacgtgggcctgaagagattcttccccaagagcctgctggacagcgtgaaggccaagaccctgagaaagctgatccagcagaccttcagacagttcgccaacctgaacagagaggagagcatcctgaagttcttcgagatcctgagccccgtgtacagattcgacaaggagtgcttcaagtgcgccctgggcagcagctggatcatcagcgtggagctggccatcggccccgaggagggcatcagctacctgaccgacaagggctgcaaccccacccacctggccgacttcacccaggtgcagaccatccagtacagcaacagcgaggacaaggacagaaagggcatgctgcagctgaagatcgccggcgcccccgagcccctgaccgtgaccgcccccagcctgaccatcgccgagaacatggccgacctgatcgacggctactgcagactggtgaacggcaccagccagagcttcatcatcagaccccagaaggagggcgagagagccctgcccagcatccccaagctggccaacagcgagaagcagggcatgagaacccacgccgtgagcgtgagcgagaccgacgactacgccgagatcatcgacgaggaggacacctacaccatgcccagcaccagagactacgagatccagagagagagaatcgagctgggcagatgcatcggcgagggccagttcggcgacgtgcaccagggcatctacatgagccccgagaaccccgccctggccgtggccatcaagacctgcaagaactgcaccagcgacagcgtgagagagaagttcctgcaggaggccctgaccatgagacagttcgaccacccccacatcgtgaagctgatcggcgtgatcaccgagaaccccgtgtggatcatcatggagctgtgcaccctgggcgagctgagaagcttcctgcaggtgagaaagtacagcctggacctggccagcctgatcctgtacgcctaccagctgagcaccgccctggcctacctggagagcaagagattcgtgcacagagacatcgccgccagaaacgtgctggtgagcagcaacgactgcgtgaagctgggcgacttcggcctgagcagatacatggaggacagcacctactacaaggccagcaagggcaagctgcccatcaagtggatggcccccgagagcatcaacttcagaagattcaccagcgccagcgacgtgtggatgttcggcgtgtgcatgtgggagatcctgatgcacggcgtgaagcccttccagggcgtgaagaacaacgacgtgatcggcagaatcgagaacggcgagagactgcccatgccccccaactgcccccccaccctgtacagcctgatgaccaagtgctgggcctacgaccccagcagaagacccagattcaccgagctgaaggcccagctgagcaccatcctggaggaggagaaggcccagcaggaggagagaatgagaatggagagcagaagacaggccaccgtgagctgggacagcggcggcagcgacgaggccccccccaagcccagcagacccggctaccccagccccagaagcagcgagggcttctaccccagcccccagcacatggtgcagaccaaccactaccaggacagcaccgtgctggacctgagaggcatcggccaggtgctgcccacccacctgatggaggagagactgatcagacagcagcaggagatggaggaggaccagagatggctggagaaggaggagagattcctgaagcccgacgtgagactgagcagaggcagcatcgacagagaggacggcagcctgcagggccccatcggcaaccagcacatctaccagcccgtgggcaagcccgaccccgccgccccccccaagaagccccccagacccggcgcccccggccacctgggcagcctggccagcctgagcagccccgccgacagctacaacgagggcgtgaagctgcagccccaggagatcagccccccccccaccgccaacctggacagaagcaacgacaaggtgtacgagaacgtgaccggcctggtgaaggccgtgatcgagatgagcagcaagatccagcccgccccccccgaggagtacgtgcccatggtgaaggaggtgggcctggccctgagaaccctgctggccaccgtggacgagaccatccccctgctgcccgccagcacccacagagagatcgagatggcccagaagctgctgaacagcgacctgggcgagctgatcaacaagatgaagctggcccagcagtacgtgatgaccagcctgcagcaggagtacaagaagcagatgctgaccgccgcccacgccctggccgtggacgccaagaacctgctggacgtgatcgaccaggccagactgaagatgctgggccagaccagaccccactag

SEQ ID NO: 12444 - DNA, 354 bp, synthetic construct; identical to SEQ ID NO: 12439
  misc_feature 1..354: note = Description of Artificial Sequence: Synthetic coding sequence
  source 1..354: mol_type = other DNA

SEQ ID NO: 12445 - DNA, 471 bp, synthetic construct
  misc_feature 1..471: note = Description of Artificial Sequence: Synthetic coding sequence
  source 1..471: mol_type = other DNA
atggccgccgcctacctggaccccaacctgaaccacacccccaacagcagcaccaagacccacctgggcaccggcatggagagaagccccggcgccatggagagagtgctgaaggtgttccactacttcgagagcaacagcgagcccaccacctgggccagcatcatcagacacggcgacgccaccgacgtgagaggcatcatccagaagatcgtggacagccacaaggtgaagcacgtggcctgctacggcttcagactgagccacctgagaagcgaggaggtgcactggctgcacgtggacatgggcgtgagcagcgtgagagagaagtacgagctggcccacccccccgaggagtggaagtacgagctgagaatcagatacctgcccaagggcttcctgaaccagttcaccgaggacaagcccaccctgaacttcttctaccagcaggtgaagagcgactacatgtag

SEQ ID NO: 12446 - DNA, 3159 bp, synthetic construct
  misc_feature 1..3159: note = Description of Artificial Sequence: Synthetic coding sequence
  source 1..3159: mol_type = other DNA
atggccgccgcctacctggaccccaacctgaaccacacccccaacagcagcaccaagacccacctgggcaccggcatggagagaagccccggcgccatggagagagtgctgaaggtgttccactacttcgagagcaacagcgagcccaccacctgggccagcatcatcagacacggcgacgccaccgacgtgagaggcatcatccagaagatcgtggacagccacaaggtgaagcacgtggcctgctacggcttcagactgagccacctgagaagcgaggaggtgcactggctgcacgtggacatgggcgtgagcagcgtgagagagaagtacgagctggcccacccccccgaggagtggaagtacgagctgagaatcagatacctgcccaagggcttcctgaaccagttcaccgaggacaagcccaccctgaacttcttctaccagcaggtgaagagcgactacatgctggagatcgccgaccaggtggaccaggagatcgccctgaagctgggctgcctggagatcagaagaagctactgggagatgagaggcaacgccctggagaagaagagcaactacgaggtgctggagaaggacgtgggcctgaagagattcttccccaagagcctgctggacagcgtgaaggccaagaccctgagaaagctgatccagcagaccttcagacagttcgccaacctgaacagagaggagagcatcctgaagttcttcgagatcctgagccccgtgtacagattcgacaaggagtgcttcaagtgcgccctgggcagcagctggatcatcagcgtggagctggccatcggccccgaggagggcatcagctacctgaccgacaagggctgcaaccccacccacctggccgacttcacccaggtgcagaccatccagtacagcaacagcgaggacaaggacagaaagggcatgctgcagctgaagatcgccggcgcccccgagcccctgaccgtgaccgcccccagcctgaccatcgccgagaacatggccgacctgatcgacggctactgcagactggtgaacggcaccagccagagcttcatcatcagaccccagaaggagggcgagagagccctgcccagcatccccaagctggccaacagcgagaagcagggcatgagaacccacgccgtgagcgtgagcgagaccgacgactacgccgagatcatcgacgaggaggacacctacaccatgcccagcaccagagactacgagatccagagagagagaatcgagctgggcagatgcatcggcgagggccagttcggcgacgtgcaccagggcatctacatgagccccgagaaccccgccctggccgtggccatcaagacctgcaagaactgcaccagcgacagcgtgagagagaagttcctgcaggaggccctgaccatgagacagttcgaccacccccacatcgtgaagctgatcggcgtgatcaccgagaaccccgtgtggatcatcatggagctgtgcaccctgggcgagctgagaagcttcctgcaggtgagaaagtacagcctggacctggccagcctgatcctgtacgcctaccagctgagcaccgccctggcctacctggagagcaagagattcgtgcacagagacatcgccgccagaaacgtgctggtgagcagcaacgactgcgtgaagctgggcgacttcggcctgagcagatacatggaggacagcacctactacaaggccagcaagggcaagctgcccatcaagtggatggcccccgagagcatcaacttcagaagattcaccagcgccagcgacgtgtggatgttcggcgtgtgcatgtgggagatcctgatgcacggcgtgaagcccttccagggcgtgaagaacaacgacgtgatcggcagaatcgagaacggcgagagactgcccatgccccccaactgcccccccaccctgtacagcctgatgaccaagtgctgggcctacgaccccagcagaagacccagattcaccgagctgaaggcccagctgagcaccatcctggaggaggagaaggcccagcaggaggagagaatgagaatggagagcagaagacaggccaccgtgagctgggacagcggcggcagcgacgaggccccccccaagcccagcagacccggctaccccagccccagaagcagcgagggcttctaccccagcccccagcacatggtgcagaccaaccactaccaggtgagcggctaccccggcagccacggcatcaccgccatggccggcagcatctaccccggccaggccagcctgctggaccagaccgacagctggaaccacagaccccaggagatcgccatgtggcagcccaacgtggaggacagcaccgtgctggacctgagaggcatcggccaggtgctgcccacccacctgatggaggagagactgatcagacagcagcaggagatggaggaggaccagagatggctggagaaggaggagagattcctgaagcccgacgtgagactgagcagaggcagcatcgacagagaggacggcagcctgcagggccccatcggcaaccagcacatctaccagcccgtgggcaagcccgaccccgccgccccccccaagaagccccccagacccggcgcccccggccacctgggcagcctggccagcctgagcagccccgccgacagctacaacgagggcgtgaagctgcagccccaggagatcagccccccccccaccgccaacctggacagaagcaacgacaaggtgtacgagaacgtgaccggcctggtgaaggccgtgatcgagatgagcagcaagatccagcccgccccccccgaggagtacgtgcccatggtgaaggaggtgggcctggccctgagaaccctgctggccaccgtggacgagaccatccccctgctgcccgccagcacccacagagagatcgagatggcccagaagctgctgaacagcgacctgggcgagctgatcaacaagatgaagctggcccagcagtacgtgatgaccagcctgcagcaggagtacaagaagcagatgctgaccgccgcccacgccctggccgtggacgccaagaacctgctggacgtgatcgaccaggccagactgaagatgctgggccagaccagaccccactag

SEQ ID NO: 12447 - DNA, 198 bp, synthetic construct
  misc_feature 1..198: note = Description of Artificial Sequence: Synthetic coding sequence
  source 1..198: mol_type = other DNA
atggccgccgcctacctggaccccaacctgaaccacacccccaacagcagcaccaagacccacctgggcaccggcatggagagaagccccggcgccatggagagagtgctgaaggtgttccactacttcgagagcaacagcgagcccaccacctgggccagcatcatcagacacggcgacgccaccgacgtgagatag

SEQ ID NO: 12448 - DNA, 324 bp, synthetic construct
  misc_feature 1..324: note = Description of Artificial Sequence: Synthetic coding sequence
  source 1..324: mol_type = other DNA
atggccgccgcctacctggaccccaacctgaaccacacccccaacagcagcaccaagacccacctgggcaccggcatggagagaagccccggcgccatggagagagtgctgaaggtgttccactacttcgagagcaacagcgagcccaccacctgggccagcatcatcagacacggcgacgccaccgacgtgagaggcatcatccagaagatcgtggacagccacaaggtgaagcacgtggcctgctacggcttcagactgagccacctgagaagcgaggaggtgcactggctgcacgtggacatgggcgtgagcagcgtgtag

SEQ ID NO: 12449 - DNA, 360 bp, synthetic construct
  misc_feature 1..360: note = Description of Artificial Sequence: Synthetic coding sequence
  source 1..360: mol_type = other DNA
atggccgccgcctacctggaccccaacctgaaccacacccccaacagcagcaccaagacccacctgggcaccggcatggagagaagccccggcgccatggagagagtgctgaaggtgttccactacttcgagagcaacagcgagcccaccacctgggccagcatcatcagacacggcgacgccaccgacgtgagaggcatcatccagaagatcgtggacagccacaaggtgaagcacgtggcctgctacggcttcagactgagccacctgagaagcgaggaggtgcactggctgcacgtggacatgggcgtgagcagcgtgagagagaagtacgagctggcccacccccccgaggagtag

SEQ ID NO: 12450 - DNA, 2262 bp, synthetic construct
  misc_feature 1..2262: note = Description of Artificial Sequence: Synthetic coding sequence
  source 1..2262: mol_type = other DNA
gccgagaacatggccgacctgatcgacggctactgcagactggtgaacggcaccagccagagcttcatcatcagaccccagaaggagggcgagagagccctgcccagcatccccaagctggccaacagcgagaagcagggcatgagaacccacgccgtgagcgtgagcggcgtgagccactgccagcacaaggtgaagaaggccagaagattcctgcccctggtgttctgcagccacgacccccccagcaccgacgagatcagcggcgacgagaccgacgactacgccgagatcatcgacgaggaggacacctacaccatgcccagcaccagagactacgagatccagagagagagaatcgagctgggcagatgcatcggcgagggccagttcggcgacgtgcaccagggcatctacatgagccccgagaaccccgccctggccgtggccatcaagacctgcaagaactgcaccagcgacagcgtgagagagaagttcctgcaggaggccctgaccatgagacagttcgaccacccccacatcgtgaagctgatcggcgtgatcaccgagaaccccgtgtggatcatcatggagctgtgcaccctgggcgagctgagaagcttcctgcaggtgagaaagtacagcctggacctggccagcctgatcctgtacgcctaccagctgagcaccgccctggcctacctggagagcaagagattcgtgcacagagacatcgccgccagaaacgtgctggtgagcagcaacgactgcgtgaagctgggcgacttcggcctgagcagatacatggaggacagcacctactacaaggccagcaagggcaagctgcccatcaagtggatggcccccgagagcatcaacttcagaagattcaccagcgccagcgacgtgtggatgttcggcgtgtgcatgtgggagatcctgatgcacggcgtgaagcccttccagggcgtgaagaacaacgacgtgatcggcagaatcgagaacggcgagagactgcccatgccccccaactgcccccccaccctgtacagcctgatgaccaagtgctgggcctacgaccccagcagaagacccagattcaccgagctgaaggcccagctgagcaccatcctggaggaggagaaggcccagcaggaggagagaatgagaatggagagcagaagacaggccaccgtgagctgggacagcggcggcagcgacgaggccccccccaagcccagcagacccggctaccccagccccagaagcagcgagggcttctaccccagcccccagcacatggtgcagaccaaccactaccaggtgagcggctaccccggcagccacggcatcaccgccatggccggcagcatctaccccggccaggccagcctgctggaccagaccgacagctggaaccacagaccccaggagatcgccatgtggcagcccaacgtggaggacagcaccgtgctggacctgagaggcatcggccaggtgctgcccacccacctgatggaggagagactgatcagacagcagcaggagatggaggaggaccagagatggctggagaaggaggagagattcctgaagcccgacgtgagactgagcagaggcagcatcgacagagaggacggcagcctgcagggccccatcggcaaccagcacatctaccagcccgtgggcaagcccgaccccgccgccccccccaagaagccccccagacccggcgcccccggccacctgggcagcctggccagcctgagcagccccgccgacagctacaacgagggcgtgaagccctggagactgcagccccaggagatcagccccccccccaccgccaacctggacagaagcaacgacaaggtgtacgagaacgtgaccggcctggtgaaggccgtgatcgagatgagcagcaagatccagcccgccccccccgaggagtacgtgcccatggtgaaggaggtgggcctggccctgagaaccctgctggccaccgtggacgagaccatccccctgctgcccgccagcacccacagagagatcgagatggcccagaagctgctgaacagcgacctgggcgagctgatcaacaagatgaagctggcccagcagtacgtgatgaccagcctgcagcaggagtacaagaagcagatgctgaccgccgcccacgccctggccgtggacgccaagaacctgctggacgtgatcgaccaggccagactgaagatgctgggccagaccagaccccactag

SEQ ID NO: 12451 - DNA, 3159 bp, synthetic construct; identical to SEQ ID NO: 12446
  misc_feature 1..3159: note = Description of Artificial Sequence: Synthetic coding sequence
  source 1..3159: mol_type = other DNA

SEQ ID NO: 12452 - DNA, 2175 bp, synthetic construct
  misc_feature 1..2175: note = Description of Artificial Sequence: Synthetic coding sequence
  source 1..2175: mol_type = other DNA
atcgccgagaacatggccgacctgatcgacggctactgcagactggtgaacggcaccagccagagcttcatcatcagaccccagaaggagggcgagagagccctgcccagcatccccaagctggccaacagcgagaagcagggcatgagaacccacgccgtgagcgtgagcgagaccgacgactacgccgagatcatcgacgaggaggacacctacaccatgcccagcaagagctacggcatcgacgaggccagagactacgagatccagagagagagaatcgagctgggcagatgcatcggcgagggccagttcggcgacgtgcaccagggcatctacatgagccccgagaaccccgccctggccgtggccatcaagacctgcaagaactgcaccagcgacagcgtgagagagaagttcctgcaggaggccctgaccatgagacagttcgaccacccccacatcgtgaagctgatcggcgtgatcaccgagaaccccgtgtggatcatcatggagctgtgcaccctgggcgagctgagaagcttcctgcaggtgagaaagtacagcctggacctggccagcctgatcctgtacgcctaccagctgagcaccgccctggcctacctggagagcaagagattcgtgcacagagacatcgccgccagaaacgtgctggtgagcagcaacgactgcgtgaagctgggcgacttcggcctgagcagatacatggaggacagcacctactacaaggccagcaagggcaagctgcccatcaagtggatggcccccgagagcatcaacttcagaagattcaccagcgccagcgacgtgtggatgttcggcgtgtgcatgtgggagatcctgatgcacggcgtgaagcccttccagggcgtgaagaacaacgacgtgatcggcagaatcgagaacggcgagagactgcccatgccccccaactgcccccccaccctgtacagcctgatgaccaagtgctgggcctacgaccccagcagaagacccagattcaccgagctgaaggcccagctgagcaccatcctggaggaggagaaggcccagcaggaggagagaatgagaatggagagcagaagacaggccaccgtgagctgggacagcggcggcagcgacgaggccccccccaagcccagcagacccggctaccccagccccagaagcagcgagggcttctaccccagcccccagcacatggtgcagaccaaccactaccaggtgagcggctaccccggcagccacggcatcaccgccatggccggcagcatctaccccggccaggccagcctgctggaccagaccgacagctggaaccacagaccccaggagatcgccatgtggcagcccaacgtggaggacagcaccgtgctggacctgagaggcatcggccaggtgctgcccacccacctgatggaggagagactgatcagacagcagcaggagatggaggaggaccagagatggctggagaaggaggagagattcctgaagcccgacgtgagactgagcagaggcagcatcgacagagaggacggcagcctgcagggccccatcggcaaccagcacatctaccagcccgtgggcaagcccgaccccgccgccccccccaagaagccccccagacccggcgcccccggccacctgggcagcctggccagcctgagcagccccgccgacagctacaacgagggcgtgaagctgcagccccaggagatcagccccccccccaccgccaacctggacagaagcaacgacaaggtgtacgagaacgtgaccggcctggtgaaggccgtgatcgagatgagcagcaagatccagcccgccccccccgaggagtacgtgcccatggtgaaggaggtgggcctggccctgagaaccctgctggccaccgtggacgagaccatccccctgctgcccgccagcacccacagagagatcgagatggcccagaagctgctgaacagcgacctgggcgagctgatcaacaagatgaagctggcccagcagtacgtgatgaccagcctgcagcaggagtacaagaagcagatgctgaccgccgcccacgccctggccgtggacgccaagaacctgctggacgtgatcgaccaggccagactgaagatgctgggccagaccagaccccactag

SEQ ID NO: 12453 - DNA, 363 bp, synthetic construct
  misc_feature 1..363: note = Description of Artificial Sequence: Synthetic coding sequence
  source 1..363: mol_type = other DNA
atggccgccgcctacctggaccccaacctgaaccacacccccaacagcagcaccaagacccacctgggcaccggcatggagagaagccccggcgccatggagagagtgctgaaggtgttccactacttcgagagcaacagcgagcccaccacctgggccagcatcatcagacacggcgacgccaccgacgtgagaggcatcatccagaagatcgtggacagccacaaggtgaagcacgtggcctgctacggcttcagactgagccacctgagaagcgaggaggtgcactggctgcacgtggacatgggcgtgagcagcgtgagagagaagtacgagctggcccacccccccgaggagtggtag

SEQ ID NO: 12454 - DNA, 156 bp, synthetic construct
  misc_feature 1..156: note = Description of Artificial Sequence: Synthetic coding sequence
  source 1..156: mol_type = other DNA
atggccgccgcctacctggaccccaacctgaaccacacccccaacagcagcaccaagacccacctgggcaccggcatggagagaagccccggcgccatggagagagtgctgaaggtgttccactacttcgagagcaacagcgagcccaccacctag

SEQ ID NO: 12455 - DNA, 3021 bp, synthetic construct
  misc_feature 1..3021: note = Description of Artificial Sequence: Synthetic coding sequence
  source 1..3021: mol_type = other DNA
atggccgccgcctacctggaccccaacctgaaccacacccccaacagcagcaccaagacccacctgggcaccggcatggagagaagccccggcgccatggagagagtgctgaaggtgttccactacttcgagagcaacagcgagcccaccacctgggccagcatcatcagacacggcgacgccaccgacgtgagaggcatcatccagaagatcgtggacagccacaaggtgaagcacgtggcctgctacggcttcagactgagccacctgagaagcgaggaggtgcactggctgcacgtggacatgggcgtgagcagcgtgagagagaagtacgagctggcccacccccccgaggagtggaagtacgagctgagaatcagatacctgcccaagggcttcctgaaccagttcaccgaggacaagcccaccctgaacttcttctaccagcaggtgaagagcgactacatgctggagatcgccgaccaggtggaccaggagatcgccctgaagctgggctgcctggagatcagaagaagctactgggagatgagaggcaacgccctggagaagaagagcaactacgaggtgctggagaaggacgtgggcctgaagagattcttccccaagagcctgctggacagcgtgaaggccaagaccctgagaaagctgatccagcagaccttcagacagttcgccaacctgaacagagaggagagcatcctgaagttcttcgagatcctgagccccgtgtacagattcgacaaggagtgcttcaagtgcgccctgggcagcagctggatcatcagcgtggagctggccatcggccccgaggagggcatcagctacctgaccgacaagggctgcaaccccacccacctggccgacttcacccaggtgcagaccatccagtacagcaacagcgaggacaaggacagaaagggcatgctgcagctgaagatcgccggcgcccccgagcccctgaccgtgaccgcccccagcctgaccatcgccgagaacatggccgacctgatcgacggctactgcagactggtgaacggcaccagccagagcttcatcatcagaccccagaaggagggcgagagagccctgcccagcatccccaagctggccaacagcgagaagcagggcatgagaacccacgccgtgagcgtgagcgagaccgacgactacgccgagatcatcgacgaggaggacacctacaccatgcccagcaccagagactacgagatccagagagagagaatcgagctgggcagatgcatcggcgagggccagttcggcgacgtgcaccagggcatctacatgagccccgagaaccccgccctggccgtggccatcaagacctgcaagaactgcaccagcgacagcgtgagagagaagttcctgcaggaggccctgaccatgagacagttcgaccacccccacatcgtgaagctgatcggcgtgatcaccgagaaccccgtgtggatcatcatggagctgtgcaccctgggcgagctgagaagcttcctgcaggtgagaaagtacagcctggacctggccagcctgatcctgtacgcctaccagctgagcaccgccctggcctacctggagagcaagagattcgtgcacagagacatcgccgccagaaacgtgctggtgagcagcaacgactgcgtgaagctgggcgacttcggcctgagcagatacatggaggacagcacctactacaaggccagcaagggcaagctgcccatcaagtggatggcccccgagagcatcaacttcagaagattcaccagcgccagcgacgtgtggatgttcggcgtgtgcatgtgggagatcctgatgcacggcgtgaagcccttccagggcgtgaagaacaacgacgtgatcggcagaatcgagaacggcgagagactgcccatgccccccaactgcccccccaccctgtacagcctgatgaccaagtgctgggcctacgaccccagcagaagacccagattcaccgagctgaaggcccagctgagcaccatcctggaggaggagaaggcccagcaggaggagagaatgagaatggagagcagaagacaggccaccgtgagctgggacagcggcggcagcgacgaggccccccccaagcccagcagacccggctaccccagccccagaagcagcgagggcttctaccccagcccccagcacatggtgcagaccaaccactaccaggacagcaccgtgctggacctgagaggcatcggccaggtgctgcccacccacctgatggaggagagactgatcagacagcagcaggagatggaggaggaccagagatggctggagaaggaggagagattcctgaagcccgacgtgagactgagcagaggcagcatcgacagagaggacggcagcctgcagggccccatcggcaaccagcacatctaccagcccgtgggcaagcccgaccccgccgccccccccaagaagccccccagacccggcgcccccggccacctgggcagcctggccagcctgagcagccccgccgacagctacaacgagggcgtgaagctgcagccccaggagatcagccccccccccaccgccaacctggacagaagcaacgacaaggtgtacgagaacgtgaccggcctggtgaaggccgtgatcgagatgagcagcaagatccagcccgccccccccgaggagtacgtgcccatggtgaaggaggtgggcctggccctgagaaccctgctggccaccgtggacgagaccatccccctgctgcccgccagcacccacagagagatcgagatggcccagaagctgctgaacagcgacctgggcgagctgatcaacaagatgaagctggcccagcagtacgtgatgaccagcctgcagcaggagtacaagaagcagatgctgaccgccgcccacgccctggccgtggacgccaagaacctgctggacgtgatcgaccaggccagactgaagatgctgggccagaccagaccccactag

SEQ ID NO: 12456 - DNA, 2163 bp, synthetic construct
  misc_feature 1..2163: note = Description of Artificial Sequence: Synthetic coding sequence
  source 1..2163: mol_type = other DNA
atggccgacctgatcgacggctactgcagactggtgaacggcaccagccagagcttcatcatcagaccccagaaggagggcgagagagccctgcccagcatccccaagctggccaacagcgagaagcagggcatgagaacccacgccgtgagcgtgagcgagaccgacgactacgccgagatcatcgacgaggaggacacctacaccatgcccagcaagagctacggcatcgacgaggccagagactacgagatccagagagagagaatcgagctgggcagatgcatcggcgagggccagttcggcgacgtgcaccagggcatctacatgagccccgagaaccccgccctggccgtggccatcaagacctgcaagaactgcaccagcgacagcgtgagagagaagttcctgcaggaggccctgaccatgagacagttcgaccacccccacatcgtgaagctgatcggcgtgatcaccgagaaccccgtgtggatcatcatggagctgtgcaccctgggcgagctgagaagcttcctgcaggtgagaaagtacagcctggacctggccagcctgatcctgtacgcctaccagctgagcaccgccctggcctacctggagagcaagagattcgtgcacagagacatcgccgccagaaacgtgctggtgagcagcaacgactgcgtgaagctgggcgacttcggcctgagcagatacatggaggacagcacctactacaaggccagcaagggcaagctgcccatcaagtggatggcccccgagagcatcaacttcagaagattcaccagcgccagcgacgtgtggatgttcggcgtgtgcatgtgggagatcctgatgcacggcgtgaagcccttccagggcgtgaagaacaacgacgtgatcggcagaatcgagaacggcgagagactgcccatgccccccaactgcccccccaccctgtacagcctgatgaccaagtgctgggcctacgaccccagcagaagacccagattcaccgagctgaaggcccagctgagcaccatcctggaggaggagaaggcccagcaggaggagagaatgagaatggagagcagaagacaggccaccgtgagctgggacagcggcggcagcgacgaggccccccccaagcccagcagacccggctaccccagccccagaagcagcgagggcttctaccccagcccccagcacatggtgcagaccaaccactaccaggtgagcggctaccccggcagccacggcatcaccgccatggccggcagcatctaccccggccaggccagcctgctggaccagaccgacagctggaaccacagaccccaggagatcgccatgtggcagcccaacgtggaggacagcaccgtgctggacctgagaggcatcggccaggtgctgcccacccacctgatggaggagagactgatcagacagcagcaggagatggaggaggaccagagatggctggagaaggaggagagattcctgaagcccgacgtgagactgagcagaggcagcatcgacagagaggacggcagcctgcagggccccatcggcaaccagcacatctaccagcccgtgggcaagcccgaccccgccgccccccccaagaagccccccagacccggcgcccccggccacctgggcagcctggccagcctgagcagccccgccgacagctacaacgagggcgtgaagctgcagccccaggagatcagccccccccccaccgccaacctggacagaagcaacgacaaggtgtacgagaacgtgaccggcctggtgaaggccgtgatcgagatgagcagcaagatccagcccgccccccccgaggagtacgtgcccatggtgaaggaggtgggcctggccctgagaaccctgctggccaccgtggacgagaccatccccctgctgcccgccagcacccacagagagatcgagatggcccagaagctgctgaacagcgacctgggcgagctgatcaacaagatgaagctggcccagcagtacgtgatgaccagcctgcagcaggagtacaagaagcagatgctgaccgccgcccacgccctggccgtggacgccaagaacctgctggacgtgatcgaccaggccagactgaagatgctgggccagaccagaccccactag

SEQ ID NO: 12457 - DNA, 3198 bp, synthetic construct
  misc_feature 1..3198: note = Description of Artificial Sequence: Synthetic coding sequence
  source 1..3198: mol_type = other DNA
atggccgccgcctacctggaccccaacctgaaccacacccccaacagcagcaccaagacccacctgggcaccggcatggagagaagccccggcgccatggagagagtgctgaaggtgttccactacttcgagagcaacagcgagcccaccacctgggccagcatcatcagacacggcgacgccaccgacgtgagaggcatcatccagaagatcgtggacagccacaaggtgaagcacgtggcctgctacggcttcagactgagccacctgagaagcgaggaggtgcactggctgcacgtggacatgggcgtgagcagcgtgagagagaagtacgagctggcccacccccccgaggagtggaagtacgagctgagaatcagatacctgcccaagggcttcctgaaccagttcaccgaggacaagcccaccctgaacttcttctaccagcaggtgaagagcgactacatgctggagatcgccgaccaggtggaccaggagatcgccctgaagctgggctgcctggagatcagaagaagctactgggagatgagaggcaacgccctggagaagaagagcaactacgaggtgctggagaaggacgtgggcctgaagagattcttccccaagagcctgctggacagcgtgaaggccaagaccctgagaaagctgatccagcagaccttcagacagttcgccaacctgaacagagaggagagcatcctgaagttcttcgagatcctgagccccgtgtacagattcgacaaggagtgcttcaagtgcgccctgggcagcagctggatcatcagcgtggagctggccatcggccccgaggagggcatcagctacctgaccgacaagggctgcaaccccacccacctggccgacttcacccaggtgcagaccatccagtacagcaacagcgaggacaaggacagaaagggcatgctgcagctgaagatcgccggcgcccccgagcccctgaccgtgaccgcccccagcctgaccatcgccgagaacatggccgacctgatcgacggctactgcagactggtgaacggcaccagccagagcttcatcatcagaccccagaaggagggcgagagagccctgcccagcatccccaagctggccaacagcgagaagcagggcatgagaacccacgccgtgagcgtgagcgagaccgacgactacgccgagatcatcgacgaggaggacacctacaccatgcccagcaccagagactacgagatccagagagagagaatcgagctgggcagatgcatcggcgagggccagttcggcgacgtgcaccagggcatctacatgagccccgagaaccccgccctggccgtggccatcaagacctgcaagaactgcaccagcgacagcgtgagagagaagttcctgcaggaggccctgaccatgagacagttcgaccacccccacatcgtgaagctgatcggcgtgatcaccgagaaccccgtgtggatcatcatggagctgtgcaccctgggcgagctgagaagcttcctgcaggtgagaaagtacagcctggacctggccagcctgatcctgtacgcctaccagctgagcaccgccctggcctacctggagagcaagagattcgtgcacagagacatcgccgccagaaacgtgctggtgagcagcaacgactgcgtgaagctgggcgacttcggcctgagcagatacatggaggacagcacctactacaaggccagcaagggcaagctgcccatcaagtggatggcccccgagagcatcaacttcagaagattcaccagcgccagcgacgtgtggatgttcggcgtgtgcatgtgggagatcctgatgcacggcgtgaagcccttccagggcgtgaagaacaacgacgtgatcggcagaatcgagaacggcgagagactgcccatgccccccaactgcccccccaccctgtacagcctgatgaccaagtgctgggcctacgaccccagcagaagacccagattcaccgagctgaaggcccagctgagcaccatcctggaggaggagaaggcccagcaggaggagagaatgagaatggagagcagaagacaggccaccgtgagctgggacagcggcggcagcgacgaggccccccccaagcccagcagacccggctaccccagccccagaagcagcgagggcttctaccccagcccccagcacatggtgcagaccaaccactaccaggtgagcggctaccccggcagccacggcatcaccgccatggccggcagcatctaccccggccaggccagcctgctggaccagaccgacagctggaaccacagaccccaggagatcgccatgtggcagcccaacgtggaggacagcaccgtgctggacctgagaggcatcggccaggtgctgcccacccacctgatggaggagagactgatcagacagcagcaggagatggaggaggaccagagatggctggagaaggaggagagattcctgaagcccgacgtgagactgagcagaggcagcatcgacagagaggacggcagcctgcagggccccatcggcaaccagcacatctaccagcccgtgggcaagcccggcaaggaggagaagaactgggccgagagaaaccccgccgccccccccaagaagccccccagacccggcgcccccggccacctgggcagcctggccagcctgagcagccccgccgacagctacaacgagggcgtgaagccctggagactgcagccccaggagatcagccccccccccaccgccaacctggacagaagcaacgacaaggtgtacgagaacgtgaccggcctggtgaaggccgtgatcgagatgagcagcaagatccagcccgccccccccgaggagtacgtgcccatggtgaaggaggtgggcctggccctgagaaccctgctggccaccgtggacgagaccatccccctgctgcccgccagcacccacagagagatcgagatggcccagaagctgctgaacagcgacctgggcgagctgatcaacaagatgaagctggcccagcagtacgtgatgaccagcctgcagcaggagtacaagaagcagatgctgaccgccgcccacgccctggccgtggacgccaagaacctgctggacgtgatcgaccaggccagactgaagatgctgggccagaccagaccccactag

SEQ ID NO: 12458 - DNA, 2904 bp, synthetic construct
  misc_feature 1..2904: note = Description of Artificial Sequence: Synthetic coding sequence
  source 1..2904: mol_type = other DNA
atgagcggcgtgagcgagcccctgagcagagtgaagctgggcaccctgagaagacccgagggccccgccgagcccatggtggtggtgcccgtggacgtggagaaggaggacgtgagaatcctgaaggtgtgcttctacagcaacagcttcaaccccggcaagaacttcaagctggtgaagtgcaccgtgcagaccgagatcagagagatcatcaccagcatcctgctgagcggcagaatcggccccaacatcagactggccgagtgctacggcctgagactgaagcacatgaagagcgacgagatccactggctgcacccccagatgaccgtgggcgaggtgcaggacaagtacgagtgcctgcacgtggaggccgagtggagatacgacctgcagatcagatacctgcccgaggacttcatggagagcctgaaggaggacagaaccaccctgctgtacttctaccagcagctgagaaacgactacatgcagagatacgccagcaaggtgagcgagggcatggccctgcagctgggctgcctggagctgagaagattcttcaaggacatgccccacaacgccctggacaagaagagcaacttcgagctgctggagaaggaggtgggcctggacctgttcttccccaagcagatgcaggagaacctgaagcccaagcagttcagaaagatgatccagcagaccttccagcagtacgccagcctgagagaggaggagtgcgtgatgaagttcttcaacaccctggccggcttcgccaacatcgaccaggagacctacagatgcgagctgatccagggctggaacatcaccgtggacctggtgatcggccccaagggcatcagacagctgaccagccaggacgccaagcccacctgcctggccgagttcaagcagatcagaagcatcagatgcctgcccctggaggagggccaggccgtgctgcagctgggcatcgagggcgccccccaggccctgagcatcaagaccagcagcctggccgaggccgagaacatggccgacctgatcgacggctactgcagactgcagggcgagcaccagggcagcctgatcatccaccccagaaaggacggcgagaagagaaacagcctgccccagatccccatgctgaacctggaggccagaagaagccacctgagcgagagctgcagcatcgagagcgacatctacgccgagatccccgacgagaccctgagaagacccggcggcccccagtacggcatcgccagagaggacgtggtgctgaacagaatcctgggcgagggcttcttcggcgaggtgtacgagggcgtgtacaccaaccacaagggcgagaagatcaacgtggccgtgaagacctgcaagaaggactgcaccctggacaacaaggagaagttcatgagcgaggccgtgatcatgaagaacctggaccacccccacatcgtgaagctgatcggcatcatcgaggaggagcccacctggatcatcatggagctgtacccctacggcgagctgggccactacctggagagaaacaagaacagcctgaaggtgctgaccctggtgctgtacagcctgcagatctgcaaggccatggcctacctggagagcatcaactgcgtgcacagagacatcgccgtgagaaacatcctggtggccagccccgagtgcgtgaagctgggcgacttcggcctgagcagatacatcgaggacgaggactactacaaggccagcgtgaccagactgcccatcaagtggatgagccccgagagcatcaacttcagaagattcaccaccgccagcgacgtgtggatgttcgccgtgtgcatgtgggagatcctgagcttcggcaagcagcccttcttctggctggagaacaaggacgtgatcggcgtgctggagaagggcgacagactgcccaagcccgacctgtgcccccccgtgctgtacaccctgatgaccagatgctgggactacgaccccagcgacagacccagattcaccgagctggtgtgcagcctgagcgacgtgtaccagatggagaaggacatcgccatggagcaggagagaaacgccagatacagaacccccaagatcctggagcccaccgccttccaggagcccccccccaagcccagcagacccaagtacagaccccccccccagaccaacctgctggcccccaagctgcagttccaggaggaggacttcatccagcccagcagcagagaggaggcccagcagctgtgggaggccgagaaggtgaagatgagacagatcctggacaagcagcagaagcagatggtggaggactaccagtggctgagacaggaggagaagagcctggaccccatggtgtacatgaacgacaagagccccctgacccccgagaaggaggtgggctacctggagttcaccggccccccccagaagccccccagactgggcgcccagagcatccagcccaccgccaacctggacagaaccgacgacctggtgtacctgaacgtgatggagctggtgagagccgtgctggagctgaagaacgagctgtgccagctgccccccgagggctacgtggtggtggtgaagaacgtgggcctgaccctgagaaagctgatcggcagcgtggacgacctgctgcccagcctgcccagcagcagcagaaccgagatcgagggcacccagaagctgctgaacaaggacctggccgagctgatcaacaagatgagactggcccagcagaacgccgtgaccagcctgagcgaggagtgcaagagacagatgctgaccgccagccacaccctggccgtggacgccaagaacctgctggacgccgtggaccaggccaaggtgctggccaacctggcccacccccccgccgagtag

SEQ ID NO: 12459 - DNA, 3030 bp, synthetic construct
  misc_feature 1..3030: note = Description of Artificial Sequence: Synthetic coding sequence
  source 1..3030: mol_type = other DNA
atgagcggcgtgagcgagcccctgagcagagtgaagctgggcaccctgagaagacccgagggccccgccgagcccatggtggtggtgcccgtggacgtggagaaggaggacgtgagaatcctgaaggtgtgcttctacagcaacagcttcaaccccggcaagaacttcaagctggtgaagtgcaccgtgcagaccgagatcagagagatcatcaccagcatcctgctgagcggcagaatcggccccaacatcagactggccgagtgctacggcctgagactgaagcacatgaagagcgacgagatccactggctgcacccccagatgaccgtgggcgaggtgcaggacaagtacgagtgcctgcacgtggaggccgagtggagatacgacctgcagatcagatacctgcccgaggacttcatggagagcctgaaggaggacagaaccaccctgctgtacttctaccagcagctgagaaacgactacatgcagagatacgccagcaaggtgagcgagggcatggccctgcagctgggctgcctggagctgagaagattcttcaaggacatgccccacaacgccctggacaagaagagcaacttcgagctgctggagaaggaggtgggcctggacctgttcttccccaagcagatgcaggagaacctgaagcccaagcagttcagaaagatgatccagcagaccttccagcagtacgccagcctgagagaggaggagtgcgtgatgaagttcttcaacaccctggccggcttcgccaacatcgaccaggagacctacagatgcgagctgatccagggctggaacatcaccgtggacctggtgatcggccccaagggcatcagacagctgaccagccaggacgccaagcccacctgcctggccgagttcaagcagatcagaagcatcagatgcctgcccctggaggagggccaggccgtgctgcagctgggcatcgagggcgccccccaggccctgagcatcaagaccagcagcctggccgaggccgagaacatggccgacctgatcgacggctactgcagactgcagggcgagcaccagggcagcctgatcatccaccccagaaaggacggcgagaagagaaacagcctgccccagatccccatgctgaacctggaggccagaagaagccacctgagcgagagctgcagcatcgagagcgacatctacgccgagatccccgacgagaccctgagaagacccggcggcccccagtacggcatcgccagagaggacgtggtgctgaacagaatcctgggcgagggcttcttcggcgaggtgtacgagggcgtgtacaccaaccacaagggcgagaagatcaacgtggccgtgaagacctgcaagaaggactgcaccctggacaacaaggagaagttcatgagcgaggccgtgatcatgaagaacctggaccacccccacatcgtgaagctgatcggcatcatcgaggaggagcccacctggatcatcatggagctgtacccctacggcgagctgggccactacctggagagaaacaagaacagcctgaaggtgctgaccctggtgctgtacagcctgcagatctgcaaggccatggcctacctggagagcatcaactgcgtgcacagagacatcgccgtgagaaacatcctggtggccagccccgagtgcgtgaagctgggcgacttcggcctgagcagatacatcgaggacgaggactactacaaggccagcgtgaccagactgcccatcaagtggatgagccccgagagcatcaacttcagaagattcaccaccgccagcgacgtgtggatgttcgccgtgtgcatgtgggagatcctgagcttcggcaagcagcccttcttctggctggagaacaaggacgtgatcggcgtgctggagaagggcgacagactgcccaagcccgacctgtgcccccccgtgctgtacaccctgatgaccagatgctgggactacgaccccagcgacagacccagattcaccgagctggtgtgcagcctgagcgacgtgtaccagatggagaaggacatcgccatggagcaggagagaaacgccagatacagaacccccaagatcctggagcccaccgccttccaggagcccccccccaagcccagcagacccaagtacagaccccccccccagaccaacctgctggcccccaagctgcagttccaggtgcccgagggcctgtgcgccagcagccccaccctgaccagccccatggagtaccccagccccgtgaacagcctgcacaccccccccctgcacagacacaacgtgttcaagagacacagcatgagagaggaggacttcatccagcccagcagcagagaggaggcccagcagctgtgggaggccgagaaggtgaagatgagacagatcctggacaagcagcagaagcagatggtggaggactaccagtggctgagacaggaggagaagagcctggaccccatggtgtacatgaacgacaagagccccctgacccccgagaaggaggtgggctacctggagttcaccggccccccccagaagccccccagactgggcgcccagagcatccagcccaccgccaacctggacagaaccgacgacctggtgtacctgaacgtgatggagctggtgagagccgtgctggagctgaagaacgagctgtgccagctgccccccgagggctacgtggtggtggtgaagaacgtgggcctgaccctgagaaagctgatcggcagcgtggacgacctgctgcccagcctgcccagcagcagcagaaccgagatcgagggcacccagaagctgctgaacaaggacctggccgagctgatcaacaagatgagactggcccagcagaacgccgtgaccagcctgagcgaggagtgcaagagacagatgctgaccgccagccacaccctggccgtggacgccaagaacctgctggacgccgtggaccaggccaaggtgctggccaacctggcccacccccccgccgagtag

SEQ ID NO: 12460 - DNA, 3030 bp, synthetic construct; identical to SEQ ID NO: 12459
  misc_feature 1..3030: note = Description of Artificial Sequence: Synthetic coding sequence
  source 1..3030: mol_type = other DNA

SEQ ID NO: 12461 - DNA, 2904 bp, synthetic construct; identical to SEQ ID NO: 12458
  misc_feature 1..2904: note = Description of Artificial Sequence: Synthetic coding sequence
  source 1..2904: mol_type = other DNA

SEQ ID NO: 12462 - DNA, 2904 bp, synthetic construct; identical to SEQ ID NO: 12458
  misc_feature 1..2904: note = Description of Artificial Sequence: Synthetic coding sequence
  source 1..2904: mol_type = other DNA

SEQ ID NO: 12463 - DNA, 2409 bp, synthetic construct
  misc_feature 1..2409: note = Description of Artificial Sequence: Synthetic coding sequence
  source 1..2409: mol_type = other DNA
ctgctgcccgagagaatgagcggcgtgagcgagcccctgagcagagtgaagctgggcaccctgagaagacccgagggccccgccgagcccatggtggtggtgcccgtggacgtggagaaggaggacgtgagaatcctgaaggtgtgcttctacagcaacagcttcaaccccggcaagaacttcaagctggtgaagtgcaccgtgcagaccgagatcagagagatcatcaccagcatcctgctgagcggcagaatcggccccaacatcagactggccgagtgctacggcctgagactgaagcacatgaagagcgacgagatccactggctgcacccccagatgaccgtgggcgaggtgcaggacaagtacgagtgcctgcacgtggaggccgagtggagatacgacctgcagatcagatacctgcccgaggacttcatggagagcctgaaggaggacagaaccaccctgctgtacttctaccagcagctgagaaacgactacatgcagagatacgccagcaaggtgagcgagggcatggccctgcagctgggctgcctggagctgagaagattcttcaaggacatgccccacaacgccctggacaagaagagcaacttcgagctgctggagaaggaggtgggcctggacctgttcttccccaagcagatgcaggagaacctgaagcccaagcagttcagaaagatgatccagcagaccttccagcagtacgccagcctgagagaggaggagtgcgtgatgaagttcttcaacaccctggccggcttcgccaacatcgaccaggagacctacagatgcgagctgatccagggctggaacatcaccgtggacctggtgatcggccccaagggcatcagacagctgaccagccaggacgccaagcccacctgcctggccgagttcaagcagatcagaagcatcagatgcctgcccctggaggagggccaggccgtgctgcagctgggcatcgagggcgccccccaggccctgagcatcaagaccagcagcctggccgaggccgagaacatggccgacctgatcgacggctactgcagactgcagggcgagcaccagggcagcctgatcatccaccccagaaaggacggcgagaagagaaacagcctgccccagatccccatgctgaacctggaggccagaagaagccacctgagcgagagctgcagcatcgagagcgacatctacgccgagatccccgacgagaccctgagaagacccggcggcccccagtacggcatcgccagagaggacgtggtgctgaacagaatcctgggcgagggcttcttcggcgaggtgtacgagggcgtgtacaccaaccacaagggcgagaagatcaacgtggccgtgaagacctgcaagaaggactgcaccctggacaacaaggagaagttcatgagcgaggccgtgatcatgaagaacctggaccacccccacatcgtgaagctgatcggcatcatcgaggaggagcccacctggatcatcatggagctgtacccctacggcgagctgggccactacctggagagaaacaagaacagcctgaaggtgctgaccctggtgctgtacagcctgcagatctgcaaggccatggcctacctggagagcatcaactgcgtgcacagagacatcgccgtgagaaacatcctggtggccagccccgagtgcgtgaagctgggcgacttcggcctgagcagatacatcgaggacgaggactactacaaggccagcgtgaccagactgcccatcaagtggatgagccccgagagcatcaacttcagaagattcaccaccgccagcgacgtgtggatgttcgccgtgtgcatgtgggagatcctgagcttcggcaagcagcccttcttctggctggagaacaaggacgtgatcggcgtgctggagaagggcgacagactgcccaagcccgacctgtgcccccccgtgctgtacaccctgatgaccagatgctgggactacgaccccagcgacagacccagattcaccgagctggtgtgcagcctgagcgacgtgtaccagatggagaaggacatcgccatggagcaggagagaaacgccagatacagaacccccaagatcctggagcccaccgccttccaggagcccccccccaagcccagcagacccaagtacagaccccccccccagaccaacctgctggcccccaagctgcagttccaggtgcccgagggcctgtgcgccagcagccccaccctgaccagccccatggagtaccccagccccgtgaacagcctgcacaccccccccctgcacagacacaacgtgttcaagagacacagcatgagagaggaggacttcatccagcccagcagcagaggccccgccgccgtgggcggctag

SEQ ID NO: 12464 - DNA, 3030 bp, synthetic construct; identical to SEQ ID NO: 12459
  misc_feature 1..3030: note = Description of Artificial Sequence: Synthetic coding sequence
  source 1..3030: mol_type = other DNA

SEQ ID NO: 12465 - DNA, 969 bp, synthetic construct
  misc_feature 1..969: note = Description of Artificial Sequence: Synthetic coding sequence
  source 1..969: mol_type = other DNA
atggccgacagagacagcggcagcgagcagggcggcgccgccctgggcagcggcggcagcctgggccaccccggcagcggcagcggcagcggcggcggcggcggcggcggcggcggcggcggcggcagcggcggcggcggcggcggcgcccccggcggcctgcagcacgagacccaggagctggccagcaagagagtggacatccagaacaagagattctacctggacgtgaagcagaacgccaagggcagattcctgaagatcgccgaggtgggcgccggcggcaacaagagcagactgaccctgagcatgagcgtggccgtggagttcagagactacctgggcgacttcatcgagcactacgcccagctgggccccagccagccccccgacctggcccaggcccaggacgagcccagaagagccctgaagagcgagttcctggtgagagagaacagaaagtactacatggacctgaaggagaaccagagaggcagattcctgagaatcagacagaccgtgaacagaggccccggcctgggcagcacccagggccagaccatcgccctgcccgcccagggcctgatcgagttcagagacgccctggccaagctgatcgacgactacggcgtggaggaggagcccgccgagctgcccgagggcaccagcctgaccgtggacaacaagagattcttcttcgacgtgggcagcaacaagtacggcgtgttcatgagagtgagcgaggtgaagcccacctacagaaacagcatcaccgtgccctacaaggtgtgggccaagttcggccacaccttctgcaagtacagcgaggagatgaagaagatccaggagaagcagagagagaagagagccgcctgcgagcagctgcaccagcagcagcagcagcagcaggaggagaccgccgccgccaccctgctgctgcagggcgaggaggagggcgaggaggactag

SEQ ID NO: 12466 - DNA, 588 bp, synthetic construct
  misc_feature 1..588: note = Description of Artificial Sequence: Synthetic coding sequence
  source 1..588: mol_type = other DNA
atgggcagagccagagacgccatcctggacgccctggagaacctgaccgccgaggagctgaagaagttcaagctgaagctgctgagcgtgcccctgagagagggctacggcagaatccccagaggcgccctgctgagcatggacgccctggacctgaccgacaagctggtgagcttctacctggagacctacggcgccgagctgaccgccaacgtgctgagagacatgggcctgcaggagatggccggccagctgcaggccgccacccaccagggcagcggcgccgcccccgccggcatccaggcccccccccagagcgccgccaagcccggcctgcacttcatcgaccagcacagagccgccctgatcgccagagtgaccaacgtggagtggctgctggacgccctgtacggcaaggtgctgaccgacgagcagtaccaggccgtgagagccgagcccaccaaccccagcaagatgagaaagctgttcagcttcacccccgcctggaactggacctgcaaggacctgctgctgcaggccctgagagagagccagagctacctggtggaggacctggagagaagctag

SEQ ID NO: 12467 - DNA, 531 bp, synthetic construct
  misc_feature 1..531: note = Description of Artificial Sequence: Synthetic coding sequence
  source 1..531: mol_type = other DNA
atgggcagagccagagacgccatcctggacgccctggagaacctgaccgccgaggagctgaagaagttcaagctgaagctgctgagcgtgcccctgagagagggctacggcagaatccccagaggcgccctgctgagcatggacgccctggacctgaccgacaagctggtgagcttctacctggagacctacggcgccgagctgaccgccaacgtgctgagagacatgggcctgcaggagatggccggccagctgcaggccgccacccaccagggcctgcacttcatcgaccagcacagagccgccctgatcgccagagtgaccaacgtggagtggctgctggacgccctgtacggcaaggtgctgaccgacgagcagtaccaggccgtgagagccgagcccaccaaccccagcaagatgagaaagctgttcagcttcacccccgcctggaactggacctgcaaggacctgctgctgcaggccctgagagagagccagagctacctggtggaggacctggagagaagctag

SEQ ID NO: 12468 - DNA, 408 bp, synthetic construct
  misc_feature 1..408: note = Description of Artificial Sequence: Synthetic coding sequence
  source 1..408: mol_type = other DNA
atgggcagagccagagacgccatcctggacgccctggagaacctgaccgccgaggagctgaagaagttcaagctgcaggccgccacccaccagggcagcggcgccgcccccgccggcatccaggcccccccccagagcgccgccaagcccggcctgcacttcatcgaccagcacagagccgccctgatcgccagagtgaccaacgtggagtggctgctggacgccctgtacggcaaggtgctgaccgacgagcagtaccaggccgtgagagccgagcccaccaaccccagcaagatgagaaagctgttcagcttcacccccgcctggaactggacctgcaaggacctgctgctgcaggccctgagagagagccagagctacctggtggaggacctggagagaagctag

SEQ ID NO: 12469 - DNA, 1311 bp, synthetic construct
  misc_feature 1..1311: note = Description of Artificial Sequence: Synthetic coding sequence
  source 1..1311: mol_type = other DNA
atgagactggccagactgctgagaggcgccgccctggccggccccggccccggcctgagagccgccggcttcagcagaagcttcagcagcgacagcggcagcagccccgccagcgagagaggcgtgcccggccaggtggacttctacgccagattcagccccagccccctgagcatgaagcagttcctggacttcggcagcgtgaacgcctgcgagaagaccagcttcatgttcctgagacaggagctgcccgtgagactggccaacatcatgaaggagatcagcctgctgcccgacaacctgctgagaacccccagcgtgcagctggtgcagagctggtacatccagagcctgcaggagctgctggacttcaaggacaagagcgccgaggacgccaaggccatctacgacttcaccgacaccgtgatcagaatcagaaacagacacaacgacgtgatccccaccatggcccagggcgtgatcgagtacaaggagagcttcggcgtggaccccgtgaccagccagaacgtgcagtacttcctggacagattctacatgagcagaatcagcatcagaatgctgctgaaccagcacagcctgctgttcggcggcaagggcaagggcagccccagccacagaaagcacatcggcagcatcaaccccaactgcaacgtgctggaggtgatcaaggacggctacgagaacgccagaagactgtgcgacctgtactacatcaacagccccgagctggagctggaggagctgaacgccaagagccccggccagcccatccaggtggtgtacgtgcccagccacctgtaccacatggtgttcgagctgttcaagaacgccatgagagccaccatggagcaccacgccaacagaggcgtgtacccccccatccaggtgcacgtgaccctgggcaacgaggacctgaccgtgaagatgagcgacagaggcggcggcgtgcccctgagaaagatcgacagactgttcaactacatgtacagcaccgcccccagacccagagtggagaccagcagagccgtgcccctggccggcttcggctacggcctgcccatcagcagactgtacgcccagtacttccagggcgacctgaagctgtacagcctggagggctacggcaccgacgccgtgatctacatcaaggccctgagcaccgacagcatcgagagactgcccgtgtacaacaaggccgcctggaagcactacaacaccaaccacgaggccgacgactggtgcgtgcccagcagagagcccaaggacatgaccaccttcagaagcgcctag

SEQ ID NO: 12470 - DNA, 1371 bp, synthetic construct
  misc_feature 1..1371: note = Description of Artificial Sequence: Synthetic coding sequence
  source 1..1371: mol_type = other DNA
atgagactggccagactgctgagaggcgccgccctggccggccccggccccggcctgagagccgccggcttcagcagaagcttcagcagcgacagcggcagcagccccgccagcgagagaggcgtgcccggccaggtggacttctacgccagattcagccccagccccctgagcatgaagcagttcctggacttcggcagcgtgaacgcctgcgagaagaccagcttcatgttcctgagacaggagctgcccgtgagactggccaacatcatgaaggagatcagcctgctgcccgacaacctgctgagaacccccagcgtgcagctggtgcagagctggtacatccagagcctgcaggagctgctggacttcaaggacaagagcgccgaggacgccaaggccatctacgagagacccagaagaacctggctgcaggtgagcagcctgtgctgcatggcctgcaagatgatcttcaccgacaccgtgatcagaatcagaaacagacacaacgacgtgatccccaccatggcccagggcgtgatcgagtacaaggagagcttcggcgtggaccccgtgaccagccagaacgtgcagtacttcctggacagattctacatgagcagaatcagcatcagaatgctgctgaaccagcacagcctgctgttcggcggcaagggcaagggcagccccagccacagaaagcacatcggcagcatcaaccccaactgcaacgtgctggaggtgatcaaggacggctacgagaacgccagaagactgtgcgacctgtactacatcaacagccccgagctggagctggaggagctgaacgccaagagccccggccagcccatccaggtggtgtacgtgcccagccacctgtaccacatggtgttcgagctgttcaagaacgccatgagagccaccatggagcaccacgccaacagaggcgtgtacccccccatccaggtgcacgtgaccctgggcaacgaggacctgaccgtgaagatgagcgacagaggcggcggcgtgcccctgagaaagatcgacagactgttcaactacatgtacagcaccgcccccagacccagagtggagaccagcagagccgtgcccctggccggcttcggctacggcctgcccatcagcagactgtacgcccagtacttccagggcgacctgaagctgtacagcctggagggctacggcaccgacgccgtgatctacatcaaggccctgagcaccgacagcatcgagagactgcccgtgtacaacaaggccgcctggaagcactacaacaccaaccacgaggccgacgactggtgcgtgcccagcagagagcccaaggacatgaccaccttcagaagcgcctag

SEQ ID NO: 12471 - DNA, 1311 bp, synthetic construct; identical to SEQ ID NO: 12469
  misc_feature 1..1311: note = Description of Artificial Sequence: Synthetic coding sequence
  source 1..1311: mol_type = other DNA

SEQ ID NO: 12472 - DNA, 1083 bp, synthetic construct
  misc_feature 1..1083: note = Description of Artificial Sequence: Synthetic coding sequence
  source 1..1083: mol_type = other DNA
atgttcctgagacaggagctgcccgtgagactggccaacatcatgaaggagatcagcctgctgcccgacaacctgctgagaacccccagcgtgcagctggtgcagagctggtacatccagagcctgcaggagctgctggacttcaaggacaagagcgccgaggacgccaaggccatctacgacttcaccgacaccgtgatcagaatcagaaacagacacaacgacgtgatccccaccatggcccagggcgtgatcgagtacaaggagagcttcggcgtggaccccgtgaccagccagaacgtgcagtacttcctggacagattctacatgagcagaatcagcatcagaatgctgctgaaccagcacagcctgctgttcggcggcaagggcaagggcagccccagccacagaaagcacatcggcagcatcaaccccaactgcaacgtgctggaggtgatcaaggacggctacgagaacgccagaagactgtgcgacctgtactacatcaacagccccgagctggagctggaggagctgaacgccaagagccccggccagcccatccaggtggtgtacgtgcccagccacctgtaccacatggtgttcgagctgttcaagaacgccatgagagccaccatggagcaccacgccaacagaggcgtgtacccccccatccaggtgcacgtgaccctgggcaacgaggacctgaccgtgaagatgagcgacagaggcggcggcgtgcccctgagaaagatcgacagactgttcaactacatgtacagcaccgcccccagacccagagtggagaccagcagagccgtgcccctggccggcttcggctacggcctgcccatcagcagactgtacgcccagtacttccagggcgacctgaagctgtacagcctggagggctacggcaccgacgccgtgatctacatcaaggccctgagcaccgacagcatcgagagactgcccgtgtacaacaaggccgcctggaagcactacaacaccaaccacgaggccgacgactggtgcgtgcccagcagagagcccaaggacatgaccaccttcagaagcgcctag

SEQ ID NO: 12473 - DNA, 846 bp, synthetic construct
  misc_feature 1..846: note = Description of Artificial Sequence: Synthetic coding sequence
  source 1..846: mol_type = other DNA
atggcccagggcgtgatcgagtacaaggagagcttcggcgtggaccccgtgaccagccagaacgtgcagtacttcctggacagattctacatgagcagaatcagcatcagaatgctgctgaaccagcacagcctgctgttcggcggcaagggcaagggcagccccagccacagaaagcacatcggcagcatcaaccccaactgcaacgtgctggaggtgatcaaggacggctacgagaacgccagaagactgtgcgacctgtactacatcaacagccccgagctggagctggaggagctgaacgccaagagccccggccagcccatccaggtggtgtacgtgcccagccacctgtaccacatggtgttcgagctgttcaagaacgccatgagagccaccatggagcaccacgccaacagaggcgtgtacccccccatccaggtgcacgtgaccctgggcaacgaggacctgaccgtgaagatgagcgacagaggcggcggcgtgcccctgagaaagatcgacagactgttcaactacatgtacagcaccgcccccagacccagagtggagaccagcagagccgtgcccctggccggcttcggctacggcctgcccatcagcagactgtacgcccagtacttccagggcgacctgaagctgtacagcctggagggctacggcaccgacgccgtgatctacatcaaggccctgagcaccgacagcatcgagagactgcccgtgtacaacaaggccgcctggaagcactacaacaccaaccacgaggccgacgactggtgcgtgcccagcagagagcccaaggacatgaccaccttcagaagcgcctag

SEQ ID NO: 12474 - DNA, 1032 bp, synthetic construct
  misc_feature 1..1032: note = Description of Artificial Sequence: Synthetic coding sequence
  source 1..1032: mol_type = other DNA
atgaaggagatcaacctgctgcccgacagagtgctgagcacccccagcgtgcagctggtgcagagctggtacgtgcagagcctgctggacatcatggagttcctggacaaggaccccgaggaccacagaaccctgagccagttcaccgacgccctggtgaccatcagaaacagacacaacgacgtggtgcccaccatggcccagggcgtgctggagtacaaggacacctacggcgacgaccccgtgagcaaccagaacatccagtacttcctggacagattctacctgagcagaatcagcatcagaatgctgatcaaccagcacaccctgatcttcgacggcagcaccaaccccgcccaccccaagcacatcggcagcatcgaccccaactgcaacgtgagcgaggtggtgaaggacgcctacgacatggccaagctgctgtgcgacaagtactacatggccagccccgacctggagatccaggagatcaacgccgccaacagcaagcagcccatccacatggtgtacgtgcccagccacctgtaccacatgctgttcgagctgttcaagaacgccatgagagccaccgtggagagccacgagagcagcctgatcctgccccccatcaaggtgatggtggccctgggcgaggaggacctgagcatcaagatgagcgacagaggcggcggcgtgcccctgagaaagatcgagagactgttcagctacatgtacagcaccgcccccaccccccagcccggcaccggcggcacccccctggccggcttcggctacggcctgcccatcagcagactgtacgccaagtacttccagggcgacctgcagctgttcagcatggagggcttcggcaccgacgccgtgatctacctgaaggccctgagcaccgacagcgtggagagactgcccgtgtacaacaagagcgcctggagacactaccagaccatccaggaggccggcgactggtgcgtgcccagcaccgagcccaagaacaccagcacctacagagtgagctag

SEQ ID NO: 12475 - DNA, 1224 bp, synthetic construct
  misc_feature 1..1224: note = Description of Artificial Sequence: Synthetic coding sequence
  source 1..1224: mol_type = other DNA
atgagatgggtgtgggccctgctgaagaacgccagcctggccggcgcccccaagtacatcgagcacttcagcaagttcagccccagccccctgagcatgaagcagttcctggacttcggcagcagcaacgcctgcgagaagaccagcttcaccttcctgagacaggagctgcccgtgagactggccaacatcatgaaggagatcaacctgctgcccgacagagtgctgagcacccccagcgtgcagctggtgcagagctggtacgtgcagagcctgctggacatcatggagttcctggacaaggaccccgaggaccacagaaccctgagccagttcaccgacgccctggtgaccatcagaaacagacacaacgacgtggtgcccaccatggcccagggcgtgctggagtacaaggacacctacggcgacgaccccgtgagcaaccagaacatccagtacttcctggacagattctacctgagcagaatcagcatcagaatgctgatcaaccagcacaccctgatcttcgacggcagcaccaaccccgcccaccccaagcacatcggcagcatcgaccccaactgcaacgtgagcgaggtggtgaaggacgcctacgacatggccaagctgctgtgcgacaagtactacatggccagccccgacctggagatccaggagatcaacgccgccaacagcaagcagcccatccacatggtgtacgtgcccagccacctgtaccacatgctgttcgagctgttcaagaacgccatgagagccaccgtggagagccacgagagcagcctgatcctgccccccatcaaggtgatggtggccctgggcgaggaggacctgagcatcaagatgagcgacagaggcggcggcgtgcccctgagaaagatcgagagactgttcagctacatgtacagcaccgcccccaccccccagcccggcaccggcggcacccccctggccggcttcggctacggcctgcccatcagcagactgtacgccaagtacttccagggcgacctgcagctgttcagcatggagggcttcggcaccgacgccgtgatctacctgaaggccctgagcaccgacagcgtggagagactgcccgtgtacaacaagagcgcctggagacactaccagaccatccaggaggccggcgactggtgcgtgcccagcaccgagcccaagaacaccagcacctacagagtgagctag

SEQ ID NO: 12476 - DNA, 849 bp, synthetic construct
  misc_feature 1..849: note = Description of Artificial Sequence: Synthetic coding sequence
  source 1..849: mol_type = other DNA
atgcccctgctgacccagcagatccaggacgaggacgaccagtacagcctggtggccagcctggacaacgtgagaaacctgagcaccatcctgaaggccatccacttcagagagcacgccacctgcttcgccaccaagaacggcatcaaggtgaccgtggagaacgccaagtgcgtgcaggccaacgccttcatccaggccggcatcttccaggagttcaaggtgcaggaggagagcgtgaccttcagaatcaacctgaccgtgctgctggactgcctgagcatcttcggcagcagccccatgcccggcaccctgaccgccctgagaatgtgctaccagggctacggctaccccctgatgctgttcctggaggagggcggcgtggtgaccgtgtgcaagatcaacacccaggagcccgaggagaccctggacttcgacttctgcagcaccaacgtgatcaacaagatcatcctgcagagcgagggcctgagagaggccttcagcgagctggacatgaccagcgaggtgctgcagatcaccatgagccccgacaagccctacttcagactgagcaccttcggcaacgccggcagcagccacctggactaccccaaggacagcgacctgatggaggccttccactgcaaccagacccaggtgaacagatacaagatcagcctgctgaagcccagcaccaaggccctggtgctgagctgcaaggtgagcatcagaaccgacaacagaggcttcctgagcctgcagtacatgatcagaaacgaggacggccagatctgcttcgtggagtactactgctgccccgacgaggaggtgcccgagagcgagagctag

SEQ ID NO: 12477 - DNA, 849 bp, synthetic construct; identical to SEQ ID NO: 12476
  misc_feature 1..849: note = Description of Artificial Sequence: Synthetic coding sequence
  source 1..849: mol_type = other DNA

SEQ ID NO: 12478 - DNA, 741 bp, synthetic construct
  misc_feature 1..741: note = Description of Artificial Sequence: Synthetic coding sequence
  source 1..741: mol_type = other DNA
atgcccctgctgacccagcagatccaggacgaggacgaccagtacagcctggtggccagcctggacaacgtgagaaacctgagcaccatcctgaaggccatccacttcagagagcacgccacctgcttcgccaccaagaacggcatcaaggtgaccgtggagaacgccaagtgcgtgcaggccaacgccttcatccagggcaccctgaccgccctgagaatgtgctaccagggctacggctaccccctgatgctgttcctggaggagggcggcgtggtgaccgtgtgcaagatcaacacccaggagcccgaggagaccctggacttcgacttctgcagcaccaacgtgatcaacaagatcatcctgcagagcgagggcctgagagaggccttcagcgagctggacatgaccagcgaggtgctgcagatcaccatgagccccgacaagccctacttcagactgagcaccttcggcaacgccggcagcagccacctggactaccccaaggacagcgacctgatggaggccttccactgcaaccagacccaggtgaacagatacaagatcagcctgctgaagcccagcaccaaggccctggtgctgagctgcaaggtgagcatcagaaccgacaacagaggcttcctgagcctgcagtacatgatcagaaacgaggacggccagatctgcttcgtggagtactactgctgccccgacgaggaggtgcccgagagcgagagctag

SEQ ID NO: 12479 - DNA, 1755 bp, synthetic construct
  misc_feature 1..1755: note = Description of Artificial Sequence: Synthetic coding sequence
  source 1..1755: mol_type = other DNA
atgaaccagcacgagctggccgtgcacaagaagaagatcgaggaggtggagacctggctgaaggcccaggtgctggagagacagcccaagcagggcggcagcatcctgctgatcaccggcccccccggctgcggcaagaccaccaccctgaagatcctgagcaaggagcacggcatccaggtgcaggagtggatcaaccccgtgctgcccgacttccagaaggacgacttcaagggcatgttcaacaccgagagcagcttccacatgttcccctaccagagccagatcgccgtgttcaaggagttcctgctgagagccaccaagtacaacaagctgcagatgctgggcgacgacctgagaaccgacaagaagatcatcctggtggaggacctgcccaaccagttctacagagacagccacaccctgcacgaggtgctgagaaagtacgtgagaatcggcagatgccccctgatcttcatcatcagcgacagcctgagcggcgacaacaaccagagactgctgttccccaaggagatccaggaggagtgcagcatcagcaacatcagcttcaaccccgtggcccccaccatcatgatgaagttcctgaacagaatcgtgaccatcgaggccaacaagaacggcggcaagatcaccgtgcccgacaagaccagcctggagctgctgtgccagggctgcagcggcgacatcagaagcgccatcaacagcctgcagttcagcagcagcaagggcgagaacaacctgagacccagaaagaagggcatgagcctgaagagcgacgccgtgctgagcaagagcaagagaagaaagaagcccgacagagtgttcgagaaccaggaggtgcaggccatcggcggcaaggacgtgagcctgttcctgttcagagccctgggcaagatcctgtactgcaagagagccagcctgaccgagctggacagccccagactgcccagccacctgagcgagtacgagagagacaccctgctggtggagcccgaggaggtggtggagatgagccacatgcccggcgacctgttcaacctgtacctgcaccagaactacatcgacttcttcatggagatcgacgacatcgtgagagccagcgagttcctgagcttcgccgacatcctgagcggcgactggaacaccagaagcctgctgagagagtacagcaccagcatcgccaccagaggcgtgatgcacagcaacaaggccagaggctacgcccactgccagggcggcggcagcagcttcagacccctgcacaagccccagtggttcctgatcaacaagaagtacagagagaactgcctggccgccaaggccctgttccccgacttctgcctgcccgccctgtgcctgcagacccagctgctgccctacctggccctgctgaccatccccatgagaaaccaggcccagatcagcttcatccaggacatcggcagactgcccctgaagagacacttcggcagactgaagatggaggccctgaccgacagagagcacggcatgatcgaccccgacagcggcgacgaggcccagctgaacggcggccacagcgccgaggagagcctgggcgagcccacccaggccaccgtgcccgagacctggagcctgcccctgagccagaacagcgccagcgagctgcccgccagccagccccagcccttcagcgcccagggcgacatggaggagaacatcatcatcgaggactacgagagcgacggcacctag

SEQ ID NO: 12480 - DNA, 2013 bp, synthetic construct
  misc_feature 1..2013: note = Description of Artificial Sequence: Synthetic coding sequence
  source 1..2013: mol_type = other DNA
atgaaccaggtgaccgactgggtggaccccagcttcgacgacttcctggagtgcagcggcgtgagcaccatcaccgccaccagcctgggcgtgaacaacagcagccacagaagaaagaacggccccagcaccctggagagcagcagattccccgccagaaagagaggcaacctgagcagcctggagcagatctacggcctggagaacagcaaggagtacctgagcgagaacgagccctgggtggacaagtacaagcccgagacccagcacgagctggccgtgcacaagaagaagatcgaggaggtggagacctggctgaaggcccaggtgctggagagacagcccaagcagggcggcagcatcctgctgatcaccggcccccccggctgcggcaagaccaccaccctgaagatcctgagcaaggagcacggcatccaggtgcaggagtggatcaaccccgtgctgcccgacttccagaaggacgacttcaagggcatgttcaacaccgagagcagcttccacatgttcccctaccagagccagatcgccgtgttcaaggagttcctgctgagagccaccaagtacaacaagctgcagatgctgggcgacgacctgagaaccgacaagaagatcatcctggtggaggacctgcccaaccagttctacagagacagccacaccctgcacgaggtgctgagaaagtacgtgagaatcggcagatgccccctgatcttcatcatcagcgacagcctgagcggcgacaacaaccagagactgctgttccccaaggagatccaggaggagtgcagcatcagcaacatcagcttcaaccccgtggcccccaccatcatgatgaagttcctgaacagaatcgtgaccatcgaggccaacaagaacggcggcaagatcaccgtgcccgacaagaccagcctggagctgctgtgccagggctgcagcggcgacatcagaagcgccatcaacagcctgcagttcagcagcagcaagggcgagaacaacctgagacccagaaagaagggcatgagcctgaagagcgacgccgtgctgagcaagagcaagagaagaaagaagcccgacagagtgttcgagaaccaggaggtgcaggccatcggcggcaaggacgtgagcctgttcctgttcagagccctgggcaagatcctgtactgcaagagagccagcctgaccgagctggacagccccagactgcccagccacctgagcgagtacgagagagacaccctgctggtggagcccgaggaggtggtggagatgagccacatgcccggcgacctgttcaacctgtacctgcaccagaactacatcgacttcttcatggagatcgacgacatcgtgagagccagcgagttcctgagcttcgccgacatcctgagcggcgactggaacaccagaagcctgctgagagagtacagcaccagcatcgccaccagaggcgtgatgcacagcaacaaggccagaggctacgcccactgccagggcggcggcagcagcttcagacccctgcacaagccccagtggttcctgatcaacaagaagtacagagagaactgcctggccgccaaggccctgttccccgacttctgcctgcccgccctgtgcctgcagacccagctgctgccctacctggccctgctgaccatccccatgagaaaccaggcccagatcagcttcatccaggacatcggcagactgcccctgaagagacacttcggcagactgaagatggaggccctgaccgacagagagcacggcatgatcgaccccgacagcggcgacgaggcccagctgaacggcggccacagcgccgaggagagcctgggcgagcccacccaggccaccgtgcccgagacctggagcctgcccctgagccagaacagcgccagcgagctgcccgccagccagccccagcccttcagcgcccagggcgacatggaggagaacatcatcatcgaggactacgagagcgacggcacctag

SEQ ID NO: 12481 - DNA, 2013 bp, synthetic construct; identical to SEQ ID NO: 12480
  misc_feature 1..2013: note = Description of Artificial Sequence: Synthetic coding sequence
  source 1..2013: mol_type = other DNA

SEQ ID NO: 12482 - DNA, 2013 bp, synthetic construct; identical to SEQ ID NO: 12480
  misc_feature 1..2013: note = Description of Artificial Sequence: Synthetic coding sequence
  source 1..2013: mol_type = other DNA

SEQ ID NO: 12483 - DNA, 2013 bp, synthetic construct; identical to SEQ ID NO: 12480
  misc_feature 1..2013: note = Description of Artificial Sequence: Synthetic coding sequence
  source 1..2013: mol_type = other DNA

SEQ ID NO: 12484 - DNA, 1518 bp, synthetic construct
  misc_feature 1..1518: note = Description of Artificial Sequence: Synthetic coding sequence
  source 1..1518: mol_type = other DNA
atgttcaacaccgagagcagcttccacatgttcccctaccagagccagatcgccgtgttcaaggagttcctgctgagagccaccaagtacaacaagctgcagatgctgggcgacgacctgagaaccgacaagaagatcatcctggtggaggacctgcccaaccagttctacagagacagccacaccctgcacgaggtgctgagaaagtacgtgagaatcggcagatgccccctgatcttcatcatcagcgacagcctgagcggcgacaacaaccagagactgctgttccccaaggagatccaggaggagtgcagcatcagcaacatcagcttcaaccccgtggcccccaccatcatgatgaagttcctgaacagaatcgtgaccatcgaggccaacaagaacggcggcaagatcaccgtgcccgacaagaccagcctggagctgctgtgccagggctgcagcggcgacatcagaagcgccatcaacagcctgcagttcagcagcagcaagggcgagaacaacctgagacccagaaagaagggcatgagcctgaagagcgacgccgtgctgagcaagagcaagagaagaaagaagcccgacagagtgttcgagaaccaggaggtgcaggccatcggcggcaaggacgtgagcctgttcctgttcagagccctgggcaagatcctgtactgcaagagagccagcctgaccgagctggacagccccagactgcccagccacctgagcgagtacgagagagacaccctgctggtggagcccgaggaggtggtggagatgagccacatgcccggcgacctgttcaacctgtacctgcaccagaactacatcgacttcttcatggagatcgacgacatcgtgagagccagcgagttcctgagcttcgccgacatcctgagcggcgactggaacaccagaagcctgctgagagagtacagcaccagcatcgccaccagaggcgtgatgcacagcaacaaggccagaggctacgcccactgccagggcggcggcagcagcttcagacccctgcacaagccccagtggttcctgatcaacaagaagtacagagagaactgcctggccgccaaggccctgttccccgacttctgcctgcccgccctgtgcctgcagacccagctgctgccctacctggccctgctgaccatccccatgagaaaccaggcccagatcagcttcatccaggacatcggcagactgcccctgaagagacacttcggcagactgaagatggaggccctgaccgacagagagcacggcatgatcgaccccgacagcggcgacgaggcccagctgaacggcggccacagcgccgaggagagcctgggcgagcccacccaggccaccgtgcccgagacctggagcctgcccctgagccagaacagcgccagcgagctgcccgccagccagccccagcccttcagcgcccagggcgacatggaggagaacatcatcatcgaggactacgagagcgacggcacctag

SEQ ID NO: 12485 - DNA, 2013 bp, synthetic construct; identical to SEQ ID NO: 12480
  misc_feature 1..2013: note = Description of Artificial Sequence: Synthetic coding sequence
  source 1..2013: mol_type = other DNA

SEQ ID NO: 12486 - DNA, 2046 bp, synthetic construct
  misc_feature 1..2046: note = Description of Artificial Sequence: Synthetic coding sequence
  source 1..2046: mol_type = other DNA
atgagcaagaccttcctgagacccaaggtgagcagcaccaaggtgaccgactgggtggaccccagcttcgacgacttcctggagtgcagcggcgtgagcaccatcaccgccaccagcctgggcgtgaacaacagcagccacagaagaaagaacggccccagcaccctggagagcagcagattccccgccagaaagagaggcaacctgagcagcctggagcagatctacggcctggagaacagcaaggagtacctgagcgagaacgagccctgggtggacaagtacaagcccgagacccagcacgagctggccgtgcacaagaagaagatcgaggaggtggagacctggctgaaggcccaggtgctggagagacagcccaagcagggcggcagcatcctgctgatcaccggcccccccggctgcggcaagaccaccaccctgaagatcctgagcaaggagcacggcatccaggtgcaggagtggatcaaccccgtgctgcccgacttccagaaggacgacttcaagggcatgttcaacaccgagagcagcttccacatgttcccctaccagagccagatcgccgtgttcaaggagttcctgctgagagccaccaagtacaacaagctgcagatgctgggcgacgacctgagaaccgacaagaagatcatcctggtggaggacctgcccaaccagttctacagagacagccacaccctgcacgaggtgctgagaaagtacgtgagaatcggcagatgccccctgatcttcatcatcagcgacagcctgagcggcgacaacaaccagagactgctgttccccaaggagatccaggaggagtgcagcatcagcaacatcagcttcaaccccgtggcccccaccatcatgatgaagttcctgaacagaatcgtgaccatcgaggccaacaagaacggcggcaagatcaccgtgcccgacaagaccagcctggagctgctgtgccagggctgcagcggcgacatcagaagcgccatcaacagcctgcagttcagcagcagcaagggcgagaacaacctgagacccagaaagaagggcatgagcctgaagagcgacgccgtgctgagcaagagcaagagaagaaagaagcccgacagagtgttcgagaaccaggaggtgcaggccatcggcggcaaggacgtgagcctgttcctgttcagagccctgggcaagatcctgtactgcaagagagccagcctgaccgagctggacagccccagactgcccagccacctgagcgagtacgagagagacaccctgctggtggagcccgaggaggtggtggagatgagccacatgcccggcgacctgttcaacctgtacctgcaccagaactacatcgacttcttcatggagatcgacgacatcgtgagagccagcgagttcctgagcttcgccgacatcctgagcggcgactggaacaccagaagcctgctgagagagtacagcaccagcatcgccaccagaggcgtgatgcacagcaacaaggccagaggctacgcccactgccagggcggcggcagcagcttcagacccctgcacaagccccagtggttcctgatcaacaagaagtacagagagaactgcctggccgccaaggccctgttccccgacttctgcctgcccgccctgtgcctgcagacccagctgctgccctacctggccctgctgaccatccccatgagaaaccaggcccagatcagcttcatccaggacatcggcagactgcccctgaagagacacttcggcagactgaagatggaggccctgaccgacagagagcacggcatgatcgaccccgacagcggcgacgaggcccagctgaacggcggccacagcgccgaggagagcctgggcgagcccacccaggccaccgtgcccgagacctggagcctgcccctgagccagaacagcgccagcgagctgcccgccagccagccccagcccttcagcgcccagggcgacatggaggagaacatcatcatcgaggactacgagagcgacggcacctag

SEQ ID NO: 12487 - DNA, 510 bp, synthetic construct
  misc_feature 1..510: note = Description of Artificial Sequence: Synthetic coding sequence
  source 1..510: mol_type = other DNA
atgaaccaggtgaccgactgggtggaccccagcttcgacgacttcctggagtgcagcggcgtgagcaccatcaccgccaccagcctgggcgtgaacaacagcagccacagaagaaagaacggccccagcaccctggagagcagcagattccccgccagaaagagaggcaacctgagcagcctggagcagatctacggcctggagaacagcaaggagtacctgagcgagaacgagccctgggtggacaagtacaagcccgagacccagcacgagctggccgtgcacaagaagaagatcgaggaggtggagacctggctgaaggcccaggtgctggagagacagcccaagcagggcggcagcatcctgctgatcaccggcccccccggctgcggcaagaccaccaccctgaagatcctgagcaaggagcacggcatccaggtgcaggagtggatcaaccccgtgctgcccgacttccagaaggacgacttcaagggcatgttcaacacctag

SEQ ID NO: 12488 - DNA, 66 bp, synthetic construct
  misc_feature 1..66: note = Description of Artificial Sequence: Synthetic coding sequence
  source 1..66: mol_type = other DNA
atgaaccaggtgaccgactgggtggaccccagcttcgacgacttcctggagtgcagcggcgtgtag

SEQ ID NO: 12489 - DNA, 2046 bp, synthetic construct; identical to SEQ ID NO: 12486
  misc_feature 1..2046: note = Description of Artificial Sequence: Synthetic coding sequence
  source 1..2046: mol_type = other DNA

SEQ ID NO: 12490 - DNA, 1518 bp, synthetic construct; identical to SEQ ID NO: 12484
  misc_feature 1..1518: note = Description of Artificial Sequence: Synthetic coding sequence
  source 1..1518: mol_type = other DNA

SEQ ID NO: 12491 - DNA, 1488 bp, synthetic construct
  misc_feature 1..1488: note = Description of Artificial Sequence: Synthetic coding sequence
  source 1..1488: mol_type = other DNA
atggacagcctggccgagagcagatggccccccggcctggccgtgatgaagaccatcgacgacctgctgagatgcggcatctgcttcgagtacttcaacatcgccatgatcatcccccagtgcagccacaactactgcagcctgtgcatcagaaagttcctgagctacaagacccagtgccccacctgctgcgtgaccgtgaccgagcccgacctgaagaacaacagaatcctggacgagctggtgaagagcctgaacttcgccagaaaccacctgctgcagttcgccctggagagccccgccaagagccccgccagcagcagcagcaagaacctggccgtgaaggtgtacacccccgtggccagcagacagagcctgaagcagggcagcagactgatggacaacttcctgatcagagagatgagcggcagcaccagcgagctgctgatcaaggagaacaagagcaagttcagcccccagaaggaggccagccccgccgccaagaccaaggagaccagaagcgtggaggagatcgcccccgaccccagcgaggccaagagacccgagccccccagcaccagcaccctgaagcaggtgaccaaggtggactgccccgtgtgcggcgtgaacatccccgagagccacatcaacaagcacctggacagctgcctgagcagagaggagaagaaggagagcctgagaagcagcgtgcacaagagaaagcccctgcccaagaccgtgtacaacctgctgagcgacagagacctgaagaagaagctgaaggagcacggcctgagcatccagggcaacaagcagcagctgatcaagagacaccaggagttcgtgcacatgtacaacgcccagtgcgacgccctgcaccccaagagcgccgccgagatcgtgagagagatcgagaacatcgagaagaccagaatgagactggaggccagcaagctgaacgagagcgtgatggtgttcaccaaggaccagaccgagaaggagatcgacgagatccacagcaagtacagaaagaagcacaagagcgagttccagctgctggtggaccaggccagaaagggctacaagaagatcgccggcatgagccagaagaccgtgaccatcaccaaggaggacgagagcaccgagaagctgagcagcgtgtgcatgggccaggaggacaacatgaccagcgtgaccaaccacttcagccagagcaagctggacagccccgaggagctggagcccgacagagaggaggacagcagcagctgcatcgacatccaggaggtgctgagcagcagcgagagcgacagctgcaacagcagcagcagcgacatcatcagagacctgctggaggaggaggaggcctgggaggccagccacaagaacgacctgcaggacaccgagatcagccccagacagaacagaagaaccagagccgccgagagcgccgagatcgagcccagaaacaagagaaacagaaactag

SEQ ID NO: 12492 - DNA, 279 bp, synthetic construct
  misc_feature 1..279: note = Description of Artificial Sequence: Synthetic coding sequence
  source 1..279: mol_type = other DNA
atggacagcctggccgagagcagatggccccccggcctggccgtgatgaagaccatcgacgacctgctgagatgcggcatctgcttcgagtacttcaacatcgccatgatcatcccccagtgcagccacaactactgcagcctgtgcatcagaaagttcctgagctacaagacccagtgccccacctgctgcgtgaccgtgaccgagcccgacctgaagaacaacagaatcctggacgagctggtgaagagcctgaacttcgccagaaaccacctgtag

SEQ ID NO: 12493 - DNA, 1092 bp, synthetic construct
  misc_feature 1..1092: note = Description of Artificial Sequence: Synthetic coding sequence
  source 1..1092: mol_type = other DNA
atggccgtgaccatcaccctgaagaccctgcagcagcagaccttcaagatcagaatggagcccgacgagaccgtgaaggtgctgaaggagaagatcgaggccgagaagggcagagacgccttccccgtggccggccagaagctgatctacgccggcaagatcctgagcgacgacgtgcccatcagagactacagaatcgacgagaagaacttcgtggtggtgatggtgaccaagaccaaggccggccagggcaccagcgccccccccgaggccagccccaccgccgcccccgagagcagcaccagcttcccccccgcccccaccagcggcatgagccaccccccccccgccgccagagaggacaagagccccagcgaggagagcgcccccaccaccagccccgagagcgtgagcggcagcgtgcccagcagcggcagcagcggcagagaggaggacgccgccagcaccctggtgaccggcagcgagtacgagaccatgctgaccgagatcatgagcatgggctacgagagagagagagtggtggccgccctgagagccagctacaacaacccccacagagccgtggagtacctgctgaccggcatccccggcagccccgagcccgagcacggcagcgtgcaggagagccaggtgagcgagcagcccgccaccgaggccgccggcgagaaccccctggagttcctgagagaccagccccagttccagaacatgagacaggtgatccagcagaaccccgccctgctgcccgccctgctgcagcagctgggccaggagaacccccagctgctgcagcagatcagcagacaccaggagcagttcatccagatgctgaacgagccccccggcgagctggccgacatcagcgacgtggagggcgaggtgggcgccatcggcgaggaggccccccagatgaactacatccaggtgaccccccaggagaaggaggccatcgagagactgaaggccctgggcttccccgagagcctggtgatccaggcctacttcgcctgcgagaagaacgagaacctggccgccaacttcctgctgagccagaacttcgacgacgagtag

SEQ ID NO: 12494 - DNA, 597 bp, synthetic construct
  misc_feature 1..597: note = Description of Artificial Sequence: Synthetic coding sequence
  source 1..597: mol_type = other DNA
atgctgaccgagatcatgagcatgggctacgagagagagagagtggtggccgccctgagagccagctacaacaacccccacagagccgtggagtacctgctgaccggcatccccggcagccccgagcccgagcacggcagcgtgcaggagagccaggtgagcgagcagcccgccaccgaggccgccggcgagaaccccctggagttcctgagagaccagccccagttccagaacatgagacaggtgatccagcagaaccccgccctgctgcccgccctgctgcagcagctgggccaggagaacccccagctgctgcagcagatcagcagacaccaggagcagttcatccagatgctgaacgagccccccggcgagctggccgacatcagcgacgtggagggcgaggtgggcgccatcggcgaggaggccccccagatgaactacatccaggtgaccccccaggagaaggaggccatcgagagactgaaggccctgggcttccccgagagcctggtgatccaggcctacttcgcctgcgagaagaacgagaacctggccgccaacttcctgctgagccagaacttcgacgacgagtag

SEQ ID NO: 12495 - DNA, 1092 bp, synthetic construct; identical to SEQ ID NO: 12493
  misc_feature 1..1092: note = Description of Artificial Sequence: Synthetic coding sequence
  source 1..1092: mol_type = other DNA

SEQ ID NO: 12496 - DNA, 927 bp, synthetic construct
  misc_feature 1..927: note = Description of Artificial Sequence: Synthetic coding sequence
  source 1..927: mol_type = other DNA
atggccgtgaccatcaccctgaagaccctgcagcagcagaccttcaagatcagaatggagcccgacgagaccgtgaaggtgctgaaggagaagatcgaggccgagaagggcagagacgccttccccgtggccggccagaagctgatctacgccggcaagatcctgagcgacgacgtgcccatcagagactacagaatcgacgagaagaacttcgtggtggtgatggtgaccaagaccaaggccggccagggcaccagcgccccccccgaggccagccccaccgccgcccccgagagcagcaccagcttcccccccgcccccaccagcggcatgagccaccccccccccgccgccagagaggacaagagccccagcgaggagagcgcccccaccaccagccccgagagcgtgagcggcagcgtgcccagcagcggcagcagcggcagagaggaggacgccgccagcaccctggtgaccggcagcgagtacgagaccatgctgaccgagatcatgagcatgggctacgagagagagagagtggtggccgccctgagagccagctacaacaacccccacagagccgtggagtacctgctgaccggcatccccggcagccccgagcccgagcacggcagcgtgcaggagagccaggtgagcgagcagcccgccaccgaggccgccggcgagaaccccctggagttcctgagagaccagccccagttccagaacatgagacaggtgatccagcagaaccccgccctgctgcccgccctgctgcagcagctgggccaggagaacccccagctgctgcagctgaaggccctgggcttccccgagagcctggtgatccaggcctacttcgcctgcgagaagaacgagaacctggccgccaacttcctgctgagccagaacttcgacgacgagtag

SEQ ID NO: 12497 - DNA, 1230 bp, synthetic construct
  misc_feature 1..1230: note = Description of Artificial Sequence: Synthetic coding sequence
  source 1..1230: mol_type = other DNA
atgcaggtgaccctgaagaccctgcagcagcagaccttcaagatcgacatcgaccccgaggagaccgtgaaggccctgaaggagaagatcgagagcgagaagggcaaggacgccttccccgtggccggccagaagctgatctacgccggcaagatcctgaacgacgacaccgccctgaaggagtacaagatcgacgagaagaacttcgtggtggtgatggtgaccaagcccaaggccgtgagcacccccgcccccgccaccacccagcagagcgcccccgccagcaccaccgccgtgaccagcagcaccaccaccaccgtggcccaggcccccacccccgtgcccgccctggcccccaccagcacccccgccagcatcacccccgccagcgccaccgccagcagcgagcccgcccccgccagcgccgccaagcaggagaagcccgccgagaagcccgccgagacccccgtggccaccagccccaccgccaccgacagcaccagcggcgacagcagcagaagcaacctgttcgaggacgccaccagcgccctggtgaccggccagagctacgagaacatggtgaccgagatcatgagcatgggctacgagagagagcaggtgatcgccgccctgagagccagcttcaacaaccccgacagagccgtggagtacctgctgatgggcatccccggcgacagagagagccaggccgtggtggaccccccccaggccgccagcaccggcgccccccagagcagcgccgtggccgccgccgccgccaccaccaccgccaccaccaccaccaccagcagcggcggccaccccctggagttcctgagaaaccagccccagttccagcagatgagacagatcatccagcagaaccccagcctgctgcccgccctgctgcagcagatcggcagagagaacccccagctgctgcagcagatcagccagcaccaggagcacttcatccagatgctgaacgagcccgtgcaggaggccggcggccagggcggcggcggcggcggcggcagcggcggcatcgccgaggccggcagcggccacatgaactacatccaggtgaccccccaggagaaggaggccatcgagagactgaaggccctgggcttccccgagggcctggtgatccaggcctacttcgcctgcgagaagaacgagaacctggccgccaacttcctgctgcagcagaacttcgacgaggactag

SEQ ID NO: 12498 - DNA, 519 bp, synthetic construct
  misc_feature 1..519: note = Description of Artificial Sequence: Synthetic coding sequence
  source 1..519: mol_type = other DNA
atggtgaccaagcccaaggccgtgagcacccccgcccccgccaccacccagcagagcgcccccgccagcaccaccgccgtgaccagcagcaccaccaccaccgtggcccaggcccccacccccgtgcccgccctggcccccaccagcacccccgccagcatcacccccgccagcgccaccgccagcagcgagcccgcccccgccagcgccgccaagcaggagaagcccgccgagaagcccgccgagacccccgtggccaccagccccaccgccaccgacagcaccagcggcgacagcagcagaagcaacctgttcgaggacgccaccagcgccctggtgaccggccagagctacgagaacatggtgaccgagatcatgagcatgggctacgagagagagcaggtgatcgccgccctgagagccagcttcaacaaccccgacagagccgtggagtacctgctgatgatcatcgtgaagaccggcaacaagaagaagaagcagcccctgctgggcaagtag

SEQ ID NO: 12499 - DNA, 1014 bp, synthetic construct
  misc_feature 1..1014: note = Description of Artificial Sequence: Synthetic coding sequence
  source 1..1014: mol_type = other DNA
atggtgaccaagcccaaggccgtgagcacccccgcccccgccaccacccagcagagcgcccccgccagcaccaccgccgtgaccagcagcaccaccaccaccgtggcccaggcccccacccccgtgcccgccctggcccccaccagcacccccgccagcatcacccccgccagcgccaccgccagcagcgagcccgcccccgccagcgccgccaagcaggagaagcccgccgagaagcccgccgagacccccgtggccaccagccccaccgccaccgacagcaccagcggcgacagcagcagaagcaacctgttcgaggacgccaccagcgccctggtgaccggccagagctacgagaacatggtgaccgagatcatgagcatgggctacgagagagagcaggtgatcgccgccctgagagccagcttcaacaaccccgacagagccgtggagtacctgctgatgggcatccccggcgacagagagagccaggccgtggtggaccccccccaggccgccagcaccggcgccccccagagcagcgccgtggccgccgccgccgccaccaccaccgccaccaccaccaccaccagcagcggcggccaccccctggagttcctgagaaaccagccccagttccagcagatgagacagatcatccagcagaaccccagcctgctgcccgccctgctgcagcagatcggcagagagaacccccagctgctgcagcagatcagccagcaccaggagcacttcatccagatgctgaacgagcccgtgcaggaggccggcggccagggcggcggcggcggcggcggcagcggcggcatcgccgaggccggcagcggccacatgaactacatccaggtgaccccccaggagaaggaggccatcgagagactgaaggccctgggcttccccgagggcctggtgatccaggcctacttcgcctgcgagaagaacgagaacctggccgccaacttcctgctgcagcagaacttcgacgaggactag

SEQ ID NO: 12500 - DNA, 441 bp, synthetic construct
  misc_feature 1..441: note = Description of Artificial Sequence: Synthetic coding sequence
  source 1..441: mol_type = other DNA
atgcaggtgaccctgaagaccctgcagcagcagaccttcaagatcgacatcgaccccgaggagaccgtgaaggccctgaaggagaagatcgagagcgagaagggcaaggacgccttccccgtggccggccagaagctgatctacgccggcaagatcctgaacgacgacaccgccctgaaggagtacaagatcgacgagaagaacttcgtggtggtgatggtgaccaagcccaaggccgtgagcacccccgcccccgccaccacccagcagagcgcccccgccagcaccaccgccgtgaccagcagcaccaccaccaccgtggcccaggcccccacccccgtgcccgccctggcccccaccagcacccccgccagcatcacccccgccagcgccaccgccagcagcgagcccgcccccgccagcgccgccaagcaggagtag

SEQ ID NO: 12501 - DNA, 243 bp, synthetic construct
  misc_feature 1..243: note = Description of Artificial Sequence: Synthetic coding sequence
  source 1..243: mol_type = other DNA
atggtgaaggccctgaaggagaagatcgagagcgagaagggcaaggacgccttccccgtggccggccagaagctgatctacgccggcaagatcctgaacgacgacaccgccctgaaggagtacaagatcgacgagaagaacttcgtggtggtgatggtgaccaagcccaaggccgtgagcacccccgcccccgccaccacccagcagagcgcccccgccagcaccaccgccgtgaccagctag

SEQ ID NO: 12502 - DNA, 345 bp, synthetic construct
  misc_feature 1..345: note = Description of Artificial Sequence: Synthetic coding sequence
  source 1..345: mol_type = other DNA
tgaaccgccagcagcgagcccgcccccgccagcgccgccaagcaggagaagcccgccgagaagcccgccgagacccccgtggccaccagccccaccgccaccgacagcaccagcggcgacagcagcagaagcaacctgttcgaggacgccaccagcgccctggtgaccggccagagctacgagaacatggtgaccgagatcatgagcatgggctacgagagagagcaggtgatcgccgccctgagagccagcttcaacaaccccgacagagccgtggagtacctgctgatgatcatcgtgaagaccggcaacaagaagaagaagcagcccctgctgggcaagtag

SEQ ID NO: 12503 - DNA, 3939 bp, synthetic construct
  misc_feature 1..3939: note = Description of Artificial Sequence: Synthetic coding sequence
  source 1..3939: mol_type = other DNA
atgagcagaatcgagaagatgagcatcctgggcgtgagaagcttcggcatcgaggacaaggacaagcagatcatcaccttcttcagccccctgaccatcctggtgggccccaacggcgccggcaagaccaccatcatcgagtgcctgaagtacatctgcaccggcgacttcccccccggcaccaagggcaacaccttcgtgcacgaccccaaggtggcccaggagaccgacgtgagagcccagatcagactgcagttcagagacgtgaacggcgagctgatcgccgtgcagagaagcatggtgtgcacccagaagagcaagaagaccgagttcaagaccctggagggcgtgatcaccagaaccaagcacggcgagaaggtgagcctgagcagcaagtgcgccgagatcgacagagagatgatcagcagcctgggcgtgagcaaggccgtgctgaacaacgtgatcttctgccaccaggaggacagcaactggcccctgagcgagggcaaggccctgaagcagaagttcgacgagatcttcagcgccaccagatacatcaaggccctggagaccctgagacaggtgagacagacccagggccagaaggtgaaggagtaccagatggagctgaagtacctgaagcagtacaaggagaaggcctgcgagatcagagaccagatcaccagcaaggaggcccagctgaccagcagcaaggagatcgtgaagagctacgagaacgagctggaccccctgaagaacagactgaaggagatcgagcacaacctgagcaagatcatgaagctggacaacgagatcaaggccctggacagcagaaagaagcagatggagaaggacaacagcgagctggaggagaagatggagaaggtgttccagggcaccgacgagcagctgaacgacctgtaccacaaccaccagagaaccgtgagagagaaggagagaaagctggtggactgccacagagagctggagaagctgaacaaggagagcagactgctgaaccaggagaagagcgagctgctggtggagcagggcagactgcagctgcaggccgacagacaccaggagcacatcagagccagagacagcctgatccagagcctggccacccagctggagctggacggcttcgagagaggccccttcagcgagagacagatcaagaacttccacaagctggtgagagagagacaggagggcgaggccaagaccgccaaccagctgatgaacgacttcgccgagaaggagaccctgaagcagaagcagatcgacgagatcagagacaagaagaccggcctgggcagaatcatcgagctgaagagcgagatcctgagcaagaagcagaacgagctgaagaacgtgaagtacgagctgcagcagctggagggcagcagcgacagaatcctggagctggaccaggagctgatcaaggccgagagagagctgagcaaggccgagaagaacagcaacgtggagaccctgaagatggaggtgatcagcctgcagaacgagaaggccgacctggacagaaccctgagaaagctggaccaggagatggagcagctgaaccaccacaccaccaccagaacccagatggagatgctgaccaaggacaaggccgacaaggacgagcagatcagaaagatcaagagcagacacagcgacgagctgaccagcctgctgggctacttccccaacaagaagcagctggaggactggctgcacagcaagagcaaggagatcaaccagaccagagacagactggccaagctgaacaaggagctggccagcagcgagcagaacaagaaccacatcaacaacgagctgaagagaaaggaggagcagctgagcagctacgaggacaagctgttcgacgtgtgcggcagccaggacttcgagagcgacctggacagactgaaggaggagatcgagaagagcagcaagcagagagccatgctggccggcgccaccgccgtgtacagccagttcatcacccagctgaccgacgagaaccagagctgctgccccgtgtgccagagagtgttccagaccgaggccgagctgcaggaggtgatcagcgacctgcagagcaagctgagactggcccccgacaagctgaagagcaccgagagcgagctgaagaagaaggagaagagaagagacgagatgctgggcctggtgcccatgagacagagcatcatcgacctgaaggagaaggagatccccgagctgagaaacaagctgcagaacgtgaacagagacatccagagactgaagaacgacatcgaggagcaggagaccctgctgggcaccatcatgcccgaggaggagagcgccaaggtgtgcctgaccgacgtgaccatcatggagagattccagatggagctgaaggacgtggagagaaagatcgcccagcaggccgccaagctgcagggcatcgacctggacagaaccgtgcagcaggtgaaccaggagaagcaggagaagcagcacaagctggacaccgtgagcagcaagatcgagctgaacagaaagctgatccaggaccagcaggagcagatccagcacctgaagagcaccaccaacgagctgaagagcgagaagctgcagatcagcaccaacctgcagagaagacagcagctggaggagcagaccgtggagctgagcaccgaggtgcagagcctgtacagagagatcaaggacgccaaggagcaggtgagccccctggagaccaccctggagaagttccagcaggagaaggaggagctgatcaacaagaagaacaccagcaacaagatcgcccaggacaagctgaacgacatcaaggagaaggtgaagaacatccacggctacatgaaggacatcgagaactacatccaggacggcaaggacgactacaagaagcagaaggagaccgagctgaacaaggtgatcgcccagctgagcgagtgcgagaagcacaaggagaagatcaacgaggacatgagactgatgagacaggacatcgacacccagaagatccaggagagatggctgcaggacaacctgaccctgagaaagagaaacgaggagctgaaggaggtggaggaggagagaaagcagcacctgaaggagatgggccagatgcaggtgctgcagatgaagagcgagcaccagaagctggaggagaacatcgacaacatcaagagaaaccacaacctggccctgggcagacagaagggctacgaggaggagatcatccacttcaagaaggagctgagagagccccagttcagagacgccgaggagaagtacagagagatgatgatcgtgatgagaaccaccgagctggtgaacaaggacctggacatctactacaagaccctggaccaggccatcatgaagttccacagcatgaagatggaggagatcaacaagatcatcagagacctgtggagaagcacctacagaggccaggacatcgagtacatcgagatcagaagcgacgccgacgagaacgtgagcgccagcgacaagagaagaaactacaactacagagtggtgatgctgaagggcgacaccgccctggacatgagaggcagatgcagcgccggccagaaggtgctggccagcctgatcatcagactggccctggccgagaccttctgcctgaactgcggcatcatcgccctggacgagcccaccaccaacctggacagagagaacatcgagagcctggcccacgccctggtggagatcatcaagagcagaagccagcagagaaacttccagctgctggtgatcacccacgacgaggacttcgtggagctgctgggcagaagcgagtacgtggagaagttctacagaatcaagaagaacatcgaccagtgcagcgagatcgtgaagtgcagcgtgagcagcctgggcttcaacgtgcactag

SEQ ID NO: 12504 - DNA, 3522 bp, synthetic construct
  misc_feature 1..3522: note = Description of Artificial Sequence: Synthetic coding sequence
  source 1..3522: mol_type = other DNA
atgatcagcagcctgggcgtgagcaaggccgtgctgaacaacgtgatcttctgccaccaggaggacagcaactggcccctgagcgagggcaaggccctgaagcagaagttcgacgagatcttcagcgccaccagatacatcaaggccctggagaccctgagacaggtgagacagacccagggccagaaggtgaaggagtaccagatggagctgaagtacctgaagcagtacaaggagaaggcctgcgagatcagagaccagatcaccagcaaggaggcccagctgaccagcagcaaggagatcgtgaagagctacgagaacgagctggaccccctgaagaacagactgaaggagatcgagcacaacctgagcaagatcatgaagctggacaacgagatcaaggccctggacagcagaaagaagcagatggagaaggacaacagcgagctggaggagaagatggagaaggtgttccagggcaccgacgagcagctgaacgacctgtaccacaaccaccagagaaccgtgagagagaaggagagaaagctggtggactgccacagagagctggagaagctgaacaaggagagcagactgctgaaccaggagaagagcgagctgctggtggagcagggcagactgcagctgcaggccgacagacaccaggagcacatcagagccagagacagcctgatccagagcctggccacccagctggagctggacggcttcgagagaggccccttcagcgagagacagatcaagaacttccacaagctggtgagagagagacaggagggcgaggccaagaccgccaaccagctgatgaacgacttcgccgagaaggagaccctgaagcagaagcagatcgacgagatcagagacaagaagaccggcctgggcagaatcatcgagctgaagagcgagatcctgagcaagaagcagaacgagctgaagaacgtgaagtacgagctgcagcagctggagggcagcagcgacagaatcctggagctggaccaggagctgatcaaggccgagagagagctgagcaaggccgagaagaacagcaacgtggagaccctgaagatggaggtgatcagcctgcagaacgagaaggccgacctggacagaaccctgagaaagctggaccaggagatggagcagctgaaccaccacaccaccaccagaacccagatggagatgctgaccaaggacaaggccgacaaggacgagcagatcagaaagatcaagagcagacacagcgacgagctgaccagcctgctgggctacttccccaacaagaagcagctggaggactggctgcacagcaagagcaaggagatcaaccagaccagagacagactggccaagctgaacaaggagctggccagcagcgagcagaacaagaaccacatcaacaacgagctgaagagaaaggaggagcagctgagcagctacgaggacaagctgttcgacgtgtgcggcagccaggacttcgagagcgacctggacagactgaaggaggagatcgagaagagcagcaagcagagagccatgctggccggcgccaccgccgtgtacagccagttcatcacccagctgaccgacgagaaccagagctgctgccccgtgtgccagagagtgttccagaccgaggccgagctgcaggaggtgatcagcgacctgcagagcaagctgagactggcccccgacaagctgaagagcaccgagagcgagctgaagaagaaggagaagagaagagacgagatgctgggcctggtgcccatgagacagagcatcatcgacctgaaggagaaggagatccccgagctgagaaacaagctgcagaacgtgaacagagacatccagagactgaagaacgacatcgaggagcaggagaccctgctgggcaccatcatgcccgaggaggagagcgccaaggtgtgcctgaccgacgtgaccatcatggagagattccagatggagctgaaggacgtggagagaaagatcgcccagcaggccgccaagctgcagggcatcgacctggacagaaccgtgcagcaggtgaaccaggagaagcaggagaagcagcacaagctggacaccgtgagcagcaagatcgagctgaacagaaagctgatccaggaccagcaggagcagatccagcacctgaagagcaccaccaacgagctgaagagcgagaagctgcagatcagcaccaacctgcagagaagacagcagctggaggagcagaccgtggagctgagcaccgaggtgcagagcctgtacagagagatcaaggacgccaaggagcaggtgagccccctggagaccaccctggagaagttccagcaggagaaggaggagctgatcaacaagaagaacaccagcaacaagatcgcccaggacaagctgaacgacatcaaggagaaggtgaagaacatccacggctacatgaaggacatcgagaactacatccaggacggcaaggacgactacaagaagcagaaggagaccgagctgaacaaggtgatcgcccagctgagcgagtgcgagaagcacaaggagaagatcaacgaggacatgagactgatgagacaggacatcgacacccagaagatccaggagagatggctgcaggacaacctgaccctgagaaagagaaacgaggagctgaaggaggtggaggaggagagaaagcagcacctgaaggagatgggccagatgcaggtgctgcagatgaagagcgagcaccagaagctggaggagaacatcgacaacatcaagagaaaccacaacctggccctgggcagacagaagggctacgaggaggagatcatccacttcaagaaggagctgagagagccccagttcagagacgccgaggagaagtacagagagatgatgatcgtgatgagaaccaccgagctggtgaacaaggacctggacatctactacaagaccctggaccaggccatcatgaagttccacagcatgaagatggaggagatcaacaagatcatcagagacctgtggagaagcacctacagaggccaggacatcgagtacatcgagatcagaagcgacgccgacgagaacgtgagcgccagcgacaagagaagaaactacaactacagagtggtgatgctgaagggcgacaccgccctggacatgagaggcagatgcagcgccggccagaaggtgctggccagcctgatcatcagactggccctggccgagaccttctgcctgaactgcggcatcatcgccctggacgagcccaccaccaacctggacagagagaacatcgagagcctggcccacgccctggtggagatcatcaagagcagaagccagcagagaaacttccagctgctggtgatcacccacgacgaggacttcgtggagctgctgggcagaagcgagtacgtggagaagttctacagaatcaagaagaacatcgaccagtgcagcgagatcgtgaagtgcagcgtgagcagcctgggcttcaacgtgcactag

SEQ ID NO: 12505 - DNA, 1020 bp, synthetic construct
  misc_feature 1..1020: note = Description of Artificial Sequence: Synthetic coding sequence
  source 1..1020: mol_type = other DNA
atggccatgcagatgcagctggaggccaacgccgacaccagcgtggaggaggagagcttcggcccccagcccatcagcagactggagcagtgcggcatcaacgccaacgacgtgaagaagctggaggaggccggcttccacaccgtggaggccgtggcctacgcccccaagaaggagctgatcaacatcaagggcatcagcgaggccaaggccgacaagatcctggccgaggccgccaagctggtgcccatgggcttcaccaccgccaccgagttccaccagagaagaagcgagatcatccagatcaccaccggcagcaaggagctggacaagctgctgcagggcggcatcgagaccggcagcatcaccgagatgttcggcgagttcagaaccggcaagacccagatctgccacaccctggccgtgacctgccagctgcccatcgacagaggcggcggcgagggcaaggccatgtacatcgacaccgagggcaccttcagacccgagagactgctggccgtggccgagagatacggcctgagcggcagcgacgtgctggacaacgtggcctacgccagagccttcaacaccgaccaccagacccagctgctgtaccaggccagcgccatgatggtggagagcagatacgccctgctgatcgtggacagcgccaccgccctgtacagaaccgactacagcggcagaggcgagctgagcgccagacagatgcacctggccagattcctgagaatgctgctgagactggccgacgagttcggcgtggccgtggtgatcaccaaccaggtggtggcccaggtggacggcgccgccatgttcgccgccgaccccaagaagcccatcggcggcaacatcatcgcccacgccagcaccaccagactgtacctgagaaagggcagaggcgagaccagaatctgcaagatctacgacagcccctgcctgcccgaggccgaggccatgttcgccatcaacgccgacggcgtgggcgacgccaaggactag

SEQ ID NO: 12506 - DNA, 729 bp, synthetic construct
  misc_feature 1..729: note = Description of Artificial Sequence: Synthetic coding sequence
  source 1..729: mol_type = other DNA
atggccatgcagatgcagctggaggccaacgccgacaccagcgtggaggaggagagcttcggcccccagcccatcagcagactggagcagtgcggcatcaacgccaacgacgtgaagaagctggaggaggccggcttccacaccgtggaggccgtggcctacgcccccaagaaggagctgatcaacatcaagggcatcagcgaggccaaggccgacaagatcctgctgctgagccacagatacggcctgagcggcagcgacgtgctggacaacgtggcctacgccagagccttcaacaccgaccaccagacccagctgctgtaccaggccagcgccatgatggtggagagcagatacgccctgctgatcgtggacagcgccaccgccctgtacagaaccgactacagcggcagaggcgagctgagcgccagacagatgcacctggccagattcctgagaatgctgctgagactggccgacgagttcggcgtggccgtggtgatcaccaaccaggtggtggcccaggtggacggcgccgccatgttcgccgccgaccccaagaagcccatcggcggcaacatcatcgcccacgccagcaccaccagactgtacctgagaaagggcagaggcgagaccagaatctgcaagatctacgacagcccctgcctgcccgaggccgaggccatgttcgccatcaacgccgacggcgtgggcgacgccaaggactag

SEQ ID NO: 12507 - DNA, 1023 bp, synthetic construct
  misc_feature 1..1023: note = Description of Artificial Sequence: Synthetic coding sequence
  source 1..1023: mol_type = other DNA
atggccatgcagatgcagctggaggccaacgccgacaccagcgtggaggaggagagcttcggcccccagcccatcagcagactggagcagtgcggcatcaacgccaacgacgtgaagaagctggaggaggccggcttccacaccgtggaggccgtggcctacgcccccaagaaggagctgatcaacatcaagggcatcagcgaggccaaggccgacaagatcctgaccgagagcagaagcgtggccagactggagtgcaacagcgtgatcctggtgtactgcaccctgagactgagcggcagcagcgacagccccgccagcgccagcagagtggtgggcaccaccggcggcatcgagaccggcagcatcaccgagatgttcggcgagttcagaaccggcaagacccagatctgccacaccctggccgtgacctgccagctgcccatcgacagaggcggcggcgagggcaaggccatgtacatcgacaccgagggcaccttcagacccgagagactgctggccgtggccgagagatacggcctgagcggcagcgacgtgctggacaacgtggcctacgccagagccttcaacaccgaccaccagacccagctgctgtaccaggccagcgccatgatggtggagagcagatacgccctgctgatcgtggacagcgccaccgccctgtacagaaccgactacagcggcagaggcgagctgagcgccagacagatgcacctggccagattcctgagaatgctgctgagactggccgacgagttcggcgtggccgtggtgatcaccaaccaggtggtggcccaggtggacggcgccgccatgttcgccgccgaccccaagaagcccatcggcggcaacatcatcgcccacgccagcaccaccagactgtacctgagaaagggcagaggcgagaccagaatctgcaagatctacgacagcccctgcctgcccgaggccgaggccatgttcgccatcaacgccgacggcgtgggcgacgccaaggactag

SEQ ID NO: 12508 - DNA, 843 bp, synthetic construct
  misc_feature 1..843: note = Description of Artificial Sequence: Synthetic coding sequence
  source 1..843: mol_type = other DNA
atggccatgcagatgcagctggaggccaacgccgacaccagcgtggaggaggagagcttcggcccccagcccatcagcagactggagcagtgcggcatcaacgccaacgacgtgaagaagctggaggaggccggcttccacaccgtggaggccgtggcctacgcccccaagaaggagctgatcaacatcaagggcatcagcgaggccaaggccgacaagatcctggccgaggccgccaagctggtgcccatgggcttcaccaccgccaccgagttccaccagagaagaagcgagatcatccagatcaccaccggcagcaaggagctggacaagctgctgcagggcggcatcgagaccggcagcatcaccgagatgttcggcgagttcagaaccggcaagacccagatctgccacaccctggccgtgacctgccagctgcccatcgacagaggcggcggcgagggcaaggccatgtacatcgacaccgagggcaccttcagacccgagagactgctggccgtggccgagagatacggcctgagcggcagcgacgtgctggacaacgtggcctacgccagagccttcaacaccgaccaccagacccagctgctgtaccaggccagcgccatgatggtggagagcagatacgccctgctgatcgtggacagcgccaccgccctgtacagaaccgactacagcggcagaggcgagctgagcgccagacagatgcacctggccagattcctgagaatgctgctgagactggccgacgagatcgtgagcgaggagagaaagagaggcaaccagaacctgcagaacctgagactgagcctgagcagctag

SEQ ID NO: 12509 - DNA, 456 bp, synthetic construct
  misc_feature 1..456: note = Description of Artificial Sequence: Synthetic coding sequence
  source 1..456: mol_type = other DNA
atggccatgcagatgcagctggaggccaacgccgacaccagcgtggaggaggagagcttcggcccccagcccatcagcagactggagcagtgcggcatcaacgccaacgacgtgaagaagctggaggaggccggcttccacaccgtggaggccgtggcctacgcccccaagaaggagctgatcaacatcaagggcatcagcgaggccaaggccgacaagatcctggccgaggccgccaagctggtgcccatgggcttcaccaccgccaccgagttccaccagagaagaagcgagatcatccagatcaccaccggcagcaaggagctggacaagctgctgcagggcggcatcgagaccggcagcatcaccgagatgttcggcgagttcagaaccggcaagacccagatctgccacaccctggccgtgacctgccaggtgtggagcctgtggcagtag

SEQ ID NO: 12510 - DNA, 228 bp, synthetic construct
  misc_feature 1..228: note = Description of Artificial Sequence: Synthetic coding sequence
  source 1..228: mol_type = other DNA
atggccatgcagatgcagctggaggccaacgccgacaccagcgtggaggaggagagcttcggcccccagcccatcagcagactggagcagtgcggcatcaacgccaacgacgtgaagaagctggaggaggccggcttccacaccgtggaggccgtggcctacgcccccaagaaggagctgatcaacatcaagggcatcagcgaggccaaggccgacaagatcctgtag

SEQ ID NO: 12511 - DNA, 519 bp, synthetic construct
  misc_feature 1..519: note = Description of Artificial Sequence: Synthetic coding sequence
  source 1..519: mol_type = other DNA
atggccatgcagatgcagctggaggccaacgccgacaccagcgtggaggaggagagcttcggcccccagcccatcagcagactggagcagtgcggcatcaacgccaacgacgtgaagaagctggaggaggccggcttccacaccgtggaggccgtggcctacgcccccaagaaggagctgatcaacatcaagggcatcagcgaggccaaggccgacaagatcctggccgaggccgccaagctggtgcccatgggcttcaccaccgccaccgagttccaccagagaagaagcgagatcatccagatcaccaccggcagcaaggagctggacaagctgctgcagggcggcatcgagaccggcagcatcaccgagatgttcggcgagttcagaaccggcaagacccagatctgccacaccctggccgtgacctgccagctgcccatcgacagaggcggcggcgagggcaaggccatgtacatcgacaccgagggcaccttcagacccgagagactgctgtag

SEQ ID NO: 12512 - DNA, 303 bp, synthetic construct
  misc_feature 1..303: note = Description of Artificial Sequence: Synthetic coding sequence
  source 1..303: mol_type = other DNA
atggccatgcagatgcagctggaggccaacgccgacaccagcgtggaggaggagagcttcggcccccagcccatcagcagactggagcagtgcggcatcaacgccaacgacgtgaagaagctggaggaggccggcttccacaccgtggaggccgtggcctacgcccccaagaaggagctgatcaacatcaagggcatcagcgaggccaaggccgacaagatcctggtggagctgagactggacctgagccagaagtgcctggagaacagcgagctgggcagacccagaagcgtgatcagatag

SEQ ID NO: 12513 - DNA, 1023 bp, synthetic construct; identical to SEQ ID NO: 12507
  misc_feature 1..1023: note = Description of Artificial Sequence: Synthetic coding sequence
  source 1..1023: mol_type = other DNA

SEQ ID NO: 12514 - DNA, 729 bp, synthetic construct
  misc_feature 1..729: note = Description of Artificial Sequence: Synthetic coding sequence
  source 1..729: mol_type = other DNA
atggccatgcagatgcagctggaggccaacgccgacaccagcgtggaggaggagagcttcggcccccagcccatcagcagactggagcagtgcggcatcaacgccaacgacgtgaagaagctggaggaggccggcttccacaccgtggaggccgtggcctacgcccccaagaaggagctgatcaacatcaagggcatcagcgaggccaaggccgacaagatcctggccgtggccgagagatacggcctgagcggcagcgacgtgctggacaacgtggcctacgccagagccttcaacaccgaccaccagacccagctgctgtaccaggccagcgccatgatggtggagagcagatacgccctgctgatcgtggacagcgccaccgccctgtacagaaccgactacagcggcagaggcgagctgagcgccagacagatgcacctggccagattcctgagaatgctgctgagactggccgacgagttcggcgtggccgtggtgatcaccaaccaggtggtggcccaggtggacggcgccgccatgttcgccgccgaccccaagaagcccatcggcggcaacatcatcgcccacgccagcaccaccagactgtacctgagaaagggcagaggcgagaccagaatctgcaagatctacgacagcccctgcctgcccgaggccgaggccatgttcgccatcaacgccgacggcgtgggcgacgccaaggactag

SEQ ID NO: 12515 - DNA, 1053 bp, synthetic construct
  misc_feature 1..1053: note = Description of Artificial Sequence: Synthetic coding sequence
  source 1..1053: mol_type = other DNA
atgggcagcaagaagctgaagagagtgggcctgagccaggagctgtgcgacagactgagcagacaccagatcctgacctgccaggacttcctgtgcctgagccccctggagctgatgaaggtgaccggcctgagctacagaggcgtgcacgagctgctgtgcatggtgagcagagcctgcgcccccaagatgcagaccgcctacggcatcaaggcccagagaagcgccgacttcagccccgccttcctgagcaccaccctgagcgccctggacgaggccctgcacggcggcgtggcctgcggcagcctgaccgagatcaccggcccccccggctgcggcaagacccagttctgcatcatgatgagcatcctggccaccctgcccaccaacatgggcggcctggagggcgccgtggtgtacatcgacaccgagagcgccttcagcgccgagagactggtggagatcgccgagagcagattccccagatacttcaacaccgaggagaagctgctgctgaccagcagcaaggtgcacctgtacagagagctgacctgcgacgaggtgctgcagagaatcgagagcctggaggaggagatcatcagcaagggcatcaagctggtgatcctggacagcgtggccagcgtggtgagaaaggagttcgacgcccagctgcagggcaacctgaaggagagaaacaagttcctggccagagaggccagcagcctgaagtacctggccgaggagttcagcatccccgtgatcctgaccaaccagatcaccacccacctgagcggcgccctggccagccaggccgacctggtgagccccgccgacgacctgagcctgagcgagggcaccagcggcagcagctgcgtgatcgccgccctgggcaacacctggagccacagcgtgaacaccagactgatcctgcagtacctggacagcgagagaagacagatcctgatcgccaagagccccctggcccccttcaccagcttcgtgtacaccatcaaggaggagggcctggtgctgcaggcctacgcccagtgctag

SEQ ID NO: 12516 - DNA, 1101 bp, synthetic construct
  misc_feature 1..1101: note = Description of Artificial Sequence: Synthetic coding sequence
  source 1..1101: mol_type = other DNA
atgggcagcaagaagctgaagagagtgggcctgagccaggagctgtgcgacagactgagcagacaccagatcctgacctgccaggacttcctgtgcctgagccccctggagctgatgaaggtgaccggcctgagctacagaggcgtgcacgagctgctgtgcatggtgagcagagcctgcgcccccaagatgcagaccgcctacggcatcaaggcccagagaagcgccgacttcagccccgccttcctgagcaccaccctgagcgccctggacgaggccctgcacggcggcgtggcctgcggcagcctgaccgagatcaccggcccccccggctgcggcaagacccagttctgcatcatgatgagcatcctggccaccctgcccaccaacatgggcggcctggagggcgccgtggtgtacatcgacaccgagagcgccttcagcgccgagagactggtggagatcgccgagagcagattccccagatacttcaacaccgaggagaagctgctgctgaccagcagcaaggtgcacctgtacagagagctgacctgcgacgaggtgctgcagagaatcgagagcctggaggaggagatcatcagcaagggcatcaagctggtgatcctggacagcgtggccagcgtggtgagaaaggagttcgacgcccagctgcagggcaacctgaaggagagaaacaagttcctggccagagaggccagcagcctgaagtacctggccgaggagttcagcatccccgtgatcctgaccaaccagatcaccacccacctgagcggcgccctggccagccaggccgacctggtgagccccgccgacgacctgagcctgagcgagggcaccagcggcagcagctgcgtgatcgccgccctgggcaacacctggagccacagcgtgaacaccagactgatcctgcagtacctggacagcgagagaagacagatcctgatcgccaagagccccctggcccccttcaccagcttcgtgtacaccatcaaggaggagggcctggtgctgcaggagttctggcacatctgcatcagcggcttcagcatccagaacagactgaaggagaacgagagctag

SEQ ID NO: 12517 - DNA, 1053 bp, synthetic construct
  misc_feature 1..1053: note = Description of Artificial Sequence: Synthetic coding sequence
  source 1..1053: mol_type = other DNA
atgggcagcaagaagctgaagagagtgggcctgagccaggagctgtgcgacagactgagcagacaccagatcctgacctgccaggacttcctgtgcctgagccccctggagctgatgaaggtgaccggcctgagctacagaggcgtgcacgagctgctgtgcatggtgagcagagcctgcgcccccaagatgcagaccgcctacggcatcaaggcccagagaagcgccgacttcagccccgccttcctgagcaccaccctgagcgccctggacgaggccctgcacggcggcgtggcctgcggcagcctgaccgagatcaccggcccccccggctgcggcaagacccagttctgcatcatgatgagcatcctggccaccctgcccaccaacatgggcggcctggagggcgccgtggtgtacatcgacaccgagagcgccttcagcgccgagagactggtggagatcgccgagagcagattccccagatacttcaacaccgaggagaagctgctgctgaccagcagcaaggtgcacctgtacagagagctgacctgcgacgaggtgctgcagagaatcgagagcctggaggaggagatcatcagcaagggcatcaagctggtgatcctggacagcgtggccagcgtggtgagaaaggagttcgacgcccagctgcagggcaacctgaaggagagaaacaagttcctggccagagaggccagcagcctgaagtacctggccgaggagttcagcatccccgtgatcctgaccaaccagatcaccacccacctgagcggcgccctggccagccaggccgacctggtgagccccgccgacgacctgagcctgagcgagggcaccagcggcagcagctgcgtgatcgccgccctgggcaacacctggagccacagcgtgaacaccagactgatcctgcagtacctggacagcgagagaagacagatcctgatcgccaagagccccctggcccccttcaccagcttcgtgtacaccatcaaggaggagggcctggtgctgcagggccaggagaccccctag

SEQ ID NO: 12518 - DNA, 1053 bp, synthetic construct
  misc_feature 1..1053: note = Description of Artificial Sequence: Synthetic coding sequence
  source 1..1053: mol_type = other DNA
atgggcagcaagaagctgaagagagtgggcctgagccaggagctgtgcgacagactgagcagacaccagatcctgacctgccaggacttcctgtgcctgagccccctggagctgatgaaggtgaccggcctgagctacagaggcgtgcacgagctgctgtgcatggtgagcagagcctgcgcccccaagatgcagaccgcctacggcatcaaggcccagagaagcgccgacttcagccccgccttcctgagcaccaccctgagcgccctggacgaggccctgcacggcggcgtggcctgcggcagcctgaccgagatcaccggcccccccggctgcggcaagacccagttctgcatcatgatgagcatcctggccaccctgcccaccaacatgggcggcctggagggcgccgtggtgtacatcgacaccgagagcgccttcagcgccgagagactggtggagatcgccgagagcagattccccagatacttcaacaccgaggagaagctgctgctgaccagcagcaaggtgcacctgtacagagagctgacctgcgacgaggtgctgcagagaatcgagagcctggaggaggagatcatcagcaagggcatcaagctggtgatcctggacagcgtggccagcgtggtgagaaaggagttcgacgcccagctgcagggcaacctgaaggagagaaacaagttcctggccagagaggccagcagcctgaagtacctggccgaggagttcagcatccccgtgatcctgaccaaccagatcaccacccacctgagcggcgccctggccagccaggccgacctggtgagccccgccgacgacctgagcctgagcgagggcaccagcggcagcagctgcgtgatcgccgccctgggcaacacctggagccacagcgtgaacaccagactgatcctgcagtacctggacagcgagagaagacagatcctgatcgccaagagccccctggcccccttcaccagcttcgtgtacaccatcaaggaggagggcctggtgctgcagggccaggagaagccctag

SEQ ID NO: 12519 - DNA, 402 bp, synthetic construct
  misc_feature 1..402: note = Description of Artificial Sequence: Synthetic coding sequence
  source 1..402: mol_type = other DNA
atgggcagcaagaagctgaagagagtgggcctgagccaggagctgtgcgacagactgagcagacaccagatcctgacctgccaggacttcctgtgcctgagccccctggagctgatgaaggtgaccggcctgagctacagaggcgtgcacgagctgctgtgcatggtgagcagagcctgcgcccccaagatgcagaccgcctacggcatcaaggcccagagaagcgccgacttcagccccgccttcctgagcaccaccctgagcgccctggacgaggccctgcacggcggcgtggcctgcggcagcctgaccgagatcaccggcccccccggctgcggcaagacccagttctgcatcatgatgagcatcctggccaccctgcccaccaacatgggcggctag

SEQ ID NO: 12520 - DNA, 1155 bp, synthetic construct
  misc_feature 1..1155: note = Description of Artificial Sequence: Synthetic coding sequence
  source 1..1155: mol_type = other DNA
atgggcagcaagaagctgaagagagtgggcctgagccaggagctgtgcgacagactgagcagacaccagatcctgacctgccaggacttcctgtgcctgagccccctggagctgatgaaggtgaccggcctgagctacagaggcgtgcacgagctgctgtgcatggtgagcagagcctgcgcccccaagatgcagaccgcctacggcatcaaggcccagagaagcgccgacttcagccccgccttcctgagcaccaccctgagcgccctggacgaggccctgcacggcggcgtggcctgcggcagcctgaccgagatcaccggcccccccggctgcggcaagacccagttctgcatcatgatgagcatcctggccaccctgcccaccaacatgggcggcctggagggcgccgtggtgtacatcgacaccgagagcgccttcagcgccgagagactggtggagatcgccgagagcagattccccagatacttcaacaccgaggagaagctgctgctgaccagcagcaaggtgcacctgtacagagagctgacctgcgacgaggtgctgcagagaatcgagagcctggaggaggagatcatcagcaagggcatcaagctggtgatcctggacagcgtggccagcgtggtgagaaaggagttcgacgcccagctgcagggcaacctgaaggagagaaacaagttcctggccagagaggccagcagcctgaagtacctggccgaggagttcagcatccccgtgatcctgaccaaccagatcaccacccacctgagcggcgccctggccagccaggccgacctggtgagccccgccgacgacctgagcctgagcgagggcaccagcggcagcagctgcgtgatcgccgccctgggcaacacctggagccacagcgtgaacaccagactgatcctgcagtacctggacagcgagagaagacagatcctgatcgccaagagccccctggcccccttcaccagcttcgtgtacaccatcaaggaggagggcctggtgctgcaggagaccaccttctgcagcgtgacccaggccgagctgaactgggcccccgagatcctgcccccccagccccccgagcagctgggcctgcagatgtgccaccacacccagctgatcttctag

SEQ ID NO: 12521 - DNA, 1101 bp, synthetic construct; identical to SEQ ID NO: 12516
  misc_feature 1..1101: note = Description of Artificial Sequence: Synthetic coding sequence
  source 1..1101: mol_type = other DNA

SEQ ID NO: 12522 - DNA, 228 bp, synthetic construct
  misc_feature 1..228: note = Description of Artificial Sequence: Synthetic coding sequence
  source 1..228: mol_type = other DNA
atgggcagcaagaagctgaagagagtgggcctgagccaggagctgtgcgacagactgagcagacaccagatcctgacctgccaggacttcctgtgcctgagccccctggagctgatgaaggtgaccggcctgagctacagaggcgtgcacgagctgctgtgcatggtgagcagagcctgcgcccccaagatgcagaccgcctacggcatcaaggcccagagaagctag

SEQ ID NO: 12523 - DNA, 1131 bp, synthetic construct
  misc_feature 1..1131: note = Description of Artificial Sequence: Synthetic coding sequence
  source 1..1131: mol_type = other DNA
atgagaggcaagaccttcagattcgagatgcagagagacctggtgagcttccccctgagccccgccgtgagagtgaagctggtgagcgccggcttccagaccgccgaggagctgctggaggtgaagcccagcgagctgagcaaggaggtgggcatcagcaaggccgaggccctggagaccctgcagatcatcagaagagagtgcctgaccaacaagcccagatacgccggcaccagcgagagccacaagaagtgcaccgccctggagctgctggagcaggagcacacccagggcttcatcatcaccttctgcagcgccctggacgacatcctgggcggcggcgtgcccctgatgaagaccaccgagatctgcggcgcccccggcgtgggcaagacccagctgtgcatgcagctggccgtggacgtgcagatccccgagtgcttcggcggcgtggccggcgaggccgtgttcatcgacaccgagggcagcttcatggtggacagagtggtggacctggccaccgcctgcatccagcacctgcagctgatcgccgagaagcacaagggcgaggagcacagaaaggccctggaggacttcaccctggacaacatcctgagccacatctactacttcagatgcagagactacaccgagctgctggcccaggtgtacctgctgcccgacttcctgagcgagcacagcaaggtgagactggtgatcgtggacggcatcgccttccccttcagacacgacctggacgacctgagcctgagaaccagactgctgaacggcctggcccagcagatgatcagcctggccaacaaccacagactggccgtgatcctgaccaaccagatgaccaccaagatcgacagaaaccaggccctgctggtgcccgccctgggcgagagctggggccacgccgccaccatcagactgatcttccactgggacagaaagcagagactggccaccctgtacaagagccccagccagaaggagtgcaccgtgctgttccagatcaagccccagggcttcagagacaccgtggtgaccagcgcctgcagcctgcagaccgagggcagcctgagcaccagaaagagaagcagagaccccgaggaggagctgtag

SEQ ID NO: 12524 - DNA, 987 bp, synthetic construct
  misc_feature 1..987: note = Description of Artificial Sequence: Synthetic coding sequence
  source 1..987: mol_type = other DNA
atgggcgtgctgagagtgggcctgtgccccggcctgaccgaggagatgatccagctgctgagaagccacagaatcaagaccgtggtggacctggtgagcgccgacctggaggaggtggcccagaagtgcggcctgagctacaaggccctggtggccctgagaagagtgctgctggcccagttcagcgccttccccgtgaacggcgccgacctgtacgaggagctgaagaccagcaccgccatcctgagcaccggcatcggcagaatcagactgagcggcaacgccagatggctgatgcccaaggtgaccgagatcgtgggcggccccggcagcggcaagacccaggtgtgcctgtgcatggccgccaacgtggcccacggcctgcagcagaacgtgctgtacgtggacagcaacggcggcctgaccgccagcagactgctgcagctgctgcaggccaagacccaggacgaggaggagcaggccgaggccctgagaagaatccaggtggtgcacgccttcgacatcttccagatgctggacgtgctgcaggagctgagaggcaccgtggcccagcaggtgaccggcagcagcggcaccgtgaaggtggtggtggtggacagcgtgaccgccgtggtgagccccctgctgggcggccagcagagagagggcctggccctgatgatgcagctggccagagagctgaagaccctggccagagacctgggcatggccgtggtggtgaccaaccacatcaccagagacagagacagcggcagactgaagcccgccctgggcagaagctggagcttcgtgcccagcaccagaatcctgctggacaccatcgagggcgccggcgccagcggcggcagaagaatggcctgcctggccaagagcagcagacagcccaccggcttccaggagatggtggacatcggcacctggggcaccagcgagcagagcgccaccctgcagggcgaccagacctag

SEQ ID NO: 12525 - DNA, 987 bp, synthetic construct
  misc_feature 1..987: note = Description of Artificial Sequence: Synthetic coding sequence
  source 1..987: mol_type = other DNA
atgggcgtgctgagagtgggcctgtgccccggcctgaccgaggagatgatccagctgctgagaagccacagaatcaagaccgtggtggacctggtgagcgccgacctggaggaggtggcccagaagtgcggcctgagctacaaggccctggtggccctgagaagagtgctgctggcccagttcagcgccttccccgtgaacggcgccgacctgtacgaggagctgaagaccagcaccgccatcctgagcaccggcatcggcagcctggacaagctgctggacgccggcctgtacaccggcgaggtgaccgagatcgtgggcggccccggcagcggcaagacccaggtgtgcctgtgcatggccgccaacgtggcccacggcctgcagcagaacgtgctgtacgtggacagcaacggcggcctgaccgccagcagactgctgcagctgctgcaggccaagacccaggacgaggaggagcaggccgaggccctgagaagaatccaggtggtgcacgccttcgacatcttccagatgctggacgtgctgcaggagctgagaggcaccgtggcccagcaggtgaccggcagcagcggcaccgtgaaggtggtggtggtggacagcgtgaccgccgtggtgagccccctgctgggcggccagcagagagagggcctggccctgatgatgcagctggccagagagctgaagaccctggccagagacctgggcatggccgtggtggtgaccaaccacatcaccagagacagagacagcggcagactgaagcccgccctgggcagaagctggagcttcgtgcccagcaccagaatcctgctggacaccatcgagggcgccggcgccagcggcggcagaagaatggcctgcctggccaagagcagcagacagcccaccggcttccaggagatggtggacatcggcacctggggcaccagcgagcagagcgccaccctgcagggcgaccagacctag

SEQ ID NO: 12526 - DNA, 651 bp, synthetic construct
  misc_feature 1..651: note = Description of Artificial Sequence: Synthetic coding sequence
  source 1..651: mol_type = other DNA
atgggcgtgctgagagtgggcctgtgccccggcctgaccgaggagatgatccagctgctgagaagccacagaatcaagaccgtggtggacctggtgagcgccgacctggaggaggtggcccagaagtgcggcctgagctacaaggccgaggccctgagaagaatccaggtggtgcacgccttcgacatcttccagatgctggacgtgctgcaggagctgagaggcaccgtggcccagcaggtgaccggcagcagcggcaccgtgaaggtggtggtggtggacagcgtgaccgccgtggtgagccccctgctgggcggccagcagagagagggcctggccctgatgatgcagctggccagagagctgaagaccctggccagagacctgggcatggccgtggtggtgaccaaccacatcaccagagacagagacagcggcagactgaagcccgccctgggcagaagctggagcttcgtgcccagcaccagaatcctgctggacaccatcgagggcgccggcgccagcggcggcagaagaatggcctgcctggccaagagcagcagacagcccaccggcttccaggagatggtggacatcggcacctggggcaccagcgagcagagcgccaccctgcagggcgaccagacctag

SEQ ID NO: 12527 - DNA, 357 bp, synthetic construct
  misc_feature 1..357: note = Description of Artificial Sequence: Synthetic coding sequence
  source 1..357: mol_type = other DNA
atgggcgtgctgagagtgggcctgtgccccggcctgaccgaggagatgatccagctgctgagaagccacagaatcaagaccgtggtggacctggtgagcgccgacctggaggaggtggcccagaagtgcggcctgagctacaaggccctggtggccctgagaagagtgctgctggcccagttcagcgccttccccgtgaacggcgccgacctgtacgaggagctgaagaccagcaccgccatcctgagcaccggcatcggcagacacggcggcagaacccaggtgggcacctgggaggactgcagctgcctgagaagcccccagggcgacagaggcgtgggcagcggcatgctgtag

SEQ ID NO: 12528 - DNA, 852 bp, synthetic construct
  misc_feature 1..852: note = Description of Artificial Sequence: Synthetic coding sequence
  source 1..852: mol_type = other DNA
atgggcgtgctgagagtgggcctgtgccccggcctgaccgaggagatgatccagctgctgagaagccacagaatcaagaccgtggtggacctggtgagcgccgacctggaggaggtggcccagaagtgcggcctgagctacaaggccctggtggccctgagaagagtgctgctggcccagttcagcgccttccccgtgaacggcgccgacctgtacgaggagctgaagaccagcaccgccatcctgagcaccggcatcggcagcctggacaagctgctggacgccggcctgtacaccggcgaggtgaccgagatcgtgggcggccccggcagcggcaagacccaggccgaggccctgagaagaatccaggtggtgcacgccttcgacatcttccagatgctggacgtgctgcaggagctgagaggcaccgtggcccagcaggtgaccggcagcagcggcaccgtgaaggtggtggtggtggacagcgtgaccgccgtggtgagccccctgctgggcggccagcagagagagggcctggccctgatgatgcagctggccagagagctgaagaccctggccagagacctgggcatggccgtggtggtgaccaaccacatcaccagagacagagacagcggcagactgaagcccgccctgggcagaagctggagcttcgtgcccagcaccagaatcctgctggacaccatcgagggcgccggcgccagcggcggcagaagaatggcctgcctggccaagagcagcagacagcccaccggcttccaggagatggtggacatcggcacctggggcaccagcgagcagagcgccaccctgcagggcgaccagacctag

SEQ ID NO: 12529 - DNA, 1047 bp, synthetic construct
  misc_feature 1..1047: note = Description of Artificial Sequence: Synthetic coding sequence
  source 1..1047: mol_type = other DNA
atgggcgtgctgagagtgggcctgtgccccggcctgaccgaggagatgatccagctgctgagaagccacagaatcaagaccgtggtggacctggtgagcgccgacctggaggaggtggcccagaagtgcggcctgagctacaagacctggagagcccacagcagcggcaacctgggcggcctgcagctgccccaggtgcccgccggcagaagctggagcggcgtgagaaacgccctgaagaaggccggcctgggccacggcggcaccgacggcctgagcctgaacgccttcgacgagagaggcaccgccgtgagcaccagcagactggacaagctgctggacgccggcctgtacaccggcgaggtgaccgagatcgtgggcggccccggcagcggcaagacccaggtgtgcctgtgcatggccgccaacgtggcccacggcctgcagcagaacgtgctgtacgtggacagcaacggcggcctgaccgccagcagactgctgcagctgctgcaggccaagacccaggacgaggaggagcaggccgaggccctgagaagaatccaggtggtgcacgccttcgacatcttccagatgctggacgtgctgcaggagctgagaggcaccgtggcccagcaggtgaccggcagcagcggcaccgtgaaggtggtggtggtggacagcgtgaccgccgtggtgagccccctgctgggcggccagcagagagagggcctggccctgatgatgcagctggccagagagctgaagaccctggccagagacctgggcatggccgtggtggtgaccaaccacatcaccagagacagagacagcggcagactgaagcccgccctgggcagaagctggagcttcgtgcccagcaccagaatcctgctggacaccatcgagggcgccggcgccagcggcggcagaagaatggcctgcctggccaagagcagcagacagcccaccggcttccaggagatggtggacatcggcacctggggcaccagcgagcagagcgccaccctgcagggcgaccagacctag

SEQ ID NO: 12530 - DNA, 648 bp, synthetic construct
  misc_feature 1..648: note = Description of Artificial Sequence: Synthetic coding sequence
  source 1..648: mol_type = other DNA
atggtgatggccgccctgcccttcagcgaggacctgaagatgcccgacacctgcgtgctgccccactgccccggcaaggagaacaaggacgtggtggacctggtgagcgccgacctggaggaggtggcccagaagtgcggcctgagctacaaggccctggtggccctgagaagagtgctgctggcccagttcagcgccttccccgtgaacggcgccgacctgtacgaggagctgaagaccagcaccgccatcctgagcaccggcatcggcagcctggacaagctgctggacgccggcctgtacaccggcgaggtgaccgagatcgtgggcggccccggcagcggcaagacccaggtgtgcctgtgcatggccgccaacgtggcccacggcctgcagcagaacgtgctgtacgtggacagcaacggcggcctgaccgccagcagactgctgcagctgctgcaggccaagacccaggacgaggaggagcaggccgaggccctgagaagaatccaggtggtgcacgccttcgacatcttccagatgctggacgtgctgcaggagctgagaggcaccgtggcccagcaggacggcatccccgagcacctgaaccacatcccccactgcctgcacgtgcacctgccctgctag

SEQ ID NO: 12531 - DNA, 711 bp, synthetic construct
  misc_feature 1..711: note = Description of Artificial Sequence: Synthetic coding sequence
  source 1..711: mol_type = other DNA
atgggcgtgctgagagtgggcctgtgccccggcctgaccgaggagatgatccagctgctgagaagccacagaatcaagaccgtggtggacctggtgagcgccgacctggaggaggtggcccagaagtgcggcctgagctacaaggccctggtggccctgagaagagtgctgctggcccagttcagcgccttccccgtgaacggcgccgacctgtacgaggagctgaagaccagcaccgccatcctgagcaccggcatcggcagcctggacaagctgctggacgccggcctgtacaccggcgaggtgaccgagatcgtgggcggccccggcagcggcaagacccaggtgtgcctgtgcatggccgccaacgtggcccacggcctgcagcagaacgtgctgtacgtggacagcaacggcggcctgaccgccagcagactgctgcagctgctgcaggccaagacccaggacgaggaggagcaggccgaggccctgagaagaatccaggtggtgcacgccttcgacatcttccagatgctggacgtgctgcaggagctgagaggcaccgtggcccagcaggtgaccggcagcagcggcaccgtgaaggtggtggtggtggacagcgtgaccgccgtggtgagccccctgctgggcggccagcagagagagggcctggccctgatgatgcagctggccagagagctgaagacctag

SEQ ID NO: 12532 - DNA, 1047 bp, synthetic construct; identical to SEQ ID NO: 12529
  misc_feature 1..1047: note = Description of Artificial Sequence: Synthetic coding sequence
  source 1..1047: mol_type = other DNA

SEQ ID NO: 12533 - DNA, 1257 bp, synthetic construct
  misc_feature 1..1257: note = Description of Artificial Sequence: Synthetic coding sequence
  source 1..1257: mol_type = other DNA
atgagcggcaccgaggaggccatcctgggcggcagagacagccaccccgccgccggcggcggcagcgtgctgtgcttcggccagtgccagtacaccgccgaggagtaccaggccatccagaaggccctgagacagagactgggccccgagtacatcagcagcagaatggccggcggcggccagaaggtgtgctacatcgagggccacagagtgatcaacctggccaacgagatgttcggctacaacggctgggcccacagcatcacccagcagaacgtggacttcgtggacctgaacaacggcaagttctacgtgggcgtgtgcgccttcgtgagagtgcagctgaaggacggcagctaccacgaggacgtgggctacggcgtgagcgagggcctgaagagcaaggccctgagcctggagaaggccagaaaggaggccgtgaccgacggcctgaagagagccctgagaagcttcggcaacgccctgggcaactgcatcctggacaaggactacctgagaagcctgaacaagctgcccagacagctgcccctggaggtggacctgaccaaggccaagagacaggacctggagcccagcgtggaggaggccagatacaacagctgcagacccaacatggccctgggccacccccagctgcagcaggtgaccagccccagcagacccagccacgccgtgatccccgccgaccaggactgcagcagcagaagcctgagcagcagcgccgtggagagcgaggccacccaccagagaaagctgagacagaagcagctgcagcagcagttcagagagagaatggagaagcagcaggtgagagtgagcacccccagcgccgagaagagcgaggccgccccccccgccccccccgtgacccacagcacccccgtgaccgtgagcgagcccctgctggagaaggacttcctggccggcgtgacccaggagctgatcaagaccctggaggacaacagcgagaagtgggccgtgacccccgacgccggcgacggcgtggtgaagcccagcagcagagccgaccccgcccagaccagcgacaccctggccctgaacaaccagatggtgacccagaacagaaccccccacagcgtgtgccaccagaagccccaggccaagagcggcagctgggacctgcagacctacagcgccgaccagagaaccaccggcaactgggagagccacagaaagagccaggacatgaagaagagaaagtacgaccccagctag

SEQ ID NO: 12534 - DNA, 1257 bp, synthetic construct; identical to SEQ ID NO: 12533
  misc_feature 1..1257: note = Description of Artificial Sequence: Synthetic coding sequence
  source 1..1257: mol_type = other DNA

SEQ ID NO: 12535 - DNA, 1026 bp, synthetic construct
  misc_feature 1..1026: note = Description of Artificial Sequence: Synthetic coding sequence
  source 1..1026: mol_type = other DNA
atgttcggctacaacggctgggcccacagcatcacccagcagaacgtggacttcgtggacctgaacaacggcaagttctacgtgggcgtgtgcgccttcgtgagagtgcagctgaaggacggcagctaccacgaggacgtgggctacggcgtgagcgagggcctgaagagcaaggccctgagcctggagaaggccagaaaggaggccgtgaccgacggcctgaagagagccctgagaagcttcggcaacgccctgggcaactgcatcctggacaaggactacctgagaagcctgaacaagctgcccagacagctgcccctggaggtggacctgaccaaggccaagagacaggacctggagcccagcgtggaggaggccagatacaacagctgcagacccaacatggccctgggccacccccagctgcagcaggtgaccagccccagcagacccagccacgccgtgatccccgccgaccaggactgcagcagcagaagcctgagcagcagcgccgtggagagcgaggccacccaccagagaaagctgagacagaagcagctgcagcagcagttcagagagagaatggagaagcagcaggtgagagtgagcacccccagcgccgagaagagcgaggccgccccccccgccccccccgtgacccacagcacccccgtgaccgtgagcgagcccctgctggagaaggacttcctggccggcgtgacccaggagctgatcaagaccctggaggacaacagcgagaagtgggccgtgacccccgacgccggcgacggcgtggtgaagcccagcagcagagccgaccccgcccagaccagcgacaccctggccctgaacaaccagatggtgacccagaacagaaccccccacagcgtgtgccaccagaagccccaggccaagagcggcagctgggacctgcagacctacagcgccgaccagagaaccaccggcaactgggagagccacagaaagagccaggacatgaagaagagaaagtacgaccccagctag

SEQ ID NO: 12536 - DNA, 681 bp, synthetic construct
  misc_feature 1..681: note = Description of Artificial Sequence: Synthetic coding sequence
  source 1..681: mol_type = other DNA
atgagcggcaccgaggaggccatcctgggcggcagagacagccaccccgccgccggcggcggcagcgtgctgtgcttcggccagtgccagtacaccgccgaggagtaccaggccatccagaaggccctgagacagagactgggccccgagtacatcagcagcagaatggccggcggcggccagaaggtgtgctacatcgagggccacagagtgatcaacctggccaacgagatgttcggctacaacggctgggcccacagcatcacccagcagaacgtggacttcgtggacctgaacaacggcaagttctacgtgggcgtgtgcgccttcgtgagagtgcagctgaaggacggcagctaccacgaggacgtgggctacggcgtgagcgagggcctgaagagcaaggccctgagcctggagaaggccagaaaggaggccgtgaccgacggcctgaagagagccctgagactgcccctgctgggcgtgagcggcagaatcctgtacagcctgttcagcgtgcacagcgtgatgtgcgccggcggcctgcccacccccaccgccagcgcccagaccgcccccagcagcccctgcagcagcgccgtgctgagatacgcccaggagttctgggagtgcacctggaagctgtacagcggccagagactgcccgagatcaccaagtag

SEQ ID NO: 12537 - DNA, 2244 bp, synthetic construct
  misc_feature 1..2244: note = Description of Artificial Sequence: Synthetic coding sequence
  source 1..2244: mol_type = other DNA
atgagaagaagcctggcccccagccagctggccaagagaaagcccgagggcagaagctgcgacgacgaggactggcagcccggcctggtgacccccagaaagagaaagagcagcagcgagacccagatccaggagtgcttcctgagccccttcagaaagcccctgagccagctgaccaaccagcccccctgcctggacagcagccagcacgaggccttcatcagaagcatcctgagcaagcccttcaaggtgcccatccccaactaccagggccccctgggcagcagagccctgggcctgaagagagccggcgtgagaagagccctgcacgaccccctggagaaggacgccctggtgctgtacgagcccccccccctgagcgcccacgaccagctgaagctggacaaggagaagctgcccgtgcacgtggtggtggaccccatcctgagcaaggtgctgagaccccaccagagagagggcgtgaagttcctgtgggagtgcgtgaccagcagaagaatccccggcagccacggctgcatcatggccgacgagatgggcctgggcaagaccctgcagtgcatcaccctgatgtggaccctgctgagacagagccccgagtgcaagcccgagatcgacaaggccgtggtggtgagccccagcagcctggtgaagaactggtacaacgaggtgggcaagtggctgggcggcagaatccagcccctggccatcgacggcggcagcaaggacgagatcgaccagaagctggagggcttcatgaaccagagaggcgccagagtgagcagccccatcctgatcatcagctacgagaccttcagactgcacgtgggcgtgctgcagaagggcagcgtgggcctggtgatctgcgacgagggccacagactgaagaacagcgagaaccagacctaccaggccctggacagcctgaacaccagcagaagagtgctgatcagcggcacccccatccagaacgacctgctggagtacttcagcctggtgcacttcgtgaacagcggcatcctgggcaccgcccacgagttcaagaagcacttcgagctgcccatcctgaagggcagagacgccgccgccagcgaggccgacagacagctgggcgaggagagactgagagagctgaccagcatcgtgaacagatgcctgatcagaagaaccagcgacatcctgagcaagtacctgcccgtgaagatcgagcaggtggtgtgctgcagactgacccccctgcagaccgagctgtacaagagattcctgagacaggccaagcccgccgaggagctgctggagggcaagatgagcgtgagcagcctgagcagcatcaccagcctgaagaagctgtgcaaccaccccgccctgatctacgacaagtgcgtggaggaggaggacggcttcgtgggcgccctggacctgttcccccccggctacagcagcaaggccctggagccccagctgagcggcaagatgctggtgctggactacatcctggccgtgaccagaagcagaagcagcgacaaggtggtgctggtgagcaactacacccagaccctggacctgttcgagaagctgtgcagagccagaagatacctgtacgtgagactggacggcaccatgagcatcaagaagagagccaaggtggtggagagattcaacagccccagcagccccgacttcgtgttcatgctgagcagcaaggccggcggctgcggcctgaacctgatcggcgccaacagactggtgatgttcgaccccgactggaaccccgccaacgacgagcaggccatggccagagtgtggagagacggccagaagaagacctgctacatctacagactgctgagcgccggcaccatcgaggagaagatcttccagagacagagccacaagaaggccctgagcagctgcgtggtggacgaggagcaggacgtggagagacacttcagcctgggcgagctgaaggagctgttcatcctggacgaggccagcctgagcgacacccacgacagactgcactgcagaagatgcgtgaacagcagacagatcagacccccccccgacggcagcgactgcaccagcgacctggccggctggaaccactgcaccgacaagtggggcctgagagacgaggtgctgcaggccgcctgggacgccgccagcaccgccatcaccttcgtgttccaccagagaagccacgaggagcagagaggcctgagatag

SEQ ID NO: 12538 - DNA, 2244 bp, synthetic construct; identical to SEQ ID NO: 12537
  misc_feature 1..2244: note = Description of Artificial Sequence: Synthetic coding sequence
  source 1..2244: mol_type = other DNA

SEQ ID NO: 12539 - DNA, 1704 bp, synthetic construct
  misc_feature 1..1704: note = Description of Artificial Sequence: Synthetic coding sequence
  source 1..1704: mol_type = other DNA
atggccgacgagatgggcctgggcaagaccctgcagtgcatcaccctgatgtggaccctgctgagacagagccccgagtgcaagcccgagatcgacaaggccgtggtggtgagccccagcagcctggtgaagaactggtacaacgaggtgggcaagtggctgggcggcagaatccagcccctggccatcgacggcggcagcaaggacgagatcgaccagaagctggagggcttcatgaaccagagaggcgccagagtgagcagccccatcctgatcatcagctacgagaccttcagactgcacgtgggcgtgctgcagaagggcagcgtgggcctggtgatctgcgacgagggccacagactgaagaacagcgagaaccagacctaccaggccctggacagcctgaacaccagcagaagagtgctgatcagcggcacccccatccagaacgacctgctggagtacttcagcctggtgcacttcgtgaacagcggcatcctgggcaccgcccacgagttcaagaagcacttcgagctgcccatcctgaagggcagagacgccgccgccagcgaggccgacagacagctgggcgaggagagactgagagagctgaccagcatcgtgaacagatgcctgatcagaagaaccagcgacatcctgagcaagtacctgcccgtgaagatcgagcaggtggtgtgctgcagactgacccccctgcagaccgagctgtacaagagattcctgagacaggccaagcccgccgaggagctgctggagggcaagatgagcgtgagcagcctgagcagcatcaccagcctgaagaagctgtgcaaccaccccgccctgatctacgacaagtgcgtggaggaggaggacggcttcgtgggcgccctggacctgttcccccccggctacagcagcaaggccctggagccccagctgagcggcaagatgctggtgctggactacatcctggccgtgaccagaagcagaagcagcgacaaggtggtgctggtgagcaactacacccagaccctggacctgttcgagaagctgtgcagagccagaagatacctgtacgtgagactggacggcaccatgagcatcaagaagagagccaaggtggtggagagattcaacagccccagcagccccgacttcgtgttcatgctgagcagcaaggccggcggctgcggcctgaacctgatcggcgccaacagactggtgatgttcgaccccgactggaaccccgccaacgacgagcaggccatggccagagtgtggagagacggccagaagaagacctgctacatctacagactgctgagcgccggcaccatcgaggagaagatcttccagagacagagccacaagaaggccctgagcagctgcgtggtggacgaggagcaggacgtggagagacacttcagcctgggcgagctgaaggagctgttcatcctggacgaggccagcctgagcgacacccacgacagactgcactgcagaagatgcgtgaacagcagacagatcagacccccccccgacggcagcgactgcaccagcgacctggccggctggaaccactgcaccgacaagtggggcctgagagacgaggtgctgcaggccgcctgggacgccgccagcaccgccatcaccttcgtgttccaccagagaagccacgaggagcagagaggcctgagatag

SEQ ID NO: 12540 - DNA, 1176 bp, synthetic construct
  misc_feature 1..1176: note = Description of Artificial Sequence: Synthetic coding sequence
  source 1..1176: mol_type = other DNA
atgaagtgcctggtgaccggcggcaacgtgaaggtgctgggcaaggccgtgcacagcctgagcagaatcggcgacgagctgtacctggagcccctggaggacggcctgagcctgagaaccgtgaacagcagcagaagcgcctacgcctgcttcctgttcgcccccctgttcttccagcagtaccaggccgccacccccggccaggacctgctgagatgcaagatcctgatgaagagcttcctgagcgtgttcagaagcctggccatgctggagaagaccgtggagaagtgctgcatcagcctgaacggcagaagcagcagactggtggtgcagctgcactgcaagttcggcgtgagaaagacccacaacctgagcttccaggactgcgagagcctgcaggccgtgttcgaccccgccagctgcccccacatgctgagagcccccgccagagtgctgggcgaggccgtgctgcccttcagccccgccctggccgaggtgaccctgggcatcggcagaggcagaagagtgatcctgagaagctaccacgaggaggaggccgacagcaccgccaaggccatggtgaccgagatgtgcctgggcgaggaggacttccagcagctgcaggcccaggagggcgtggccatcaccttctgcctgaaggagttcagaggcctgctgagcttcgccgagagcgccaacctgaacctgagcatccacttcgacgcccccggcagacccgccatcttcaccatcaaggacagcctgctggacggccacttcgtgctggccaccctgagcgacaccgacagccacagccaggacctgggcagccccgagagacaccagcccgtgccccagctgcaggcccacagcaccccccaccccgacgacttcgccaacgacgacatcgacagctacatgatcgccatggagaccaccatcggcaacgagggcagcagagtgctgcccagcatcagcctgagccccggcccccagccccccaagagccccggcccccacagcgaggaggaggacgaggccgagcccagcaccgtgcccggcacccccccccccaagaagttcagaagcctgttcttcggcagcatcctggcccccgtgagaagcccccagggccccagccccgtgctggccgaggacagcgagggcgagggctag

SEQ ID NO: 12541 - DNA, 1752 bp, synthetic construct
  misc_feature 1..1752: note = Description of Artificial Sequence: Synthetic coding sequence
  source 1..1752: mol_type = other DNA
atgcccaagcccatcaacgtgagagtgaccaccatggacgccgagctggagttcgccatccagcccaacaccaccggcaagcagctgttcgaccaggtggtgaagaccgtgggcctgagagaggtgtggttcttcggcctgcagtacgtggacagcaagggctacagcacctggctgaagctgaacaagaaggtgacccagcaggacgtgaagaaggagaaccccctgcagttcaagttcagagccaagttcttccccgaggacgtgagcgaggagctgatccaggagatcacccagagactgttcttcctgcaggtgaaggaggccatcctgaacgacgagatctactgcccccccgagaccgccgtgctgctggccagctacgccgtgcaggccaagtacggcgactacaacaaggagatccacaagcccggctacctggccaacgacagactgctgccccagagagtgctggagcagcacaagctgaccaaggagcagtgggaggagagaatccagaactggcacgaggagcacagaggcatgctgagagaggacagcatgatggagtacctgaagatcgcccaggacctggagatgtacggcgtgaactacttcgagatcaagaacaagaagggcaccgagctgtggctgggcgtggacgccctgggcctgaacatctacgagcacgacgacaagctgacccccaagatcggcttcccctggagcgagatcagaaacatcagcttcaacgacaagaagttcgtgatcaagcccatcgacaagaaggcccccgacttcgtgttctacgcccccagactgagaatcaacaagagaatcctggccctgtgcatgggcaaccacgagctgtacatgagaagaagaaagcccgacaccatcgaggtgcagcagatgaaggcccaggccagagaggagaagcaccagaagcagctggagagagcccagctggagaacgagaagaagaagagagagatcgccgagaaggagaaggagagaatcgagagagagaaggaggagctgatggagagactgaagcagatcgaggagcagaccatcaaggcccagaaggagctggaggagcagaccagaaaggccctggagctggaccaggagagaaagagagccaaggaggaggccgagagactggagaaggagagaagagccgccgaggaggccaagagcgccatcgccaagcaggccgccgaccagatgaagaaccaggagcagctggccgccgagctggccgagttcaccgccaagatcgccctgctggaggaggccaagaagaagaaggaggaggaggccaccgagtggcagcacaaggccttcgccgcccaggaggacctggagaagaccaaggaggagctgaagaccgtgatgagcgccccccccccccccccccccccccccgtgatcccccccaccgagaacgagcacgacgagcacgacgagaacaacgccgaggccagcgccgagctgagcaacgagggcgtgatgaaccacagaagcgaggaggagagagtgaccgagacccagaagaacgagagagtgaagaagcagctgcaggccctgagcagcgagctggcccaggccagagacgagaccaagaagacccagaacgacgtgctgcacgccgagaacgtgaaggccggcagagacaagtacaagaccctgagacagatcagacagggcaacaccaagcagagaatcgacgagttcgaggccatgtag

SEQ ID NO: 12542 - DNA, 1815 bp, synthetic construct
  misc_feature 1..1815: note = Description of Artificial Sequence: Synthetic coding sequence
  source 1..1815: mol_type = other DNA
atgcccaagcccatcaacgtgagagtgaccaccatggacgccgagctggagttcgccatccagcccaacaccaccggcaagcagctgttcgaccaggtggtgaagaccgtgggcctgagagaggtgtggttcttcggcctgcagtacgtggacagcaagggctacagcacctggctgaagctgaacaagaaggtgacccagcaggacgtgaagaaggagaaccccctgcagttcaagttcagagccaagttcttccccgaggacgtgagcgaggagctgatccaggagatcacccagagactgttcttcctgcaggtgaaggaggccatcctgaacgacgagatctactgcccccccgagaccgccgtgctgctggccagctacgccgtgcaggccaagtacggcgactacaacaaggagatccacaagcccggctacctggccaacgacagactgctgccccagagagtgctggagcagcacaagctgaccaaggagcagtgggaggagagaatccagaactggcacgaggagcacagaggcatgctgagagaggacagcatgatggagtacctgaagatcgcccaggacctggagatgtacggcgtgaactacttcgagatcaagaacaagaagggcaccgagctgtggctgggcgtggacgccctgggcctgaacatctacgagcacgacgacaagctgacccccaagatcggcttcccctggagcgagatcagaaacatcagcttcaacgacaagaagttcgtgatcaagcccatcgacaagaaggcccccgacttcgtgttctacgcccccagactgagaatcaacaagagaatcctggccctgtgcatgggcaaccacgagctgtacatgagaagaagaaagcccgacaccatcgaggtgcagcagatgaaggcccaggccagagaggagaagcaccagaagcagctggagagagcccagctggagaacgagaagaagaagagagagatcgccgagaaggagaaggagagaatcgagagagagaaggaggagctgatggagagactgaagcagatcgaggagcagaccatcaaggcccagaaggagctggaggagcagaccagaaaggccctggagctggaccaggagagaaagagagccaaggaggaggccgagagactggagaaggagagaagagccgccgaggaggccaagagcgccatcgccaagcaggccgccgaccagatgaagaaccaggagcagctggccgccgagctggccgagttcaccgccaagatcgccctgctggaggaggccaagaagaagaaggaggaggaggccaccgagtggcagcacaaggccttcgccgcccaggaggacctggagaagaccaaggaggagctgaagaccgtgatgagcgccccccccccccccccccccccccccgtgatcccccccaccgagaacgagcacgacgagcacgacgagaacaacgccgaggccagcgccgagctgagcaacgagggcgtgatgaaccacagaagcgaggaggagagagtgaccgagacccagaagaacgagagagtgaagaagcagctgcaggccctgagcagcgagctggcccaggccagagacgagaccaagaagacccagaacgacgtgctgcacgccgagaacgtgaaggccggcagagacaagtacaagaccctgagacagatcagacagggcaacaccaagcagagaatcgacgagttcgaggccatgtggggccccaagctgtacgccctgttccagatgagaagctgccagagcagcatcaagcagatgtag

SEQ ID NO: 12543 - DNA, 1020 bp, synthetic construct
  misc_feature 1..1020: note = Description of Artificial Sequence: Synthetic coding sequence
  source 1..1020: mol_type = other DNA
ccccaccccaagatcaacgtgagagtgaccaccatggacgccgagctggagttcgccatccagcccaacaccaccggcaagcagctgttcgaccaggtggtgaagaccgtgggcctgagagaggtgtggttcttcggcctgcagtacgtggacagcaagggctacagcacctggctgaagctgaacaagaaggtgacccagcaggacgtgaagaaggagaaccccctgcagttcaagttcagagccaagttcttccccgaggacgtgagcgaggagctgatccaggagatcacccagagactgttcttcctgcaggtgaaggaggccatcctgaacgacgagatctactgcccccccgagaccgccgtgctgctggccagctacgccgtgcaggccaagtacggcgactacaacaaggagatccacaagcccggctacctggccaacgacagactgctgccccagagagtgctggagcagcacaagctgaccaaggagcagtgggaggagagaatccagaactggcacgaggagcacagaggcatgctgagagaggacagcatgatggagtacctgaagatcgcccaggacctggagatgtacggcgtgaactacttcgagatcaagaacaagaagggcaccgagctgtggctgggcgtggacgccctgggcctgaacatctacgagcacgacgacaagctgacccccaagatcggcttcccctggagcgagatcagaaacatcagcttcaacgacaagaagttcgtgatcaagcccatcgacaagaaggcccccgacttcgtgttctacgcccccagactgagaatcaacaagagaatcctggccctgtgcatgggcaaccacgagctgtacatgagaagaagaaagcccgacaccatcgaggtgcagcagatgaaggcccaggccagagaggagaagcaccagaagcagctggagagaagcagactgagcaagatcaagaagaagaagagaaagaagaagaagaagaagaagaagtag

SEQ ID NO: 12544 - DNA, 1815 bp, synthetic construct; identical to SEQ ID NO: 12542
  misc_feature 1..1815: note = Description of Artificial Sequence: Synthetic coding sequence
  source 1..1815: mol_type = other DNA

SEQ ID NO: 12545 - DNA, 774 bp, synthetic construct
  misc_feature 1..774: note = Description of Artificial Sequence: Synthetic coding sequence
  source 1..774: mol_type = other DNA
atggagagactgaagcagatcgaggagcagaccatcaaggcccagaaggagctggaggagcagaccagaaaggccctggagctggaccaggagagaaagagagccaaggaggaggccgagagactggagaaggagagaagagccgccgaggaggccaagagcgccatcgccaagcaggccgccgaccagatgaagaaccaggagcagctggccgccgagctggccgagttcaccgccaagatcgccctgctggaggaggccaagaagaagaaggaggaggaggccaccgagtggcagcacaaggccttcgccgcccaggaggacctggagaagaccaaggaggagctgaagaccgtgatgagcgccccccccccccccccccccccccccgtgatcccccccaccgagaacgagcacgacgagcacgacgagaacaacgccgaggccagcgccgagctgagcaacgagggcgtgatgaaccacagaagcgaggaggagagagtgaccgagacccagaagaacgagagagtgaagaagcagctgcaggccctgagcagcgagctggcccaggccagagacgagaccaagaagacccagaacgacgtgctgcacgccgagaacgtgaaggccggcagagacaagtacaagaccctgagacagatcagacagggcaacaccaagcagagaatcgacgagttcgaggccatgtggggccccaagctgtacgccctgttccagatgagaagctgccagagcagcatcaagcagatgtag

SEQ ID NO: 12546 - DNA, 762 bp, synthetic construct
  misc_feature 1..762: note = Description of Artificial Sequence: Synthetic coding sequence
  source 1..762: mol_type = other DNA
ggcggcagaatcgccagagcccacgagttcgaggccgccgtgagcttctgcaccagcgcctgggccaccgagagagaccccgtgagcagaaagcagagagagctggaggagcagaccagaaaggccctggagctggaccaggagagaaagagagccaaggaggaggccgagagactggagaaggagagaagagccgccgaggaggccaagagcgccatcgccaagcaggccgccgaccagatgaagaaccaggagcagctggccgccgagctggccgagttcaccgccaagatcgccctgctggaggaggccaagaagaagaaggaggaggaggccaccgagtggcagcacaaggccttcgccgcccaggaggacctggagaagaccaaggaggagctgaagaccgtgatgagcgccccccccccccccccccccccccccgtgatcccccccaccgagaacgagcacgacgagcacgacgagaacaacgccgaggccagcgccgagctgagcaacgagggcgtgatgaaccacagaagcgaggaggagagagtgaccgagacccagaagaacgagagagtgaagaagcagctgcaggccctgagcagcgagctggcccaggccagagacgagaccaagaagacccagaacgacgtgctgcacgccgagaacgtgaaggccggcagagacaagtacaagaccctgagacagatcagacagggcaacaccaagcagagaatcgacgagttcgaggccatgtag

SEQ ID NO: 12547 - DNA, 603 bp, synthetic construct
  misc_feature 1..603: note = Description of Artificial Sequence: Synthetic coding sequence
  source 1..603: mol_type = other DNA
atgcccaagcccatcaacgtgagagtgaccaccatggacgccgagctggagttcgccatccagcccaacaccaccggcaagcagctgttcgaccaggtgacccagcaggacgtgaagaaggagaaccccctgcagttcaagttcagagccaagttcttccccgaggacgtgagcgaggagctgatccaggagatcacccagagactgttcttcctgcaggtgaaggaggccatcctgaacgacgagatctactgcccccccgagaccgccgtgctgctggccagctacgccgtgcaggccaagtacggcgactacaacaaggagatccacaagcccggctacctggccaacgacagactgctgccccagagagtgctggagcagcacaagctgaccaaggagcaggacgagaccaagaagacccagaacgacgtgctgcacgccgagaacgtgaaggccggcagagacaagtacaagaccctgagacagatcagacagggcaacaccaagcagagaatcgacgagttcgaggccatgtggggccccaagctgtacgccctgttccagatgagaagctgccagagcagcatcaagcagatgtag

SEQ ID NO: 12548 - DNA, 1815 bp, synthetic construct; identical to SEQ ID NO: 12542
  misc_feature 1..1815: note = Description of Artificial Sequence: Synthetic coding sequence
  source 1..1815: mol_type = other DNA

SEQ ID NO: 12549 - DNA, 1344 bp, synthetic construct
  misc_feature 1..1344: note = Description of Artificial Sequence: Synthetic coding sequence
  source 1..1344: mol_type = other DNA
atgctgagctggaacctgcccttcagccccatccagctggccaacaacttcctgaccagcgtgctggagcagcacaagctgaccaaggagcagtgggaggagagaatccagaactggcacgaggagcacagaggcatgctgagagaggacagcatgatggagtacctgaagatcgcccaggacctggagatgtacggcgtgaactacttcgagatcaagaacaagaagggcaccgagctgtggctgggcgtggacgccctgggcctgaacatctacgagcacgacgacaagctgacccccaagatcggcttcccctggagcgagatcagaaacatcagcttcaacgacaagaagttcgtgatcaagcccatcgacaagaaggcccccgacttcgtgttctacgcccccagactgagaatcaacaagagaatcctggccctgtgcatgggcaaccacgagctgtacatgagaagaagaaagcccgacaccatcgaggtgcagcagatgaaggcccaggccagagaggagaagcaccagaagcagctggagagagcccagctggagaacgagaagaagaagagagagatcgccgagaaggagaaggagagaatcgagagagagaaggaggagctgatggagagactgaagcagatcgaggagcagaccatcaaggcccagaaggagctggaggagcagaccagaaaggccctggagctggaccaggagagaaagagagccaaggaggaggccgagagactggagaaggagagaagagccgccgaggaggccaagagcgccatcgccaagcaggccgccgaccagatgaagaaccaggagcagctggccgccgagctggccgagttcaccgccaagatcgccctgctggaggaggccaagaagaagaaggaggaggaggccaccgagtggcagcacaaggccttcgccgcccaggaggacctggagaagaccaaggaggagctgaagaccgtgatgagcgccccccccccccccccccccccccccgtgatcccccccaccgagaacgagcacgacgagcacgacgagaacaacgccgaggccagcgccgagctgagcaacgagggcgtgatgaaccacagaagcgaggaggagagagtgaccgagacccagaagaacgagagagtgaagaagcagctgcaggccctgagcagcgagctggcccaggccagagacgagaccaagaagacccagaacgacgtgctgcacgccgagaacgtgaaggccggcagagacaagtacaagaccctgagacagatcagacagggcaacaccaagcagagaatcgacgagttcgaggccatgtag

SEQ ID NO: 12550 - DNA, 3234 bp, synthetic construct
  misc_feature 1..3234: note = Description of Artificial Sequence: Synthetic coding sequence
  source 1..3234: mol_type = other DNA
atggacaccgacagccagagaagccacctgagcagcttcaccatgaagctgatggacaagttccacagccccaagatcaagagaacccccagcaagaagggcaagcccgccgaggtgagcgtgaagatccccgagaagcccgtgaacaaggaggccaccgacagattcctgcccgagggctaccccctgcccctggacctggagcagcaggccgtggagttcatgagcaccagcgccgtggccagcagaagccagagacagaagaacctgagctggctggaggagaaggagaaggaggtggtgagcgccctgagatacttcaagaccatcgtggacaagatggccatcgacaagaaggtgctggagatgctgcccggcagcgccagcaaggtgctggaggccatcctgcccctggtgcagaacgaccccagaatccagcacagcagcgccctgagcagctgctacagcagagtgtaccagagcctggccaacctgatcagatggagcgaccaggtgatgctggagggcgtgaacagcgaggacaaggagatggtgaccaccgtgaagggcgtgatcaaggccgtgctggacggcgtgaaggagctggtgagactgaccatcgagaagcagggcagacccagccccaccagccccgtgaagcccagcagccccgccagcaagcccgacggccccgccgagctgcccctgaccgacagagaggtggagatcctgaacaagaccaccggcatgagccagagcaccgagctgctgcccgacgccaccgacgaggaggtggccccccccaagccccccctgcccggcatcagagtggtggacaacagccccccccccgccctgccccccaagaagagacagagcgcccccagccccaccagagtggccgtggtggcccccatgagcagagccaccagcggcagcagcctgcccgtgggcatcaacagacaggacttcgacgtggactgctacgcccagagaagactgagcggcggcagccacagctacggcggcgagagccccagactgagcccctgcagcagcatcggcaagctgagcaagagcgacgagcagctgagcagcctggacagagacagcggccagtgcagcagaaacaccagctgcgagaccctggaccactacgaccccgactacgagttcctgcagcaggacctgagcaacgccgaccagatcccccagcagaccgcctggaacctgagccccctgcccgagagcctgggcgagagcggcagccccttcctgggcccccccttccagctgcccctgggcggccacccccagcccgacggccccctggcccccggccagcagaccgacaccccccccgccctgcccgagaagaagagaagaagcgccgccagccagaccgccgacggcagcggctgcagagtgagctacgagagacaccccagccagtacgacaacatcagcggcgaggacctgcagagcaccgcccccatccccagcgtgccctacgcccccttcgccgccatcctgcccttccagcacggcggcagcagcgcccccgtggagttcgtgggcgacttcaccgcccccgagagcaccggcgaccccgagaagcccccccccctgcccgagaagaagaacaagcacatgctggcctacatgcagctgctggaggactacagcgagccccagcccagcatgttctaccagaccccccagaacgagcacatctaccagcagaagaacaagctgctgatggaggtgtacggcttcagcgacagcttcagcggcgtggacagcgtgcaggagctggcccccccccccgccctgccccccaagcagagacagctggagccccccgccggcaaggacggccaccccagagaccccagcgccgtgagcggcgtgcccggcaaggacagcagagacggcagcgagagagcccccaagagccccgacgccctggagagcgcccagagcgaggaggaggtggacgagctgagcctgatcgaccacaacgagatcatgagcagactgaccctgaagcaggagggcgacgacggccccgacgtgagaggcggcagcggcgacatcctgctggtgcacgccaccgagaccgacagaaaggacctggtgctgtactgcgaggccttcctgaccacctacagaaccttcatcagccccgaggagctgatcaagaagctgcagtacagatacgagaagttcagccccttcgccgacaccttcaagaagagagtgagcaagaacaccttcttcgtgctggtgagagtggtggacgagctgtgcctggtggagctgaccgaggagatcctgaagctgctgatggagctggtgttcagactggtgtgcaacggcgagctgagcctggccagagtgctgagaaagaacatcctggacaaggtggaccagaagaagctgctgagatgcgccaccagcagccagcccctggccgccagaggcgtggccgccagacccggcaccctgcacgacttccacagccacgagatcgccgagcagctgaccctgctggacgccgagctgttctacaagatcgagatccccgaggtgctgctgtgggccaaggagcagaacgaggagaagagccccaacctgacccagttcaccgagcacttcaacaacatgagctactgggtgagaagcatcatcatgctgcaggagaaggcccaggacagagagagactgctgctgaagttcatcaagatcatgaagcacctgagaaagctgaacaacttcaacagctacctggccatcctgagcgccctggacagcgcccccatcagaagactggagtggcagaagcagaccagcgagggcctggccgagtactgcaccctgatcgacagcagcagcagcttcagagcctacagagccgccctgagcgaggtggagcccccctgcatcccctacctgggcctgatcctgcaggacctgaccttcgtgcacctgggcaaccccgactacatcgacggcaaggtgaacttcagcaagagatggcagcagttcaacatcctggacagcatgagatgcttccagcaggcccactacgacatgagaagaaacgacgacatcatcaacttcttcaacgacttcagcgaccacctggccgaggaggccctgtgggagctgagcctgaagatcaagcccagaaacatcaccagaagaaagaccgacagagaggagaagacctag

SEQ ID NO: 12551 - DNA, 3168 bp, synthetic construct
  misc_feature 1..3168: note = Description of Artificial Sequence: Synthetic coding sequence
  source 1..3168: mol_type = other DNA
atgagcaccagcgccgtggccagcagaagccagagacagaagaacctgagctggctggaggagaaggagaaggaggtggtgagcgccctgagatacttcaagaccatcgtggacaagatggccatcgacaagaaggtgctggagatgctgcccggcagcgccagcaaggtgctggaggccatcctgcccctggtgcagaacgaccccagaatccagcacagcagcgccctgagcagctgctacagcagagtgtaccagagcctggccaacctgatcagatggagcgaccaggtgatgctggagggcgtgaacagcgaggacaaggagatggtgaccaccgtgaagggcgtgatcaaggccgtgctggacggcgtgaaggagctggtgagactgaccatcgagaagcagggcagacccagccccaccagccccgtgaagcccagcagccccgccagcaagcccgacggccccgccgagctgcccctgaccgacagagaggtggagatcctgaacaagaccaccggcatgagccagagcaccgagctgctgcccgacgccaccgacgaggaggtggccccccccaagccccccctgcccggcatcagagtggtggacaacagccccccccccgccctgccccccaagaagagacagagcgcccccagccccaccagagtggccgtggtggcccccatgagcagagccaccagcggcagcagcctgcccgtgggcatcaacagacaggacttcgacgtggactgctacgcccagagaagactgagcggcggcagccacagctacggcggcgagagccccagactgagcccctgcagcagcatcggcaagctgagcaagagcgacgagcagctgagcagcctggacagagacagcggccagtgcagcagaaacaccagctgcgagaccctggaccactacgaccccgactacgagttcctgcagcaggacctgagcaacgccgaccagatcccccagcagaccgcctggaacctgagccccctgcccgagagcctgggcgagagcggcagccccttcctgggcccccccttccagctgcccctgggcggccacccccagcccgacggccccctggcccccggccagcagaccgacaccccccccgccctgcccgagaagaagagaagaagcgccgccagccagaccgccgacggcagcggctgcagagtgagctacgagagacaccccagccagtacgacaacatcagcggcgaggacctgcagagcaccgcccccatccccagcgtgccctacgcccccttcgccgccatcctgcccttccagcacggcggcagcagcgcccccgtggagttcgtgggcgacttcaccgcccccgagagcaccggcgaccccgagaagcccccccccctgcccgagaagaagaacaagcacatgctggcctacatgcagctgctggaggactacagcgagccccagcccagcatgttctaccagaccccccagaacgagcacatctaccagcagaagaacaagctgctgatggaggtgtacggcttcagcgacagcttcagcggcgtggacagcgtgcaggagctggcccccccccccgccctgccccccaagcagagacagctggccagctgcgccgccagcagcttcagcagcgtgagccactgcgtgcagcagaccaaggtggccttcacccccgaggacggcagcgccgcccagggcctgagcgtgagcgtgagcaacagcttcctgagcagacacggcagcctgcccgtgcccagcgagccccccgccggcaaggacggccaccccagagaccccagcgccgtgagcggcgtgcccggcaaggacagcagagacggcagcgagagagcccccaagagccccgacgccctggagagcgcccagagcgaggaggaggtggacgagctgagcctgatcgaccacaacgagatcatgagcagactgaccctgaagcaggagggcgacgacggccccgacgtgagaggcggcagcggcgacatcctgctggtgcacgccaccgagaccgacagaaaggacctggtgctgtactgcgaggccttcctgaccacctacagaaccttcatcagccccgaggagctgatcaagaagctgcagtacagatacgagaagttcagccccttcgccgacaccttcaagaagagagtgagcaagaacaccttcttcgtgctggtgagagtggtggacgagctgtgcctggtggagctgaccgaggagatcctgaagctgctgatggagctggtgttcagactggtgtgcaacggcgagctgagcctggccagagtgctgagaaagaacatcctggacaaggtggaccagaagaagctgctgagatgcgccaccagcagccagcccctggccgccagaggcgtggccgccagacccggcaccctgcacgacttccacagccacgagatcgccgagcagctgaccctgctggacgccgagctgttctacaagatcgagatccccgaggtgctgctgtgggccaaggagcagaacgaggagaagagccccaacctgacccagttcaccgagcacttcaacaacatgagctactgggtgagaagcatcatcatgctgcaggagaaggcccaggacagagagagactgctgctgaagttcatcaagatcatgaagcacctgagaaagctgaacaacttcaacagctacctggccatcctgagcgccctggacagcgcccccatcagaagactggagtggcagaagcagaccagcgagggcctggccgagtactgcaccctgatcgacagcagcagcagcttcagagcctacagagccgccctgagcgaggtggagcccccctgcatcccctacctgggcctgatcctgcaggacctgaccttcgtgcacctgggcaaccccgactacatcgacggcaaggtgaacttcagcaagagatggcagcagttcaacatcctggacagcatgagatgcttccagcaggcccactacgacatgagaagaaacgacgacatcatcaacttcttcaacgacttcagcgaccacctggccgaggaggccctgtgggagctgagcctgaagatcaagcccagaaacatcaccagaagaaagaccgacagagaggagaagacctag

SEQ ID NO: 12552 - DNA, 3285 bp, synthetic construct
  misc_feature 1..3285: note = Description of Artificial Sequence: Synthetic coding sequence
  source 1..3285: mol_type = other DNA
atgagcggcggcctgggcctgagaagaagccccgagatgagcggcaagatcgagaaggccgacagccagagaagccacctgagcagcttcaccatgaagctgatggacaagttccacagccccaagatcaagagaacccccagcaagaagggcaagcccgccgaggtgagcgtgaagatccccgagaagcccgtgaacaaggaggccaccgacagattcctgcccgagggctaccccctgcccctggacctggagcagcaggccgtggagttcatgagcaccagcgccgtggccagcagaagccagagacagaagaacctgagctggctggaggagaaggagaaggaggtggtgagcgccctgagatacttcaagaccatcgtggacaagatggccatcgacaagaaggtgctggagatgctgcccggcagcgccagcaaggtgctggaggccatcctgcccctggtgcagaacgaccccagaatccagcacagcagcgccctgagcagctgctacagcagagtgtaccagagcctggccaacctgatcagatggagcgaccaggtgatgctggagggcgtgaacagcgaggacaaggagatggtgaccaccgtgaagggcgtgatcaaggccgtgctggacggcgtgaaggagctggtgagactgaccatcgagaagcagggcagacccagccccaccagccccgtgaagcccagcagccccgccagcaagcccgacggccccgccgagctgcccctgaccgacagagaggtggagatcctgaacaagaccaccggcatgagccagagcaccgagctgctgcccgacgccaccgacgaggaggtggccccccccaagccccccctgcccggcatcagagtggtggacaacagccccccccccgccctgccccccaagaagagacagagcgcccccagccccaccagagtggccgtggtggcccccatgagcagagccaccagcggcagcagcctgcccgtgggcatcaacagacaggacttcgacgtggactgctacgcccagagaagactgagcggcggcagccacagctacggcggcgagagccccagactgagcccctgcagcagcatcggcaagctgagcaagagcgacgagcagctgagcagcctggacagagacagcggccagtgcagcagaaacaccagctgcgagaccctggaccactacgaccccgactacgagttcctgcagcaggacctgagcaacgccgaccagatcccccagcagaccgcctggaacctgagccccctgcccgagagcctgggcgagagcggcagccccttcctgggcccccccttccagctgcccctgggcggccacccccagcccgacggccccctggcccccggccagcagaccgacaccccccccgccctgcccgagaagaagagaagaagcgccgccagccagaccgccgacggcagcggctgcagagtgagctacgagagacaccccagccagtacgacaacatcagcggcgaggacctgcagagcaccgcccccatccccagcgtgccctacgcccccttcgccgccatcctgcccttccagcacggcggcagcagcgcccccgtggagttcgtgggcgacttcaccgcccccgagagcaccggcgaccccgagaagcccccccccctgcccgagaagaagaacaagcacatgctggcctacatgcagctgctggaggactacagcgagccccagcccagcatgttctaccagaccccccagaacgagcacatctaccagcagaagaacaagctgctgatggaggtgtacggcttcagcgacagcttcagcggcgtggacagcgtgcaggagctggcccccccccccgccctgccccccaagcagagacagctggagccccccgccggcaaggacggccaccccagagaccccagcgccgtgagcggcgtgcccggcaaggacagcagagacggcagcgagagagcccccaagagccccgacgccctggagagcgcccagagcgaggaggaggtggacgagctgagcctgatcgaccacaacgagatcatgagcagactgaccctgaagcaggagggcgacgacggccccgacgtgagaggcggcagcggcgacatcctgctggtgcacgccaccgagaccgacagaaaggacctggtgctgtactgcgaggccttcctgaccacctacagaaccttcatcagccccgaggagctgatcaagaagctgcagtacagatacgagaagttcagccccttcgccgacaccttcaagaagagagtgagcaagaacaccttcttcgtgctggtgagagtggtggacgagctgtgcctggtggagctgaccgaggagatcctgaagctgctgatggagctggtgttcagactggtgtgcaacggcgagctgagcctggccagagtgctgagaaagaacatcctggacaaggtggaccagaagaagctgctgagatgcgccaccagcagccagcccctggccgccagaggcgtggccgccagacccggcaccctgcacgacttccacagccacgagatcgccgagcagctgaccctgctggacgccgagctgttctacaagatcgagatccccgaggtgctgctgtgggccaaggagcagaacgaggagaagagccccaacctgacccagttcaccgagcacttcaacaacatgagctactgggtgagaagcatcatcatgctgcaggagaaggcccaggacagagagagactgctgctgaagttcatcaagatcatgaagcacctgagaaagctgaacaacttcaacagctacctggccatcctgagcgccctggacagcgcccccatcagaagactggagtggcagaagcagaccagcgagggcctggccgagtactgcaccctgatcgacagcagcagcagcttcagagcctacagagccgccctgagcgaggtggagcccccctgcatcccctacctgggcctgatcctgcaggacctgaccttcgtgcacctgggcaaccccgactacatcgacggcaaggtgaacttcagcaagagatggcagcagttcaacatcctggacagcatgagatgcttccagcaggcccactacgacatgagaagaaacgacgacatcatcaacttcttcaacgacttcagcgaccacctggccgaggaggccctgtgggagctgagcctgaagatcaagcccagaaacatcaccagaagaaagaccgacagagaggagaagacctag

SEQ ID NO: 12553 - DNA, 3234 bp, synthetic construct; identical to SEQ ID NO: 12550
  misc_feature 1..3234: note = Description of Artificial Sequence: Synthetic coding sequence
  source 1..3234: mol_type = other DNA

SEQ ID NO: 12554 - DNA, 3288 bp, synthetic construct
  misc_feature 1..3288: note = Description of Artificial Sequence: Synthetic coding sequence
  source 1..3288: mol_type = other DNA
atgggcaacgccatcgagaagcagaagcccctgaagagaagccacctgtacccctggaagcaggacagccagagaagccacctgagcagcttcaccatgaagctgatggacaagttccacagccccaagatcaagagaacccccagcaagaagggcaagcccgccgaggtgagcgtgaagatccccgagaagcccgtgaacaaggaggccaccgacagattcctgcccgagggctaccccctgcccctggacctggagcagcaggccgtggagttcatgagcaccagcgccgtggccagcagaagccagagacagaagaacctgagctggctggaggagaaggagaaggaggtggtgagcgccctgagatacttcaagaccatcgtggacaagatggccatcgacaagaaggtgctggagatgctgcccggcagcgccagcaaggtgctggaggccatcctgcccctggtgcagaacgaccccagaatccagcacagcagcgccctgagcagctgctacagcagagtgtaccagagcctggccaacctgatcagatggagcgaccaggtgatgctggagggcgtgaacagcgaggacaaggagatggtgaccaccgtgaagggcgtgatcaaggccgtgctggacggcgtgaaggagctggtgagactgaccatcgagaagcagggcagacccagccccaccagccccgtgaagcccagcagccccgccagcaagcccgacggccccgccgagctgcccctgaccgacagagaggtggagatcctgaacaagaccaccggcatgagccagagcaccgagctgctgcccgacgccaccgacgaggaggtggccccccccaagccccccctgcccggcatcagagtggtggacaacagccccccccccgccctgccccccaagaagagacagagcgcccccagccccaccagagtggccgtggtggcccccatgagcagagccaccagcggcagcagcctgcccgtgggcatcaacagacaggacttcgacgtggactgctacgcccagagaagactgagcggcggcagccacagctacggcggcgagagccccagactgagcccctgcagcagcatcggcaagctgagcaagagcgacgagcagctgagcagcctggacagagacagcggccagtgcagcagaaacaccagctgcgagaccctggaccactacgaccccgactacgagttcctgcagcaggacctgagcaacgccgaccagatcccccagcagaccgcctggaacctgagccccctgcccgagagcctgggcgagagcggcagccccttcctgggcccccccttccagctgcccctgggcggccacccccagcccgacggccccctggcccccggccagcagaccgacaccccccccgccctgcccgagaagaagagaagaagcgccgccagccagaccgccgacggcagcggctgcagagtgagctacgagagacaccccagccagtacgacaacatcagcggcgaggacctgcagagcaccgcccccatccccagcgtgccctacgcccccttcgccgccatcctgcccttccagcacggcggcagcagcgcccccgtggagttcgtgggcgacttcaccgcccccgagagcaccggcgaccccgagaagcccccccccctgcccgagaagaagaacaagcacatgctggcctacatgcagctgctggaggactacagcgagccccagcccagcatgttctaccagaccccccagaacgagcacatctaccagcagaagaacaagctgctgatggaggtgtacggcttcagcgacagcttcagcggcgtggacagcgtgcaggagctggcccccccccccgccctgccccccaagcagagacagctggagccccccgccggcaaggacggccaccccagagaccccagcgccgtgagcggcgtgcccggcaaggacagcagagacggcagcgagagagcccccaagagccccgacgccctggagagcgcccagagcgaggaggaggtggacgagctgagcctgatcgaccacaacgagatcatgagcagactgaccctgaagcaggagggcgacgacggccccgacgtgagaggcggcagcggcgacatcctgctggtgcacgccaccgagaccgacagaaaggacctggtgctgtactgcgaggccttcctgaccacctacagaaccttcatcagccccgaggagctgatcaagaagctgcagtacagatacgagaagttcagccccttcgccgacaccttcaagaagagagtgagcaagaacaccttcttcgtgctggtgagagtggtggacgagctgtgcctggtggagctgaccgaggagatcctgaagctgctgatggagctggtgttcagactggtgtgcaacggcgagctgagcctggccagagtgctgagaaagaacatcctggacaaggtggaccagaagaagctgctgagatgcgccaccagcagccagcccctggccgccagaggcgtggccgccagacccggcaccctgcacgacttccacagccacgagatcgccgagcagctgaccctgctggacgccgagctgttctacaagatcgagatccccgaggtgctgctgtgggccaaggagcagaacgaggagaagagccccaacctgacccagttcaccgagcacttcaacaacatgagctactgggtgagaagcatcatcatgctgcaggagaaggcccaggacagagagagactgctgctgaagttcatcaagatcatgaagcacctgagaaagctgaacaacttcaacagctacctggccatcctgagcgccctggacagcgcccccatcagaagactggagtggcagaagcagaccagcgagggcctggccgagtactgcaccctgatcgacagcagcagcagcttcagagcctacagagccgccctgagcgaggtggagcccccctgcatcccctacctgggcctgatcctgcaggacctgaccttcgtgcacctgggcaaccccgactacatcgacggcaaggtgaacttcagcaagagatggcagcagttcaacatcctggacagcatgagatgcttccagcaggcccactacgacatgagaagaaacgacgacatcatcaacttcttcaacgacttcagcgaccacctggccgaggaggccctgtgggagctgagcctgaagatcaagcccagaaacatcaccagaagaaagaccgacagagaggagaagacctag

SEQ ID NO: 12555 - DNA, 1395 bp, synthetic construct
  misc_feature 1..1395: note = Description of Artificial Sequence: Synthetic coding sequence
  source 1..1395: mol_type = other DNA
atgagcagagccaccagcggcagcagcctgcccgtgggcatcaacagacaggacttcgacgtggactgctacgcccagagaagactgagcggcggcagccacagctacggcggcgagagccccagactgagcccctgcagcagcatcggcaagctgagcaagagcgacgagcagctgagcagcctggacagagacagcggccagtgcagcagaaacaccagctgcgagaccctggaccactacgaccccgactacgagttcctgcagcaggacctgagcaacgccgaccagatcccccagcagaccgcctggaacctgagccccctgcccgagagcctgggcgagagcggcagccccttcctgggcccccccttccagctgcccctgggcggccacccccagcccgacggccccctggcccccggccagcagaccgacaccccccccgccctgcccgagaagaagagaagaagcgccgccagccagaccgccgacggcagcggctgcagagtgagctacgagagacaccccagccagtacgacaacatcagcggcgaggacctgcagagcaccgcccccatccccagcgtgccctacgcccccttcgccgccatcctgcccttccagcacggcggcagcagcgcccccgtggagttcgtgggcgacttcaccgcccccgagagcaccggcgaccccgagaagcccccccccctgcccgagaagaagaacaagcacatgctggcctacatgcagctgctggaggactacagcgagccccagcccagcatgttctaccagaccccccagaacgagcacatctaccagcagaagaacaagctgctgatggaggtgtacggcttcagcgacagcttcagcggcgtggacagcgtgcaggagctggcccccccccccgccctgccccccaagcagagacagctgcaggccagctgcgccgccagcagcttcagcagcgtgagccactgcgtgcagcagaccaaggtggccttcacccccgaggacggcagcgccgcccagggcctgagcgtgagcgtgagcaacagcttcctgagcagacacggcagcctgcccgtgcccagctacaagagcgtgttcagaagctacagccaggacttcgtgccccaccaccaggccagcgtgccccccttcctgccccccaccagcagcagcagcccccacttcccccccgcccaccagagccagagcagcgacctggccgtgcccaccatggccggccccccccccagcaccgtggacggccccctgagcgccagccaggagagcagcttccacggcaacaccgtgtgcctgcccagcgagaccagcttcaccgacagcgagccccccgccggcaaggacggccaccccagagactag

SEQ ID NO: 12556 - DNA, 3285 bp, synthetic construct; identical to SEQ ID NO: 12552
  misc_feature 1..3285: note = Description of Artificial Sequence: Synthetic coding sequence
  source 1..3285: mol_type = other DNA

SEQ ID NO: 12557 - DNA, 1011 bp, synthetic construct
  misc_feature 1..1011: note = Description of Artificial Sequence: Synthetic coding sequence
  source 1..1011: mol_type = other DNA
atggaggtgtacggcttcagcgacagcttcagcggcgtggacagcgtgcaggagctggcccccccccccgccctgccccccaagcagagacagctgagcgagaacgccagcgaggaggccggcgagggcgagtacgtgaacctgtacagcagcggccagagcagcgaggagctggcccccagcagaggcgagccccccgccggcaaggacggccaccccagagaccccagcgccgtgagcggcgtgcccggcaaggacagcagagacggcagcgagagagcccccaagagccccgacgccctggagagcgcccagagcgaggaggaggtggacgagctgagcctgatcgaccacaacgagatcatgagcagactgaccctgaagcaggagggcgacgacggccccgacgtgagaggcggcagcggcgacatcctgctggtgcacgccaccgagaccgacagaaaggacctggtgctgtactgcgaggccttcctgaccacctacagaaccttcatcagccccgaggagctgatcaagaagctgcagtacagatacgagaagttcagccccttcgccgacaccttcaagaagagagtgagcaagaacaccttcttcgtgctggtgagagtggtggacgagctgtgcctggtggagctgaccgaggagatcctgaagctgctgatggagctggtgttcagactggtgtgcaacggcgagctgagcctggccagagtgctgagaaagaacatcctggacaaggtggaccagaagaagctgctgagatgcgccaccagcagccagcccctggccgccagaggcgtggccgccagacccggcaccctgcacgacttccacagccacgagatcgccgagcagctgaccctgctggacgccgagctgttctacaagatcgagatccccgaggtgctgctgtgggccaaggagcagaacgaggagaagagccccaacctgacccagttcaccgagcacttcaacaacatgagctactag

SEQ ID NO: 12558 - DNA, 3174 bp, synthetic construct
  misc_feature 1..3174: note = Description of Artificial Sequence: Synthetic coding sequence
  source 1..3174: mol_type = other DNA
atgggcaacgccatcgagaagcagaagcccctgaagagaagccacctgtacccctggaagcaggacagccagagaagccacctgagcagcttcaccatgaagctgatggacaagttccacagccccaagatcaagagaacccccagcaagaagggcaagcccgccgaggtgagcgtgaagatccccgagaagcccgtgaacaagaacctgagctggctggaggagaaggagaaggaggtggtgagcgccctgagatacttcaagaccatcgtggacaagatggccatcgacaagaaggtgctggagatgctgcccggcagcgccagcaaggtgctggaggccatcctgcccctggtgcagaacgaccccagaatccagcacagcagcgccctgagcagctgctacagcagagtgtaccagagcctggccaacctgatcagatggagcgaccaggtgatgctggagggcgtgaacagcgaggacaaggagatggtgaccaccgtgaagggcgtgatcaaggccgtgctggacggcgtgaaggagctggtgagactgaccatcgagaagcagggcagacccagccccaccagccccgtgaagcccagcagccccgccagcaagcccgacggccccgccgagctgcccctgaccgacagagaggtggagatcctgaacaagaccaccggcatgagccagagcaccgagctgctgcccgacgccaccgacgaggaggtggccccccccaagccccccctgcccggcatcagagtggtggacaacagccccccccccgccctgccccccaagaagagacagagcgcccccagccccaccagagtggccgtggtggcccccatgagcagagccaccagcggcagcagcctgcccgtgggcatcaacagacaggacttcgacgtggactgctacgcccagagaagactgagcggcggcagccacagctacggcggcgagagccccagactgagcccctgcagcagcatcggcaagctgagcaagagcgacgagcagctgagcagcctggacagagacagcggccagtgcagcagaaacaccagctgcgagaccctggaccactacgaccccgactacgagttcctgcagcaggacctgagcaacgccgaccagatcccccagcagaccgcctggaacctgagccccctgcccgagagcctgggcgagagcggcagccccttcctgggcccccccttccagctgcccctgggcggccacccccagcccgacggccccctggcccccggccagcagaccgacaccccccccgccctgcccgagaagaagagaagaagcgccgccagccagaccgccgacggcagcggctgcagagtgagctacgagagacaccccagccagtacgacaacatcagcggcgaggacctgcagagcaccgcccccatccccagcgtgccctacgcccccttcgccgccatcctgcccttccagcacggcggcagcagcgcccccgtggagttcgtgggcgacttcaccgcccccgagagcaccggcgaccccgagaagcccccccccctgcccgagaagaagaacaagcacatgctggcctacatgcagctgctggaggactacagcgagccccagcccagcatgttctaccagaccccccagaacgagcacatctaccagcagaagaacaagctgctgatggaggtgtacggcttcagcgacagcttcagcggcgtggacagcgtgcaggagctggcccccccccccgccctgccccccaagcagagacagctggagccccccgccggcaaggacggccaccccagagaccccagcgccgtgagcggcgtgcccggcaaggacagcagagacggcagcgagagagcccccaagagccccgacgccctggagagcgcccagagcgaggaggaggtggacgagctgagcctgatcgaccacaacgagatcatgagcagactgaccctgaagcaggagggcgacgacggccccgacgtgagaggcggcagcggcgacatcctgctggtgcacgccaccgagaccgacagaaaggacctggtgctgtactgcgaggccttcctgaccacctacagaaccttcatcagccccgaggagctgatcaagaagctgcagtacagatacgagaagttcagccccttcgccgacaccttcaagaagagagtgagcaagaacaccttcttcgtgctggtgagagtggtggacgagctgtgcctggtggagctgaccgaggagatcctgaagctgctgatggagctggtgttcagactggtgtgcaacggcgagctgagcctggccagagtgctgagaaagaacatcctggacaaggtggaccagaagaagctgctgagatgcgccaccagcagccagcccctggccgccagaggcgtggccgccagacccggcaccctgcacgacttccacagccacgagatcgccgagcagctgaccctgctggacgccgagctgttctacaagatcgagatccccgaggtgctgctgtgggccaaggagcagaacgaggagaagagccccaacctgacccagttcaccgagcacttcaacaacatgagctactgggtgagaagcatcatcatgctgcaggagaaggcccaggacagagagagactgctgctgaagttcatcaagatcatgaagcacctgagaaagctgaacaacttcaacagctacctggccatcctgagcgccctggacagcgcccccatcagaagactggagtggcagaagcagaccagcgagggcctggccgagtactgcaccctgatcgacagcagcagcagcttcagagcctacagagccgccctgagcgaggtggagcccccctgcatcccctacctgggcctgatcctgcaggacctgaccttcgtgcacctgggcaaccccgactacatcgacggcaaggtgaacttcagcaagagatggcagcagttcaacatcctggacagcatgagatgcttccagcaggcccactacgacatgagaagaaacgacgacatcatcaacttcttcaacgacttcagcgaccacctggccgaggaggccctgtgggagctgagcctgaagatcaagcccagaaacatcaccagaagaaagaccgacagagaggagaagacctag

SEQ ID NO: 12559 - DNA, 960 bp, synthetic construct
  misc_feature 1..960: note = Description of Artificial Sequence: Synthetic coding sequence
  source 1..960: mol_type = other DNA
tgactggcccccccccccgccctgccccccaagcagagacagctgagcgagaacgccagcgaggaggccggcgagggcgagtacgtgaacctgtacagcagcggccagagcagcgaggagctggcccccagcagaggcgagccccccgccggcaaggacggccaccccagagaccccagcgccgtgagcggcgtgcccggcaaggacagcagagacggcagcgagagagcccccaagagccccgacgccctggagagcgcccagagcgaggaggaggtggacgagctgagcctgatcgaccacaacgagatcatgagcagactgaccctgaagcaggagggcgacgacggccccgacgtgagaggcggcagcggcgacatcctgctggtgcacgccaccgagaccgacagaaaggacctggtgctgtactgcgaggccttcctgaccacctacagaaccttcatcagccccgaggagctgatcaagaagctgcagtacagatacgagaagttcagccccttcgccgacaccttcaagaagagagtgagcaagaacaccttcttcgtgctggtgagagtggtggacgagctgtgcctggtggagctgaccgaggagatcctgaagctgctgatggagctggtgttcagactggtgtgcaacggcgagctgagcctggccagagtgctgagaaagaacatcctggacaaggtggaccagaagaagctgctgagatgcgccaccagcagccagcccctggccgccagaggcgtggccgccagacccggcaccctgcacgacttccacagccacgagatcgccgagcagctgaccctgctggacgccgagctgttctacaagatcgagatccccgaggtgctgctgtgggccaaggagcagaacgaggagaagagccccaacctgacccagttcaccgagcacttcaacaacatgagctactag

SEQ ID NO: 12560 - DNA, 687 bp, synthetic construct
  misc_feature 1..687: note = Description of Artificial Sequence: Synthetic coding sequence
  source 1..687: mol_type = other DNA
tgactgcccgagaagaagaacaagcacatgctggcctacatgcagctgctggaggactacagcgagccccagcccagcatgttctaccagaccccccagaacgagcacatctaccagcagaagaacaagctgctgatggaggtgtacggcttcagcgacagcttcagcggcgtggacagcgtgcaggagctggcccccccccccgccctgccccccaagcagagacagctgcaggccagctgcgccgccagcagcttcagcagcgtgagccactgcgtgcagcagaccaaggtggccttcacccccgaggacggcagcgccgcccagggcctgagcgtgagcgtgagcaacagcttcctgagcagacacggcagcctgcccgtgcccagctacaagagcgtgttcagaagctacagccaggacttcgtgccccaccaccaggccagcgtgccccccttcctgccccccaccagcagcagcagcccccacttcccccccgcccaccagagccagagcagcgacctggccgtgcccaccatggccggccccccccccagcaccgtggacggccccctgagcgccagccaggagagcagcttccacggcaacaccgtgtgcctgcccagcgagaccagcttcaccgacagcgagccccccgccggcaaggacggccaccccagagactag

SEQ ID NO: 12561 - DNA, 582 bp, synthetic construct
  misc_feature 1..582: note = Description of Artificial Sequence: Synthetic coding sequence
  source 1..582: mol_type = other DNA
atgggcaacgccatcgagaagcagaagcccctgaagagaagccacctgtacccctggaagcaggacagccagagaagccacctgagcagcttcaccatgaagctgatggacaagttccacagccccaagatcaagagaacccccagcaagaagggcaagcccgccgaggtgagcgtgaagatccccgagaagcccgtgaacaaggaggccaccgacagattcctgcccgagggctaccccctgcccctggacctggagcagcaggccgtggagttcatgagcaccagcgccgtggccagcagaagccagagacagaagaacctgagctggctggaggagaaggagaaggaggtggtgagcgccctgagatacttcaagaccatcgtggacaagatggccatcgacaagaaggtgctggagatgctgcccggcagcgccagcaaggtgctggaggccatcctgcccctggtgcagaacgaccccagaatccagcacagcagcgccctgagcagctgctacagcagagtgtaccagagcctggccaacctgatcagatggagcgaccaggtgatgctggagtag

SEQ ID NO: 12562 - DNA, 3072 bp, synthetic construct
  misc_feature 1..3072: note = Description of Artificial Sequence: Synthetic coding sequence
  source 1..3072: mol_type = other DNA
ttcaagaccatcgtggacaagatggccatcgacaagaaggtgctggagatgctgcccggcagcgccagcaaggtgctggaggccatcctgcccctggtgcagaacgaccccagaatccagcacagcagcgccctgagcagctgctacagcagagtgtaccagagcctggccaacctgatcagatggagcgaccaggtgatgctggagggcgtgaacagcgaggacaaggagatggtgaccaccgtgaagggcgtgatcaaggccgtgctggacggcgtgaaggagctggtgagactgaccatcgagaagcagggcagacccagccccaccagccccgtgaagcccagcagccccgccagcaagcccgacggccccgccgagctgcccctgaccgacagagaggtggagatcctgaacaagaccaccggcatgagccagagcaccgagctgctgcccgacgccaccgacgaggaggtggccccccccaagccccccctgcccggcatcagagtggtggacaacagccccccccccgccctgccccccaagaagagacagagcgcccccagccccaccagagtggccgtggtggcccccatgagcagagccaccagcggcagcagcctgcccgtgggcatcaacagacaggacttcgacgtggactgctacgcccagagaagactgagcggcggcagccacagctacggcggcgagagccccagactgagcccctgcagcagcatcggcaagctgagcaagagcgacgagcagctgagcagcctggacagagacagcggccagtgcagcagaaacaccagctgcgagaccctggaccactacgaccccgactacgagttcctgcagcaggacctgagcaacgccgaccagatcccccagcagaccgcctggaacctgagccccctgcccgagagcctgggcgagagcggcagccccttcctgggcccccccttccagctgcccctgggcggccacccccagcccgacggccccctggcccccggccagcagaccgacaccccccccgccctgcccgagaagaagagaagaagcgccgccagccagaccgccgacggcagcggctgcagagtgagctacgagagacaccccagccagtacgacaacatcagcggcgaggacctgcagagcaccgcccccatccccagcgtgccctacgcccccttcgccgccatcctgcccttccagcacggcggcagcagcgcccccgtggagttcgtgggcgacttcaccgcccccgagagcaccggcgaccccgagaagcccccccccctgcccgagaagaagaacaagcacatgctggcctacatgcagctgctggaggactacagcgagccccagcccagcatgttctaccagaccccccagaacgagcacatctaccagcagaagaacaagctgctgatggaggtgtacggcttcagcgacagcttcagcggcgtggacagcgtgcaggagctggcccccccccccgccctgccccccaagcagagacagctggccagctgcgccgccagcagcttcagcagcgtgagccactgcgtgcagcagaccaaggtggccttcacccccgaggacggcagcgccgcccagggcctgagcgtgagcgtgagcaacagcttcctgagcagacacggcagcctgcccgtgcccagcgagccccccgccggcaaggacggccaccccagagaccccagcgccgtgagcggcgtgcccggcaaggacagcagagacggcagcgagagagcccccaagagccccgacgccctggagagcgcccagagcgaggaggaggtggacgagctgagcctgatcgaccacaacgagatcatgagcagactgaccctgaagcaggagggcgacgacggccccgacgtgagaggcggcagcggcgacatcctgctggtgcacgccaccgagaccgacagaaaggacctggtgctgtactgcgaggccttcctgaccacctacagaaccttcatcagccccgaggagctgatcaagaagctgcagtacagatacgagaagttcagccccttcgccgacaccttcaagaagagagtgagcaagaacaccttcttcgtgctggtgagagtggtggacgagctgtgcctggtggagctgaccgaggagatcctgaagctgctgatggagctggtgttcagactggtgtgcaacggcgagctgagcctggccagagtgctgagaaagaacatcctggacaaggtggaccagaagaagctgctgagatgcgccaccagcagccagcccctggccgccagaggcgtggccgccagacccggcaccctgcacgacttccacagccacgagatcgccgagcagctgaccctgctggacgccgagctgttctacaagatcgagatccccgaggtgctgctgtgggccaaggagcagaacgaggagaagagccccaacctgacccagttcaccgagcacttcaacaacatgagctactgggtgagaagcatcatcatgctgcaggagaaggcccaggacagagagagactgctgctgaagttcatcaagatcatgaagcacctgagaaagctgaacaacttcaacagctacctggccatcctgagcgccctggacagcgcccccatcagaagactggagtggcagaagcagaccagcgagggcctggccgagtactgcaccctgatcgacagcagcagcagcttcagagcctacagagccgccctgagcgaggtggagcccccctgcatcccctacctgggcctgatcctgcaggacctgaccttcgtgcacctgggcaaccccgactacatcgacggcaaggtgaacttcagcaagagatggcagcagttcaacatcctggacagcatgagatgcttccagcaggcccactacgacatgagaagaaacgacgacatcatcaacttcttcaacgacttcagcgaccacctggccgaggaggccctgtgggagctgagcctgaagatcaagcccagaaacatcaccagaagaaagaccgacagagaggagaagacctag

SEQ ID NO: 12563 - DNA, 480 bp, synthetic construct
  misc_feature 1..480: note = Description of Artificial Sequence: Synthetic coding sequence
  source 1..480: mol_type = other DNA
atggaggtgtacggcttcagcgacagcttcagcggcgtggacagcgtgcaggagctggcccccccccccgccctgccccccaagcagagacagctgtacaagagcgtgttcagaagctacagccaggacttcgtgccccaccaccaggccagcgtgccccccttcctgccccccaccagcagcagcagcccccacttcccccccgcccaccagagccagagcagcgacctggccgtgcccaccatggccggccccccccccagcaccgtggacggccccctgagcgccagccaggagagcagcttccacggcaacaccgtgtgcctgcccagcgagaccagcttcaccgacagcgagccccccgccggcaaggacggccaccccagagaccccagcgccgtgagcggcgtgcccggcaaggacagcagagacggcagcgagagagcccccaagagccccgacgccctggagagcgcctag

SEQ ID NO: 12564 - DNA, 696 bp, synthetic construct
  misc_feature 1..696: note = Description of Artificial Sequence: Synthetic coding sequence
  source 1..696: mol_type = other DNA
atggaggtgtacggcttcagcgacagcttcagcggcgtggacagcgtgcaggagctggcccccccccccgccctgccccccaagcagagacagctgcaggccagctgcgccgccagcagcttcagcagcgtgagccactgcgtgcagcagaccaaggtggccttcacccccgaggacggcagcgccgcccagggcctgagcgtgagcgtgagcaacagcttcctgagcagacacggcagcctgcccgtgcccagctacaagagcgtgttcagaagctacagccaggacttcgtgccccaccaccaggccagcgtgccccccttcctgccccccaccagcagcagcagcccccacttcccccccgcccaccagagccagagcagcgacctggccgtgcccaccatggccggccccccccccagcaccgtggacggccccctgagcgccagccaggagagcagcttccacggcaacaccgtgtgcctgcccagcgagaccagcttcaccgacagcagcgagaacgccagcgaggaggccggcgagggcgagtacgtgaacctgtacagcagcggccagagcagcgaggagctggcccccagcagaggcgagccccccgccggcaaggacggccaccccagagaccccagcgccgtgagcggcgtgcccggcaaggacagcagagacggcagcgagtag

SEQ ID NO: 12565 - DNA, 477 bp, synthetic construct
  misc_feature 1..477: note = Description of Artificial Sequence: Synthetic coding sequence
  source 1..477: mol_type = other DNA
atgagcggcggcctgggcctgagaagaagccccgagatgagcggcaagatcgagaaggccgacagccagagaagccacctgagcagcttcaccatgaagctgatggacaagttccacagccccaagatcaagagaacccccagcaagaagggcaagcccgccgaggtgagcgtgaagatccccgagaagcccgtgaacaagaacctgagctggctggaggagaaggagaaggaggtggtgagcgccctgagatacttcaagaccatcgtggacaagatggccatcgacaagaaggtgctggagatgctgcccggcagcgccagcaaggtgctggaggccatcctgcccctggtgcagaacgaccccagaatccagcacagcagcgccctgagcagctgctacagcagagtgtaccagagcctggccaacctgatcagatggagcgaccaggtgatgctggagggcgtgaacagctag

SEQ ID NO: 12566 - DNA, 261 bp, synthetic construct
  misc_feature 1..261: note = Description of Artificial Sequence: Synthetic coding sequence
  source 1..261: mol_type = other DNA
atggaggtgtacggcttcagcgacagcttcagcggcgtggacagcgtgcaggagctggcccccccccccgccctgccccccaagcagagacagctggagccccccgccggcaaggacggccaccccagagaccccagcgccgtgagcggcgtgcccggcaaggacagcagagacggcagcgagagcggcatcaccagcgtgtacagatggaacatccagagacagcagagactgagctacggccacaccgccagccagtag

SEQ ID NO: 12567 - DNA, 7419 bp, synthetic construct
  misc_feature 1..7419: note = Description of Artificial Sequence: Synthetic coding sequence
  source 1..7419: mol_type = other DNA
atgaccgccagaggccagagccccctggcccccctgctggagaccctggaggaccccagcgccagccacggcggccagaccgacgcctacctgaccctgaccagcagaatgaccggcgaggagggcaaggaggtgatcaccgagatcgagaagaagctgcccagactgtacaaggtgctgaagacccacatcagcagccagaacagcgagctgagcagcgccgccctgcaggccctgggcttctgcctgtacaaccccaagatcaccagcgagctgagcgaggccaacgccctggagctgctgagcaagctgaacgacaccatcaagaacagcgacaagaacgtgagaaccagagccctgtgggtgatcagcaagcagaccttccccagcgaggtggtgggcaagatggtgagcagcatcatcgacagcctggagatcctgttcaacaagggcgagacccacagcgccgtggtggacttcgaggccctgaacgtgatcgtgagactgatcgagcaggcccccatccagatgggcgaggaggccgtgagatgggccaagctggtgatccccctggtggtgcacagcgcccagaaggtgcacctgagaggcgccaccgccctggagatgggcatgcccctgctgctgcagaagcagcaggagatcgccagcatcaccgagcagctgatgaccaccaagctgatcagcgagctgcagaagctgttcatgagcaagaacgagacctacgtgctgaagctgtggcccctgttcgtgaagctgctgggcagaaccctgcacagaagcggcagcttcatcaacagcctgctgcagctggaggagctgggcttcagaagcggcgcccccatgatcaagaagatcgccttcatcgcctggaagagcctgatcgacaacttcgccctgaaccccgacatcctgtgcagcgccaagagactgaagctgctgatgcagcccctgagcagcatccacgtgagaaccgagaccctggccctgaccaagctggaggtgtggtggtacctgctgatgagactgggcccccacctgcccgccaacttcgagcaggtgtgcgtgcccctgatccagagcaccatcagcatcgacagcaacgccagcccccagggcaacagctgccacgtggccaccagccccggcctgaaccccatgacccccgtgcacaagggcgccagcagcccctacggcgcccccggcacccccagaatgaacctgagcagcaacctgggcggcatggccaccatccccagcatccagctgctgggcctggagatgctgctgcacttcctgctgggccccgaggccctgagcttcgccaagcagaacaagctggtgctgagcctggagcccctggagcaccccctgatcagcagccccagcttcttcagcaagcacgccaacaccctgatcaccgccgtgcacgacagcttcgtggccgtgggcaaggacgcccccgacgtggtggtgagcgccatctggaaggagctgatcagcctggtgaagagcgtgaccgagagcggcaacaagaaggagaagcccggcagcgaggtgctgaccctgctgctgaagagcctggagagcatcgtgaagagcgaggtgttccccgtgagcaagaccctggtgctgatggagatcaccatcaagggcctgccccagaaggtgctgggcagccccgcctaccaggtggccaacatggacatcctgaacggcacccccgccctgttcctgatccagctgatcttcaacaacttcctggagtgcggcgtgagcgacgagagattcttcctgagcctggagagcctggtgggctgcgtgctgagcggccccaccagccccctggccttcagcgacagcgtgctgaacgtgatcaaccagaacgccaagcagctggagaacaaggagcacctgtggaagatgtggagcgtgatcgtgacccccctgaccgagctgatcaaccagaccaacgaggtgaaccagggcgacgccctggagcacaacttcagcgccatctacggcgccctgaccctgcccgtgaaccacatcttcagcgagcagagattccccgtggccaccatgaagaccctgctgagaacctggagcgagctgtacagagccttcgccagatgcgccgccctggtggccaccgccgaggagaacctgtgctgcgaggagctgagcagcaagatcatgagcagcctggaggacgagggcttcagcaacctgctgttcgtggacagaatcatctacatcatcaccgtgatggtggactgcatcgacttcagcccctacaacatcaagtaccagcccaaggtgaagagcccccagagacccagcgactggagcaagaagaagaacgagcccctgggcaagctgaccagcctgttcaagctgatcgtgaaggtgatctacagcttccacaccctgagcttcaaggaggcccacagcgacaccctgttcaccatcggcaacagcatcaccggcatcatcagcagcgtgctgggccacatcagcctgcccagcatgatcagaaagatcttcgccaccctgaccagacccctggccctgttctacgagaacagcaagctggacgaggtgcccaaggtgtacagctgcctgaacaacaagctggagaagctgctgggcgagatcatcgcctgcctgcagttcagctacaccggcacctacgacagcgagctgctggagcagctgagccccctgctgtgcatcatcttcctgcacaagaacaagcagatcagaaagcagagcgcccagttctggaacgccaccttcgccaaggtgatgatgctggtgtaccccgaggagctgaagcccgtgctgacccaggccaagcagaagttcctgctgctgctgcccggcctggagaccgtggagatgatggaggagagcagcggcccctacagcgacggcaccgagaacagccagctgaacgtgaagatcagcggcatggagagaaagagcaacggcaagagagacagcttcctggcccagaccaagaacaagaaggagaacatgaagcccgccgccaagctgaagctggagagcagcagcctgaaggtgaagggcgagatcctgctggaggaggagaagagcaccgacttcgtgttcatcccccccgagggcaaggacgccaaggagagaatcctgaccgaccaccagaaggaggtgctgaagaccaagagatgcgacatccccgccatgtacaacaacctggacgtgagccaggacaccctgttcacccagtacagccaggaggagcccatggagatccccaccctgaccagaaagcccaaggaggacagcaagatgatgatcaccgaggagcagatggacagcgacatcgtgatcccccaggacgtgaccgaggactgcggcatggccgagcacctggagaagagcagcctgagcaacaacgagtgcggcagcctggacaagaccagccccgagatgagcaacagcaacaacgacgagagaaagaaggccctgatcagcagcagaaagaccagcaccgagtgcgccagcagcaccgagaacagcttcgtggtgagcagcagcagcgtgagcaacaccaccgtggccggcacccccccctaccccaccagcagaagacagaccttcatcaccctggagaagttcgacggcagcgagaacagacccttcagccccagccccctgaacaacatcagcagcaccgtgaccgtgaagaacaaccaggagaccatgatcaagaccgacttcctgcccaaggccaagcagagagagggcaccttcagcaagagcgacagcgagaagatcgtgaacggcaccaagagaagcagcagaagagccggcaaggccgagcagaccggcaacaagagaagcaagcccctgatgagaagcgagcccgagaagaacaccgaggagagcgtggagggcatcgtggtgctggagaacaacccccccggcctgctgaaccagaccgagtgcgtgagcgacaaccaggtgcacctgagcgagagcaccatggagcacgacaacaccaagctgaaggccgccaccgtggagaacgccgtgctgctggagaccaacaccgtggaggagaagaacgtggagatcaacctggagagcaaggagaacaccccccccgtggtgatcagcgccgaccagatggtgaacgaggacagccaggtgcagatcacccccaaccagaagaccctgagaagaagcagcagaagaagaagcgaggtggtggagagcaccaccgagagccaggacaaggagaacagccaccagaagaaggagagaagaaaggaggaggagaagcccctgcagaagagccccctgcacatcaaggacgacgtgctgcccaagcagaagctgatcgccgagcagaccctgcaggagaacctgatcgagaagggcagcaacctgcacgagaagaccctgggcgagaccagcgccaacgccgagaccgagcagaacaagaagaaggccgaccccgagaacatcaagagcgagggcgacggcacccaggacatcgtggacaagagcagcgagaagctggtgagaggcagaaccagataccagaccagaagagccagccagggcctgctgagcagcatcgagaacagcgagagcgacagcagcgaggccaaggaggagggcagcagaaagaagagaagcggcaagtggaagaacaagagcaacgagagcgtggacatccaggaccaggaggagaaggtggtgaagcaggagtgcatcaaggccgagaaccagagccacgactacaaggccaccagcgaggaggacgtgagcatcaagagccccatctgcgagaagcaggacgagagcaacaccgtgatctgccaggacagcaccgtgaccagcgacctgctgcaggtgcccgacgacctgcccaacgtgtgcgaggagaagaacgagaccagcaagtacgccgagtacagcttcaccagcctgcccgtgcccgagagcaacctgagaaccagaaacgccatcaagagactgcacaagagagacagcttcgacaactgcagcctgggcgagagcagcaagatcggcatcagcgacatcagcagcctgagcgagaagaccttccagaccctggagtgccagcacaagagaagcagaagagtgagaagaagcaagggctgcgactgctgcggcgagaagagccagccccaggagaagagcctgatcggcctgaagaacaccgagaacaacgacgtggagatcagcgagaccaagaaggccgacgtgcaggcccccgtgagccccagcgagaccagccaggccaacccctacagcgagggccagttcctggacgagcaccacagcgtgaacttccacctgggcctgaaggaggacaacgacaccatcaacgacagcctgatcgtgagcgagaccaagagcaaggagaacaccatgcaggagagcctgcccagcggcatcgtgaacttcagagaggagatctgcgacatggacagcagcgaggccatgagcctggagagccaggagagccccaacgagaacttcaagaccgtgggcccctgcctgggcgacagcaagaacgtgagccaggagagcctggagaccaaggaggagaagcccgaggagacccccaagatggagctgagcctggagaacgtgaccgtggagggcaacgcctgcaaggtgaccgagagcaacctggagaaggccaagaccatggagctgaacgtgggcaacgaggccagcttccacggccaggagagaaccaagaccggcatcagcgaggaggccgccatcgaggagaacaagagaaacgacgacagcgaggccgacaccgccaagctgaacgccaaggaggtggccaccgaggagttcaacagcgacatcagcctgagcgacaacaccacccccgtgaagctgaacgcccagaccgagatcagcgagcagaccgccgccggcgagctggacggcggcaacgacgtgagcgacctgcacagcagcgaggagaccaacaccaagatgaagaacaacgaggagatgatgatcggcgaggccatggccgagaccggccacgacggcgagaccgagaacgagggcatcaccaccaagaccagcaagcccgacgaggccgagaccaacatgctgaccgccgagatggacaacttcgtgtgcgacaccgtggagatgagcaccgaggagggcatcatcgacgccaacaagaccgagaccaacaccgagtacagcaagagcgaggagaagctggacaacaaccagatggtgatggagagcgacatcctgcaggaggaccaccacaccagccagaaggtggaggagcccagccagtgcctggccagcggcaccgccatcagcgagctgatcatcgaggacaacaacgccagcccccagaagctgagagagctggaccccagcctggtgagcgccaacgacagccccagcggcatgcagaccagatgcgtgtggagccccctggccagccccagcaccagcatcctgaagagaggcctgaagagaagccaggaggacgagatcagcagccccgtgaacaaggtgagaagagtgagcttcgccgaccccatctaccaggccggcctggccgacgacatcgacagaagatgcagcatcgtgagaagccacagcagcaacagcagccccatcggcaagagcgtgaagaccagccccaccacccagagcaagcacaacaccaccagcgccaagggcttcctgagccccggcagcagaagccccaagttcaagagcagcaagaagtgcctgatcagcgagatggccaaggagagcatcccctgccccaccgagagcgtgtacccccccctggtgaactgcgtggcccccgtggacatcatcctgccccagatcaccagcaacatgtgggccagaggcctgggccagctgatcagagccaagaacatcaagaccatcggcgacctgagcaccctgaccgccagcgagatcaagaccctgcccatcagaagccccaaggtgagcaacgtgaagaaggccctgagaatctaccacgagcagcaggtgaagaccagaggcctggaggagatccccgtgttcgacatcagcgagaagaccgtgaacggcatcgagaacaagagcctgagccccgacgaggagagactggtgagcgacatcatcgaccccgtggccctggagatccccctgagcaagaacctgctggcccagatcagcgccctggccctgcagctggacagcgaggacctgcacaactacagcggcagccagctgttcgagatgcacgagaagctgagctgcatggccaacagcgtgatcaagaacctgcagagcagatggagaagccccagccacgagaacagcatctag

SEQ ID NO: 12568 - DNA, 264 bp, synthetic construct
  misc_feature 1..264: note = Description of Artificial Sequence: Synthetic coding sequence
  source 1..264: mol_type = other DNA
atgaccgccagaggccagagccccctggcccccctgctggagaccctggaggaccccagcgccagccacggcggccagaccgacgcctacctgaccctgaccagcagaatgaccggcgaggagggcaaggaggtgatcaccgagatcgagaagaagctgcccagactgtacaaggtgctgaagacccacatcagcagccagaacagcgagctgagcagcgccgccctgcaggccctgggcttctgcctgtacaaccccaagtag

SEQ ID NO: 12569 - DNA, 7341 bp, synthetic construct
  misc_feature 1..7341: note = Description of Artificial Sequence: Synthetic coding sequence
  source 1..7341: mol_type = other DNA
atgaccgccagaggccagagccccctggcccccctgctggagaccctggaggaccccagcgccagccacggcggccagaccgacgcctacctgaccctgaccagcagaatgaccggcgaggagggcaaggaggtgatcaccgagatcgagaagaagctgcccagactgtacaaggtgctgaagacccacatcagcagccagaacagcgagctgagcagcgccgccctgcaggccctgggcttctgcctgtacaaccccaagatcaccagcgagctgagcgaggccaacgccctggagctgctgagcaagctgaacgacaccatcaagaacagcgacaagaacgtgagaaccagagccctgtgggtgatcagcaagcagaccttccccagcgaggtggtgggcaagatggtgagcagcatcatcgacagcctggagatcctgttcaacaagggcgagacccacagcgccgtggtggacttcgaggccctgaacgtgatcgtgagactgatcgagcaggcccccatccagatgggcgaggaggccgtgagatgggccaagctggtgatccccctggtggtgcacagcgcccagaaggtgcacctgagaggcgccaccgccctggagatgggcatgcccctgctgctgcagaagcagcaggagatcgccagcatcaccgagcagctgatgaccaccaagctgatcagcgagctgcagaagctgttcatgagcaagaacgagacctacgtgctgaagctgtggcccctgttcgtgaagctgctgggcagaaccctgcacagaagcggcagcttcatcaacagcctgctgcagctggaggagctgggcttcagaagcggcgcccccatgatcaagaagatcgccttcatcgcctggaagagcctgatcgacaacttcgccctgaaccccgacatcctgtgcagcgccaagagactgaagctgctgatgcagcccctgagcagcatccacgtgagaaccgagaccctggccctgaccaagctggaggtgtggtggtacctgctgatgagactgggcccccacctgcccgccaacttcgagcaggtgtgcgtgcccctgatccagagcaccatcagcatcgacagcaacgccagcccccagggcaacagctgccacgtggccaccagccccggcctgaaccccatgacccccgtgcacaagggcgccagcagcccctacggcgcccccggcacccccagaatgaacctgagcagcaacctgggcggcatggccaccatccccagcatccagctgctgggcctggagatgctgctgcacttcctgctgggccccgaggccctgagcttcgccaagcagaacaagctggtgctgagcctggagcccctggagcaccccctgatcagcagccccagcttcttcagcaagcacgccaacaccctgatcaccgccgtgcacgacagcttcgtggccgtgggcaaggacgcccccgacgtggtggtgagcgccatctggaaggagctgatcagcctggtgaagagcgtgaccgagagcggcaacaagaaggagaagcccggcagcgaggtgctgaccctgctgctgaagagcctggagagcatcgtgaagagcgaggtgttccccgtgagcaagaccctggtgctgatggagatcaccatcaagggcctgccccagaaggtgctgggcagccccgcctaccaggtggccaacatggacatcctgaacggcacccccgccctgttcctgatccagctgatcttcaacaacttcctggagtgcggcgtgagcgacgagagattcttcctgagcctggagagcctggtgggctgcgtgctgagcggccccaccagccccctggccttcagcgacagcgtgctgaacgtgatcaaccagaacgccaagcagctggagaacaaggagcacctgtggaagatgtggagcgtgatcgtgacccccctgaccgagctgatcaaccagaccaacgaggtgaaccagggcgacgccctggagcacaacttcagcgccatctacggcgccctgaccctgcccgtgaaccacatcttcagcgagcagagattccccgtggccaccatgaagaccctgctgagaacctggagcgagctgtacagagccttcgccagatgcgccgccctggtggccaccgccgaggagaacctgtgctgcgaggagctgagcagcaagatcatgagcagcctggaggacgagggcttcagcaacctgctgttcgtggacagaatcatctacatcatcaccgtgatggtggactgcatcgacttcagcccctacaacatcaagtaccagcccaaggtgaagagcccccagagacccagcgactggagcaagaagaagaacgagcccctgggcaagctgaccagcctgttcaagctgatcgtgaaggtgatctacagcttccacaccctgagcttcaaggaggcccacagcgacaccctgttcaccatcggcaacagcatcaccggcatcatcagcagcgtgctgggccacatcagcctgcccagcatgatcagaaagatcttcgccaccctgaccagacccctggccctgttctacgagaacagcaagctggacgaggtgcccaaggtgtacagctgcctgaacaacaagctggagaagctgctgggcgagatcatcgcctgcctgcagttcagctacaccggcacctacgacagcgagctgctggagcagctgagccccctgctgtgcatcatcttcctgcacaagaacaagcagatcagaaagcagagcgcccagttctggaacgccaccttcgccaaggtgatgatgctggtgtaccccgaggagctgaagcccgtgctgacccaggccaagcagaagttcctgctgctgctgcccggcctggagaccgtggagatgatggaggagagcagcggcccctacagcgacggcaccgagaacagccagctgaacgtgaagatcagcggcatggagagaaagagcaacggcaagagagacagcttcctggcccagaccaagaacaagaaggagaacatgaagcccgccgccaagctgaagctggagagcagcagcctgaaggtgaagggcgagatcctgctggaggaggagaagagcaccgacttcgtgttcatcccccccgagggcaaggacgccaaggagagaatcctgaccgaccaccagaaggaggtgctgaagaccaagagatgcgacatccccgccatgtacaacaacctggacgtgagccaggacaccctgttcacccagtacagccaggaggagcccatggagatccccaccctgaccagaaagcccaaggaggacagcaagatgatgatcaccgaggagcagatggacagcgacatcgtgatcccccaggacgtgaccgaggactgcggcatggccgagcacctggagaagagcagcctgagcaacaacgagtgcggcagcctggacaagaccagccccgagatgagcaacagcaacaacgacgagagaaagaaggccctgatcagcagcagaaagaccagcaccgagtgcgccagcagcaccgagaacagcttcgtggtgagcagcagcagcgtgagcaacaccaccgtggccggcacccccccctaccccaccagcagaagacagaccttcatcaccctggagaagttcgacggcagcgagaacagacccttcagccccagccccctgaacaacatcagcagcaccgtgaccgtgaagaacaaccaggagaccatgatcaagaccgacttcctgcccaaggccaagcagagagagggcaccttcagcaagagcgacagcgagaagatcgtgaacggcaccaagagaagcagcagaagagccggcaaggccgagcagaccggcaacaagagaagcaagcccctgatgagaagcgagcccgagaagaacaccgaggagagcgtggagggcatcgtggtgctggagaacaacccccccggcctgctgaaccagaccgagtgcgtgagcgacaaccaggtgcacctgagcgagagcaccatggagcacgacaacaccaagctgaaggccgccaccgtggagaacgccgtgctgctggagaccaacaccgtggaggagaagaacgtggagatcaacctggagagcaaggagaacaccccccccgtggtgatcagcgccgaccagatggtgaacgaggacagccaggtgcagatcacccccaaccagaagaccctgagaagaagcagcagaagaagaagcgaggtggtggagagcaccaccgagagccaggacaaggagaacagccaccagaagaaggagagaagaaaggaggaggagaagcccctgcagaagagccccctgcacatcaaggacgacgtgctgcccaagcagaagctgatcgccgagcagaccctgcaggagaacctgatcgagaagggcagcaacctgcacgagaagaccctgggcgagaccagcgccaacgccgagaccgagcagaacaagaagaaggccgaccccgagaacatcaagagcgagggcgacggcacccaggacatcgtggacaagagcagcgagaagctggtgagaggcagaaccagataccagaccagaagagccagccagggcctgctgagcagcatcgagaacagcgagagcgacagcagcgaggccaaggaggagggcagcagaaagaagagaagcggcaagtggaagaacaagagcaacgagagcgtggacatccaggaccaggaggagaaggtggtgaagcaggagtgcatcaaggccgagaaccagagccacgactacaaggccaccagcgaggaggacgtgagcatcaagagccccatctgcgagaagcaggacgagagcaacaccgtgatctgccaggacagcaccgtgaccagcgacctgctgcaggtgcccgacgacctgcccaacgtgtgcgaggagaagaacgagaccagcaagtacgccgagtacagcttcaccagcctgcccgtgcccgagagcaacctgagaaccagaaacgccatcaagagactgcacaagagagacagcttcgacaactgcagcctgggcgagagcagcaagatcggcatcagcgacatcagcagcctgagcgagaagaccttccagaccctggagtgccagcacaagagaagcagaagagtgagaagaagcaagggctgcgactgctgcggcgagaagagccagccccaggagaagagcctgatcggcctgaagaacaccgagaacaacgacgtggagatcagcgagaccaagaaggccgacgtgcaggcccccgtgagccccagcgagaccagccaggccaacccctacagcgagggccagttcctggacgagcaccacagcgtgaacttccacctgggcctgaaggaggacaacgacaccatcaacgacagcctgatcgtgagcgagaccaagagcaaggagaacaccatgcaggagagcctgcccagcggcatcgtgaacttcagagaggagatctgcgacatggacagcagcgaggccatgagcctggagagccaggagagccccaacgagaacttcaagaccgtgggcccctgcctgggcgacagcaagaacgtgagccaggagagcctggagaccaaggaggagaagcccgaggagacccccaagatggagctgagcctggagaacgtgaccgtggagggcaacgcctgcaaggtgaccgagagcaacctggagaaggccaagaccatggagctgaacgtgggcaacgaggccagcttccacggccaggagagaaccaagaccggcatcagcgaggaggccgccatcgaggagaacaagagaaacgacgacagcgaggccgacaccgccaagctgaacgccaaggaggtggccaccgaggagttcaacagcgacatcagcctgagcgacaacaccacccccgtgaagctgaacgcccagaccgagatcagcgagcagaccgccgccggcgagctggacggcggcaacgacgtgagcgacctgcacagcagcgaggagaccaacaccaagatgaagaacaacgaggagatgatgatcggcgaggccatggccgagaccggccacgacggcgagaccgagaacgagggcatcaccaccaagaccagcaagcccgacgaggccgagaccaacatgctgaccgccgagatggacaacttcgtgtgcgacaccgtggagatgagcaccgaggagggcatcatcgacgccaacaagaccgagaccaacaccgagtacagcaagagcgaggagaagctggacaacaaccagatggtgatggagagcgacatcctgcaggaggaccaccacaccagccagaaggtggaggagcccagccagtgcctggccagcggcaccgccatcagcgagctgatcatcgaggacaacaacgccagcccccagaagctgagagagctggaccccagcctggtgagcgccaacgacagccccagcggcatgcagaccagatgcgtgtggagccccctggccagccccagcaccagcatcctgaagagaggcctgaagagaagccaggaggacgagatcagcagccccgtgaacaaggtgagaagagtgagcttcgccgaccccatctaccaggccggcctggccgacgacatcgacagaagatgcagcatcgtgagaagccacagcagcaacagcagccccatcggcaagagcgtgaagaccagccccaccacccagagcaagatcagcgagatggccaaggagagcatcccctgccccaccgagagcgtgtacccccccctggtgaactgcgtggcccccgtggacatcatcctgccccagatcaccagcaacatgtgggccagaggcctgggccagctgatcagagccaagaacatcaagaccatcggcgacctgagcaccctgaccgccagcgagatcaagaccctgcccatcagaagccccaaggtgagcaacgtgaagaaggccctgagaatctaccacgagcagcaggtgaagaccagaggcctggaggagatccccgtgttcgacatcagcgagaagaccgtgaacggcatcgagaacaagagcctgagccccgacgaggagagactggtgagcgacatcatcgaccccgtggccctggagatccccctgagcaagaacctgctggcccagatcagcgccctggccctgcagctggacagcgaggacctgcacaactacagcggcagccagctgttcgagatgcacgagaagctgagctgcatggccaacagcgtgatcaagaacctgcagagcagatggagaagccccagccacgagaacagcatctag

SEQ ID NO: 12570 - DNA, 7341 bp, synthetic construct; identical to SEQ ID NO: 12569
  misc_feature 1..7341: note = Description of Artificial Sequence: Synthetic coding sequence
  source 1..7341: mol_type = other DNA

SEQ ID NO: 12571 - DNA, 1026 bp, synthetic construct
  misc_feature 1..1026: note = Description of Artificial Sequence: Synthetic coding sequence
  source 1..1026: mol_type = other DNA
atgaccgccagaggccagagccccctggcccccctgctggagaccctggaggaccccagcgccagccacggcggccagaccgacgcctacctgaccctgaccagcagaatgaccggcgaggagggcaaggaggtgatcaccgagatcgagaagaagctgcccagactgtacaaggtgctgaagacccacatcagcagccagaacagcgagctgagcagcgccgccctgcaggccctgggcttctgcctgtacaaccccaagatcaccagcgagctgagcgaggccaacgccctggagctgctgagcaagctgaacgacaccatcaagaacagcgacaagaacgtgagaaccagagccctgtgggtgatcagcaagcagaccttccccagcgaggtggtgggcaagatggtgagcagcatcatcgacagcctggagatcctgttcaacaagggcgagacccacagcgccgtggtggacttcgaggccctgaacgtgatcgtgagactgatcgagcaggcccccatccagatgggcgaggaggccgtgagatgggccaagctggtgatccccctggtggtgcacagcgcccagaaggtgcacctgagaggcgccaccgccctggagatgggcatgcccctgctgctgcagaagcagcaggagatcgccagcatcaccgagcagctgatgaccaccaccctgcacagaagcggcagcttcatcaacagcctgctgcagctggaggagctgggcttcagaagcggcgcccccatgatcaagaagatcgccttcatcgcctggaagagcctgatcgacaacttcgccctgaaccccgacatcctgtgcagcgccaagagactgaagctgctgatgcagcccctgagcagcatccacgtgagaaccgagaccctggccctgaccaagctggaggtgtggtggtacctgctgatgagactgggcccccacctgcccgccaacttcgagcaggtgctgccccccagaaccgagcccagagagctgcccgagtag

SEQ ID NO: 12572 - DNA, 7419 bp, synthetic construct; identical to SEQ ID NO: 12567
  misc_feature 1..7419: note = Description of Artificial Sequence: Synthetic coding sequence
  source 1..7419: mol_type = other DNA

SEQ ID NO: 12573 - DNA, 7341 bp, synthetic construct; identical to SEQ ID NO: 12569
  misc_feature 1..7341: note = Description of Artificial Sequence: Synthetic coding sequence
  source 1..7341: mol_type = other DNA

SEQ ID NO: 12574 - DNA, 555 bp, synthetic construct
  misc_feature 1..555: note = Description of Artificial Sequence: Synthetic coding sequence
  source 1..555: mol_type = other DNA
atgagagagtacaagctggtggtgctgggcagcggcggcgtgggcaagagcgccctgaccgtgcagttcgtgcagggcatcttcgtggagaagtacgaccccaccatcgaggacagctacagaaagcaggtggaggtggactgccagcagtgcatgctggagatcctggacaccgccggcaccgagcagttcaccgccatgagagacctgtacatgaagaacggccagggcttcgccctggtgtacagcatcaccgcccagagcaccttcaacgacctgcaggacctgagagagcagatcctgagagtgaaggacaccgaggacgtgcccatgatcctggtgggcaacaagtgcgacctggaggacgagagagtggtgggcaaggagcagggccagaacctggccagacagtggtgcaactgcgccttcctggagagcagcgccaagagcaagatcaacgtgaacgagatcttctacgacctggtgagacagatcaacagaaagacccccgtggagaagaagaagcccaagaagaagagctgcctgctgctgtag

SEQ ID NO: 12575 - DNA, 555 bp, synthetic construct; identical to SEQ ID NO: 12574
  misc_feature 1..555: note = Description of Artificial Sequence: Synthetic coding sequence
  source 1..555: mol_type = other DNA

SEQ ID NO: 12576 - DNA, 390 bp, synthetic construct
  misc_feature 1..390: note = Description of Artificial Sequence: Synthetic coding sequence
  source 1..390: mol_type = other DNA
atgagagagtacaagctggtggtgctgggcagcggcggcgtgggcaagagcgccctgaccgtgcagttcgtgcagggcatcttcgtggagaagtacgaccccaccatcgaggacagctacagaaagcaggtggaggtggactgccagcagtgcatgctggagatcctggacaccgccggcaccgagcagttcaccgccatgagagacctgtacatgaagaacggccagggcttcgccctggtgtacagcatcaccgcccagagcaccttcaacgacctgcaggacctgagagagcagatcctgagagtgaaggacaccgaggacgtgcccatgatcctggtgggcaacaagtgcgacctggaggacgagagagtggtgggcaaggagtag

SEQ ID NO: 12577 - DNA, 555 bp, synthetic construct; identical to SEQ ID NO: 12574
  misc_feature 1..555: note = Description of Artificial Sequence: Synthetic coding sequence
  source 1..555: mol_type = other DNA

SEQ ID NO: 12578 - DNA, 555 bp, synthetic construct; identical to SEQ ID NO: 12574
  misc_feature 1..555: note = Description of Artificial Sequence: Synthetic coding sequence
  source 1..555: mol_type = other DNA

SEQ ID NO: 12579 - DNA, 1380 bp, synthetic construct
  misc_feature 1..1380: note = Description of Artificial Sequence: Synthetic coding sequence
  source 1..1380: mol_type = other DNA
atgagagcccagatcgaggtgatcccctgcaagatctgcggcgacaagagcagcggcatccactacggcgtgatcacctgcgagggctgcaagggcttcttcagaagaagccagcagaacaacgccagctacagctgccccagacagagaaactgcctgatcgacagaaccaacagaaacagatgccagcactgcagactgcagaagtgcctggccctgggcatgagcagagacgccgtgaagttcggcagaatgagcaagaagcagagagacagcctgtacgccgaggtgcagaagcaccagcagagactgcaggagcagagacagcagcagagcggcgaggccgaggccctggccagagtgtacagcagcagcatcagcaacggcctgagcaacctgaacaacgagaccagcggcacctacgccaacggccacgtgatcgacctgcccaagagcgagggctactacaacgtggacagcggccagcccagccccgaccagagcggcctggacatgaccggcatcaagcagatcaagcaggagcccatctacgacctgaccagcgtgcccaacctgttcacctacagcagcttcaacaacggccagctggcccccggcatcaccatgaccgagatcgacagaatcgcccagaacatcatcaagagccacctggagacctgccagtacaccatggaggagctgcaccagctggcctggcagacccacacctacgaggagatcaaggcctaccagagcaagagcagagaggccctgtggcagcagtgcgccatccagatcacccacgccatccagtacgtggtggagttcgccaagagaatcaccggcttcatggagctgtgccagaacgaccagatcctgctgctgaagagcggctgcctggaggtggtgctggtgagaatgtgcagagccttcaaccccctgaacaacaccgtgctgttcgagggcaagtacggcggcatgcagatgttcaaggccctgggcagcgacgacctggtgaacgaggccttcgacttcgccaagaacctgtgcagcctgcagctgaccgaggaggagatcgccctgttcagcagcgccgtgctgatcagccccgacagagcctggctgatcgagcccagaaaggtgcagaagctgcaggagaagatctacttcgccctgcagcacgtgatccagaagaaccacctggacgacgagaccctggccaagctgatcgccaagatccccaccatcaccgccgtgtgcaacctgcacggcgagaagctgcaggtgttcaagcagagccaccccgagatcgtgaacaccctgttcccccccctgtacaaggagctgttcaaccccgactgcgccaccggctgcaagtag

SEQ ID NO: 12580 - DNA, 1413 bp, synthetic construct
  misc_feature 1..1413: note = Description of Artificial Sequence: Synthetic coding sequence
  source 1..1413: mol_type = other DNA
atgtgcgagaaccagctgaagaccaaggccgacgccaccgcccagatcgaggtgatcccctgcaagatctgcggcgacaagagcagcggcatccactacggcgtgatcacctgcgagggctgcaagggcttcttcagaagaagccagcagaacaacgccagctacagctgccccagacagagaaactgcctgatcgacagaaccaacagaaacagatgccagcactgcagactgcagaagtgcctggccctgggcatgagcagagacgccgtgaagttcggcagaatgagcaagaagcagagagacagcctgtacgccgaggtgcagaagcaccagcagagactgcaggagcagagacagcagcagagcggcgaggccgaggccctggccagagtgtacagcagcagcatcagcaacggcctgagcaacctgaacaacgagaccagcggcacctacgccaacggccacgtgatcgacctgcccaagagcgagggctactacaacgtggacagcggccagcccagccccgaccagagcggcctggacatgaccggcatcaagcagatcaagcaggagcccatctacgacctgaccagcgtgcccaacctgttcacctacagcagcttcaacaacggccagctggcccccggcatcaccatgaccgagatcgacagaatcgcccagaacatcatcaagagccacctggagacctgccagtacaccatggaggagctgcaccagctggcctggcagacccacacctacgaggagatcaaggcctaccagagcaagagcagagaggccctgtggcagcagtgcgccatccagatcacccacgccatccagtacgtggtggagttcgccaagagaatcaccggcttcatggagctgtgccagaacgaccagatcctgctgctgaagagcggctgcctggaggtggtgctggtgagaatgtgcagagccttcaaccccctgaacaacaccgtgctgttcgagggcaagtacggcggcatgcagatgttcaaggccctgggcagcgacgacctggtgaacgaggccttcgacttcgccaagaacctgtgcagcctgcagctgaccgaggaggagatcgccctgttcagcagcgccgtgctgatcagccccgacagagcctggctgatcgagcccagaaaggtgcagaagctgcaggagaagatctacttcgccctgcagcacgtgatccagaagaaccacctggacgacgagaccctggccaagctgatcgccaagatccccaccatcaccgccgtgtgcaacctgcacggcgagaagctgcaggtgttcaagcagagccaccccgagatcgtgaacaccctgttcccccccctgtacaaggagctgttcaaccccgactgcgccaccggctgcaagtag

SEQ ID NO: 12581 - DNA, 813 bp, synthetic construct
  misc_feature 1..813: note = Description of Artificial Sequence: Synthetic coding sequence
  source 1..813: mol_type = other DNA
atgggcgaggccgaggcccccagcttcgagatgacctggagcagcaccaccagcagcggctactgcagccaggaggacagcgacagcgagctggagcagtacttcaccgccagaaccagcctggccagaagacccagaagagaccaggacgagcccgtggagtgggagacccccgacctgagccaggccgagatcgagcagaagatcaaggagtacaacgcccagatcaacagcaacctgttcatgagcctgaacaaggacggcagctacaccggcttcatcaaggtgcagctgaagctggtgagacccgtgagcgtgcccagcagcaagaagccccccagcctgcaggacgccagaagaggccccggcagaggcaccagcgtgagaagaagaaccagcttctacctgcccaaggacgccgtgaagcacctgcacgtgctgagcagaaccagagccagagaggtgatcgaggccctgctgagaaagttcctggtggtggacgaccccagaaagttcgccctgttcgagagagccgagagacacggccaggtgtacctgagaaagctgctggacgacgagcagcccctgagactgagactgctggccggccccagcgacaaggccctgagcttcgtgctgaaggagaacgacagcggcgaggtgaactgggacgccttcagcatgcccgagctgcacaacttcctgagaatcctgcagagagaggaggaggagcacctgagacagatcctgcagaagtacagctactgcagacagaagatccaggaggccctgcacgcctgccccctgggctag

SEQ ID NO: 12582 - DNA, 1035 bp, synthetic construct
  misc_feature 1..1035: note = Description of Artificial Sequence: Synthetic coding sequence
  source 1..1035: mol_type = other DNA
atgagcggcgagcccgagctgatcgagctgagagagctggcccccgccggcagagccggcaagggcagaaccagactggagagagccaacgccctgagaatcgccagaggcaccgcctgcaaccccaccagacagctggtgcccggcagaggccacagattccagcccgccggccccgccacccacacctggtgcgacctgtgcggcgacttcatctggggcgtggtgagaaagggcctgcagtgcgccagactgagcgccgactgcaagttcacctgccactacagatgcagagccctggtgtgcctggactgctgcggccccagagacctgggctgggagcccgccgtggagagagacaccaacgtggacgagcccgtggagtgggagacccccgacctgagccaggccgagatcgagcagaagatcaaggagtacaacgcccagatcaacagcaacctgttcatgagcctgaacaaggacggcagctacaccggcttcatcaaggtgcagctgaagctggtgagacccgtgagcgtgcccagcagcaagaagccccccagcctgcaggacgccagaagaggccccggcagaggcaccagcgtgagaagaagaaccagcttctacctgcccaaggacgccgtgaagcacctgcacgtgctgagcagaaccagagccagagaggtgatcgaggccctgctgagaaagttcctggtggtggacgaccccagaaagttcgccctgttcgagagagccgagagacacggccaggtgtacctgagaaagctgctggacgacgagcagcccctgagactgagactgctggccggccccagcgacaaggccctgagcttcgtgctgaaggagaacgacagcggcgaggtgaactgggacgccttcagcatgcccgagctgcacaacttcctgagaatcctgcagagagaggaggaggagcacctgagacagatcctgcagaagtacagctactgcagacagaagatccaggaggccctgcacgcctgccccctgggctag

SEQ ID NO: 12583 - DNA, 1023 bp, synthetic construct
  misc_feature 1..1023: note = Description of Artificial Sequence: Synthetic coding sequence
  source 1..1023: mol_type = other DNA
atgagcggcgagcccgagctgatcgagctgagagagctggcccccgccggcagagccggcaagggcagaaccagactggagagagccaacgccctgagaatcgccagaggcaccgcctgcaaccccaccagacagctggtgcccggcagaggccacagattccagcccgccggccccgccacccacacctggtgcgacctgtgcggcgacttcatctggggcgtggtgagaaagggcctgcagtgcgcccactgcaagttcacctgccactacagatgcagagccctggtgtgcctggactgctgcggccccagagacctgggctgggagcccgccgtggagagagacaccaacgtggacgagcccgtggagtgggagacccccgacctgagccaggccgagatcgagcagaagatcaaggagtacaacgcccagatcaacagcaacctgttcatgagcctgaacaaggacggcagctacaccggcttcatcaaggtgcagctgaagctggtgagacccgtgagcgtgcccagcagcaagaagccccccagcctgcaggacgccagaagaggccccggcagaggcaccagcgtgagaagaagaaccagcttctacctgcccaaggacgccgtgaagcacctgcacgtgctgagcagaaccagagccagagaggtgatcgaggccctgctgagaaagttcctggtggtggacgaccccagaaagttcgccctgttcgagagagccgagagacacggccaggtgtacctgagaaagctgctggacgacgagcagcccctgagactgagactgctggccggccccagcgacaaggccctgagcttcgtgctgaaggagaacgacagcggcgaggtgaactgggacgccttcagcatgcccgagctgcacaacttcctgagaatcctgcagagagaggaggaggagcacctgagacagatcctgcagaagtacagctactgcagacagaagatccaggaggccctgcacgcctgccccctgggctag

SEQ ID NO: 12584 - DNA, 570 bp, synthetic construct
  misc_feature 1..570: note = Description of Artificial Sequence: Synthetic coding sequence
  source 1..570: mol_type = other DNA
atgagcctgaacaaggacggcagctacaccggcttcatcaaggtgcagctgaagctggtgagacccgtgagcgtgcccagcagcaagaagccccccagcctgcaggacgccagaagaggccccggcagaggcaccagcgtgagaagaagaaccagcttctacctgcccaaggacgccgtgaagcacctgcacgtgctgagcagaaccagagccagagaggtgatcgaggccctgctgagaaagttcctggtggtggacgaccccagaaagttcgccctgttcgagagagccgagagacacggccaggtgtacctgagaaagctgctggacgacgagcagcccctgagactgagactgctggccggccccagcgacaaggccctgagcttcgtgctgaaggagaacgacagcggcgaggtgaactgggacgccttcagcatgcccgagctgcacaacttcctgagaatcctgcagagagaggaggaggagcacctgagacagatcctgcagaagtacagctactgcagacagaagatccaggaggccctgcacgcctgccccctgggctag

SEQ ID NO: 12585 - DNA, 981 bp, synthetic construct
  misc_feature 1..981: note = Description of Artificial Sequence: Synthetic coding sequence
  source 1..981: mol_type = other DNA
atggactacagccaccagaccagcctggtgccctgcggccaggacaagtacatcagcaagaacgagctgctgctgcacctgaagacctacaacctgtactacgagggccagaacctgcagctgagacacagagaggaggaggacgagttcatcgtggagggcctgctgaacatcagctggggcctgagaagacccatcagactgcagatgcaggacgacaacgagagaatcagacccccccccagcagcagcagctggcacagcggctgcaacctgggcgcccagggcaccaccctgaagcccctgaccgtgcccaaggtgcagatcagcgaggtggacgccccccccgagggcgaccagatgcccagcagcaccgacagcagaggcctgaagcccctgcaggaggacaccccccagctgatgagaaccagaagcgacgtgggcgtgagaagaagaggcaacgtgagaacccccagcgaccagagaagaatcagaagacacagattcagcatcaacggccacttctacaaccacaagaccagcgtgttcacccccgcctacggcagcgtgaccaacgtgagaatcaacagcaccatgaccaccccccaggtgctgaagctgctgctgaacaagttcaagatcgagaacagcgccgaggagttcgccctgtacgtggtgcacaccagcggcgagaagcagaagctgaaggccaccgactaccccctgatcgccagaatcctgcagggcccctgcgagcagatcagcaaggtgttcctgatggagaaggaccaggtggaggaggtgacctacgacgtggcccagtacatcaagttcgagatgcccgtgctgaagagcttcatccagaagctgcaggaggaggaggacagagaggtgaagaagctgatgagaaagtacaccgtgctgagactgatgatcagacagagactggaggagatcgccgagacccccgccaccatctag

SEQ ID NO: 12586 - DNA, 981 bp, synthetic construct; identical to SEQ ID NO: 12585
  misc_feature 1..981: note = Description of Artificial Sequence: Synthetic coding sequence
  source 1..981: mol_type = other DNA

SEQ ID NO: 12587 - DNA, 993 bp, synthetic construct
  misc_feature 1..993: note = Description of Artificial Sequence: Synthetic coding sequence
  source 1..993: mol_type = other DNA
atgaaggaggactgcctgcccagcagccacgtgcccatcagcgacagcaagagcatccagaagagagacgtgcagggcctgagcgaggagggcaccctgatcatcgagggcctgctgaacatcgcctggggcctgagaagacccatcagactgcagatgcaggacgacagagagcaggtgcacctgcccagcaccagctggatgcccagaagacccagctgccccctgggctgctggagcctgctgctgggcctgagcagcctgagcctgcccgccgccatcagcgccctgcagctgagcgtgttcagaaaggagcccagcccccagaacggcaacatcaccgcccagggccccagcatccagcccgtgcacaaggccgagagcagcaccgacagcagcggccccctggaggaggccgaggaggccccccagctgatgagaaccaagagcgacgccagctgcatgagccagagaagacccaagtgcagagcccccggcgaggcccagagaatcagaagacacagattcagcatcaacggccacttctacaaccacaagaccagcgtgttcacccccgcctacggcagcgtgaccaacgtgagagtgaacagcaccatgaccaccctgcaggtgctgaccctgctgctgaacaagttcagagtggaggacggccccagcgagttcgccctgtacatcgtgcacgagagcggcgagagaaccaagctgaaggactgcgagtaccccctgatcagcagaatcctgcacggcccctgcgagaagatcgccagaatcttcctgatggaggccgacctgggcgtggaggtgccccacgaggtggcccagtacatcaagttcgagatgcccgtgctggacagcttcgtggagaagctgaaggaggaggaggagagagagatcatcaagctgaccatgaagttccaggccctgagactgaccatgctgcagagactggagcagctggtggaggccaagtag

SEQ ID NO: 12588 - DNA, 966 bp, synthetic construct
  misc_feature 1..966: note = Description of Artificial Sequence: Synthetic coding sequence
  source 1..966: mol_type = other DNA
atgaaggaggactgcctgcccagcagccacgtgcccatcagcgacagcaagagcatccagaagagcgagctgctgggcctgctgaagacctacaactgctaccacgagggcaagagcttccagctgagacacagagaggaggagggcaccctgatcatcgagggcctgctgaacatcgcctggggcctgagaagacccatcagactgcagatgcaggacgacagagagcaggtgcacctgcccagcaccagctggatgcccagaagacccagctgccccctgaaggagcccagcccccagaacggcaacatcaccgcccagggccccagcatccagcccgtgcacaaggccgagagcagcaccgacagcagcggccccctggaggaggccgaggaggccccccagctgatgagaaccaagagcgacgccagctgcatgagccagagaagacccaagtgcagagcccccggcgaggcccagagaatcagaagacacagattcagcatcaacggccacttctacaaccacaagaccagcgtgttcacccccgcctacggcagcgtgaccaacgtgagagtgaacagcaccatgaccaccctgcaggtgctgaccctgctgctgaacaagttcagagtggaggacggccccagcgagttcgccctgtacatcgtgcacgagagcggcgagagaaccaagctgaaggactgcgagtaccccctgatcagcagaatcctgcacggcccctgcgagaagatcgccagaatcttcctgatggaggccgacctgggcgtggaggtgccccacgaggtggcccagtacatcaagttcgagatgcccgtgctggacagcttcgtggagaagctgaaggaggaggaggagagagagatcatcaagctgaccatgaagttccaggccctgagactgaccatgctgcagagactggagcagctggtggaggccaagtag

SEQ ID NO: 12589 - DNA, 1239 bp, synthetic construct
  misc_feature 1..1239: note = Description of Artificial Sequence: Synthetic coding sequence
  source 1..1239: mol_type = other DNA
ggcagcaacgccggcggcggccagggcggctgccagggcctgacctgcgacagcgagagcgtgggcaccctggacatcctggaccagacccaggcctgccccgtgagcctggccagcagcagcgccagacccccctgccccccccccggcccctgcgccgagcccagcggctgcatcgccatggccgtgtggagccccctggtgatgcccggcagaagagagggctgctgccacacccccgtgaccaacgaggagaccgaggccagagaggccaagggccagaagctgagaccctgccacaccctgggcgtgcacgtgtgcctgagcctgttcagaagcgagctgctgggcctgctgaagacctacaactgctaccacgagggcaagagcttccagctgagacacagagaggaggagggcaccctgatcatcgagggcctgctgaacatcgcctggggcctgagaagacccatcagactgcagatgcaggacgacagagagcaggtgcacctgcccagcaccagctggatgcccagaagacccagctgccccctgaaggagcccagcccccagaacggcaacatcaccgcccagggccccagcatccagcccgtgcacaaggccgagagcagcaccgacagcagcggccccctggaggaggccgaggaggccccccagctgatgagaaccaagagcgacgccagctgcatgagccagagaagacccaagtgcagagcccccggcgaggcccagagaatcagaagacacagattcagcatcaacggccacttctacaaccacaagaccagcgtgttcacccccgcctacggcagcgtgaccaacgtgagagtgaacagcaccatgaccaccctgcaggtgctgaccctgctgctgaacaagttcagagtggaggacggccccagcgagttcgccctgtacatcgtgcacgagagcggcgagagaaccaagctgaaggactgcgagtaccccctgatcagcagaatcctgcacggcccctgcgagaagatcgccagaatcttcctgatggaggccgacctgggcgtggaggtgccccacgaggtggcccagtacatcaagttcgagatgcccgtgctggacagcttcgtggagaagctgaaggaggaggaggagagagagatcatcaagctgaccatgaagttccaggccctgagactgaccatgctgcagagactggagcagctggtggaggccaagtag

SEQ ID NO: 12590 - DNA, 393 bp, synthetic construct
  misc_feature 1..393: note = Description of Artificial Sequence: Synthetic coding sequence
  source 1..393: mol_type = other DNA
atgaaggaggactgcctgcccagcagccacgtgcccatcagcgacagcaagagcatccagaagagcgagctgctgggcctgctgaagacctacaactgctaccacgagggcaagagcttccagctgagacacagagaggaggagggcaccctgatcatcgagggcctgctgaacatcgcctggggcctgagaagacccatcagactgcagatgcaggacgacagagagcaggtgcacctgcccagcaccagctggatgcccagaagacccagctgccccctgcacctggccggcaagaagggcagactgcagcccggcggcctgcccacccccatgcaggccgagcacgtgagccccagcctggtgctgagcctgaagttcaccagaatctag

SEQ ID NO: 12591 - DNA, 381 bp, synthetic construct
  misc_feature 1..381: note = Description of Artificial Sequence: Synthetic coding sequence
  source 1..381: mol_type = other DNA
atgaaggaggactgcctgcccagcagccacgtgcccatcagcgacagcaagagcatccagaagagcgagctgctgggcctgctgaagacctacaactgctaccacgagggcaagagcttccagctgagacacagagaggaggagggcaccctgatcatcgagggcctgctgaacatcgcctggggcctgagaagacccatcagactgcagatgcaggacgacagagagcaggtgcacctgcccagcaccagctggatgcccagaagacccagctgccccctggcccccggcggcggcagaggcggcccccccgccgacgccgaccaggagagaagacagctgcacgagcccgaggaggcccaggtgcccagacccagatag

SEQ ID NO: 12592 - DNA, 456 bp, synthetic construct
  misc_feature 1..456: note = Description of Artificial Sequence: Synthetic coding sequence
  source 1..456: mol_type = other DNA
atgaaggaggactgcctgcccagcagccacgtgcccatcagcgacagcaagagcatccagaagagcgagctgctgggcctgctgaagacctacaactgctaccacgagggcaagagcttccagctgagacacagagaggaggagggcaccctgatcatcgagggcctgctgaacatcgcctggggcctgagaagacccatcagactgcagatgcaggacgacagagagcaggtgcacctgcccagcaccagctggatgcccagaagacccagctgccccctgggctgctggagcctgctgctgggcctgagcagcctgagcctgcccgccgccatcagcgccctgcagctgagcgtgttcagaaaggagcccagcccccagaacggcaacatcaccgcccagggccccagcatccagcccgtgcacaaggccgagagcagcaccgacagcagctag

SEQ ID NO: 12593 - DNA, 372 bp, synthetic construct
  misc_feature 1..372: note = Description of Artificial Sequence: Synthetic coding sequence
  source 1..372: mol_type = other DNA
agcagccacgtgcccatcagcgacagcaagagcatccagaagagcgagctgctgggcctgctgaagacctacaactgctaccacgagggcaagagcttccagctgagacacagagaggaggagggcaccctgatcatcgagggcctgctgaacatcgcctggggcctgagaagacccatcagactgcagatgcaggacgacagagagcaggtgcacctgcccagcaccagctggatgcccagaagacccagctgccccctgcacctggccggcaagaagggcagactgcagcccggcggcctgcccacccccatgcaggccgagcacgtgagccccagcctggtgctgagcctgaagttcaccagaatctag

SEQ ID NO: 12594 - DNA, 798 bp, synthetic construct
  misc_feature 1..798: note = Description of Artificial Sequence: Synthetic coding sequence
  source 1..798: mol_type = other DNA
atgaccgtggacagcagcatgagcagcggctactgcagcctggacgaggagctggaggactgcttcttcaccgccaagaccaccttcttcagaaacgcccagagcaagcacctgagcaagaacgtgtgcaagcccgtggaggagacccagagaccccccaccctgcaggagatcaagcagaagatcgacagctacaacaccagagagaagaactgcctgggcatgaagctgagcgaggacggcacctacaccggcttcatcaaggtgcacctgaagctgagaagacccgtgaccgtgcccgccggcatcagaccccagagcatctacgacgccatcaaggaggtgaacctggccgccaccaccgacaagagaaccagcttctacctgcccctggacgccatcaagcagctgcacatcagcagcaccaccaccgtgagcgaggtgatccagggcctgctgaagaagttcatggtggtggacaacccccagaagttcgccctgttcaagagaatccacaaggacggccaggtgctgttccagaagctgagcatcgccgacagacccctgtacctgagactgctggccggccccgacaccgaggtgctgagcttcgtgctgaaggagaacgagaccggcgaggtggagtgggacgccttcagcatccccgagctgcagaacttcctgaccatcctggagaaggaggagcaggacaagatccagcaggtgcagaagaagtacgacaagttcagacagaagctggaggaggccctgagagagagccagggcaagcccggctag

SEQ ID NO: 12595 - DNA, 1179 bp, synthetic construct
  misc_feature 1..1179: note = Description of Artificial Sequence: Synthetic coding sequence
  source 1..1179: mol_type = other DNA
atggccatggccagccccgccatcggccagagaccctaccccctgctgctggaccccgagccccccagatacctgcagagcctgagcggccccgagctgcccccccccccccccgacagaagcagcagactgtgcgtgcccgcccccctgagcaccgcccccggcgccagagagggcagaagcgccagaagagccgccagaggcaacctggagcccccccccagagccagcagacccgccagacccctgagacccggcctgcagcagagactgagaagaagacccggcgcccccagacccagagacgtgagaagcatcttcgagcagccccaggaccccagagtgcccgccgagagaggcgagggccactgcttcgccgagctggtgctgcccggcggccccggctggtgcgacctgtgcggcagagaggtgctgagacaggccctgagatgcaccaactgcaagttcacctgccaccccgagtgcagaagcctgatccagctggactgcagccagcaggagggcctgagcagagacagacccagccccgagagcaccctgaccgtgaccttcagccagaacgtgtgcaagcccgtggaggagacccagagaccccccaccctgcaggagatcaagcagaagatcgacagctacaacaccagagagaagaactgcctgggcatgaagctgagcgaggacggcacctacaccggcttcatcaaggtgcacctgaagctgagaagacccgtgaccgtgcccgccggcatcagaccccagagcatctacgacgccatcaaggaggtgaacctggccgccaccaccgacaagagaaccagcttctacctgcccctggacgccatcaagcagctgcacatcagcagcaccaccaccgtgagcgaggtgatccagggcctgctgaagaagttcatggtggtggacaacccccagaagttcgccctgttcaagagaatccacaaggacggccaggtgctgttccagaagctgagcatcgccgacagacccctgtacctgagactgctggccggccccgacaccgaggtgctgagcttcgtgctgaaggagaacgagaccggcgaggtggagtgggacgccttcagcatccccgagctgcagaacttcctgagcagctggtgcatccagatctacctgtactactag

SEQ ID NO: 12596 - DNA, 1257 bp, synthetic construct
  misc_feature 1..1257: note = Description of Artificial Sequence: Synthetic coding sequence
  source 1..1257: mol_type = other DNA
atggccatggccagccccgccatcggccagagaccctaccccctgctgctggaccccgagccccccagatacctgcagagcctgagcggccccgagctgcccccccccccccccgacagaagcagcagactgtgcgtgcccgcccccctgagcaccgcccccggcgccagagagggcagaagcgccagaagagccgccagaggcaacctggagcccccccccagagccagcagacccgccagacccctgagacccggcctgcagcagagactgagaagaagacccggcgcccccagacccagagacgtgagaagcatcttcgagcagccccaggaccccagagtgcccgccgagagaggcgagggccactgcttcgccgagctggtgctgcccggcggccccggctggtgcgacctgtgcggcagagaggtgctgagacaggccctgagatgcaccaactgcaagttcacctgccaccccgagtgcagaagcctgatccagctggactgcagccagcaggagggcctgagcagagacagacccagccccgagagcaccctgaccgtgaccttcagccagaacgtgtgcaagcccgtggaggagacccagagaccccccaccctgcaggagatcaagcagaagatcgacagctacaacaccagagagaagaactgcctgggcatgaagctgagcgaggacggcacctacaccggcttcatcaaggtgcacctgaagctgagaagacccgtgaccgtgcccgccggcatcagaccccagagcatctacgacgccatcaaggaggtgaacctggccgccaccaccgacaagagaaccagcttctacctgcccctggacgccatcaagcagctgcacatcagcagcaccaccaccgtgagcgaggtgatccagggcctgctgaagaagttcatggtggtggacaacccccagaagttcgccctgttcaagagaatccacaaggacggccaggtgctgttccagaagctgagcatcgccgacagacccctgtacctgagactgctggccggccccgacaccgaggtgctgagcttcgtgctgaaggagaacgagaccggcgaggtggagtgggacgccttcagcatccccgagctgcagaacttcctgaccatcctggagaaggaggagcaggacaagatccagcaggtgcagaagaagtacgacaagttcagacagaagctggaggaggccctgagagagagccagggcaagcccggctag

SEQ ID NO: 12597 - DNA, 1011 bp, synthetic construct
  misc_feature 1..1011: note = Description of Artificial Sequence: Synthetic coding sequence
  source 1..1011: mol_type = other DNA
atggccatggccagccccgccatcggccagagaccctaccccctgctgctggaccccgagccccccagatacctgcagagcctgagcggccccgagctgcccccccccccccccgacagaagcagcagactgtgcgtgcccgcccccctgagcaccgcccccggcgccagagagggcagaagcgccagaagagccgccagaggcaacctggagcccccccccagagccagcagacccgccagacccctgagacccggcctgcagcagagactgagaagaagacccggcgcccccagacccagagacgtgagaagcatcttcgagcagccccaggaccccagagtgcccgccgagagaggcgagggccactgcttcgccgagctggtgctgcccggcggccccggctggtgcgacctgtgcggcagagaggtgctgagacaggccctgagatgcaccaactgcaagttcacctgccaccccgagtgcagaagcctgatccagctggactgcagccagcaggagggcctgagcagagacagacccagccccgagagcaccctgaccgtgaccttcagccagaacgtgtgcaagcccgtggaggagacccagagaccccccaccctgcaggagatcaagcagaagatcgacagctacaacaccagagagaagaactgcctgggcatgaagctgagcgaggacggcacctacaccggcttcatcaaggtgcacctgaagctgagaagacccgtgaccgtgcccgccggcatcagaccccagagcatctacgacgccatcaaggaggtgaacctggccgccaccaccgacaagagaaccagcttctacctgcccctggacgccatcaagcagctgcacatcagcagcaccaccaccgtgagcgaggtgatccagggcctgctgaagaagttcatggtggtggacaacccccagaagttcgccctgttcaagagaatccacaaggacggccaggtgggctgcctgctgcacccctag

SEQ ID NO: 12598 - DNA, 1182 bp, synthetic construct
  misc_feature 1..1182: note = Description of Artificial Sequence: Synthetic coding sequence
  source 1..1182: mol_type = other DNA
atggccatggccagccccgccatcggccagagaccctaccccctgctgctggaccccgagccccccagatacctgcagagcctgagcggccccgagctgcccccccccccccccgacagaagcagcagactgtgcgtgcccgcccccctgagcaccgcccccggcgccagagagggcagaagcgccagaagagccgccagaggcaacctggagcccccccccagagccagcagacccgccagacccctgagacccggcctgcagcagagactgagaagaagacccggcgcccccagacccagagacgtgagaagcatcttcgagcagccccaggaccccagagtgcccgccgagagaggcgagggccactgcttcgccgagctggtgctgcccggcggccccggctggtgcgacctgtgcggcagagaggtgctgagacaggccctgagatgcaccaactgcaagttcacctgccaccccgagtgcagaagcctgatccagctggactgcagccagcaggagggcctgagcagagacagacccagccccgagagcaccctgaccgtgaccttcagccagaacgtgtgcaagcccgtggaggagacccagagaccccccaccctgcaggagatcaagcagaagatcgacagctacaacaccagagagaagaactgcctgggcatgaagctgagcgaggacggcacctacaccggcttcatcaaggtgcacctgaagctgagaagacccgtgaccgtgcccgccggcatcagaccccagagcatctacgacgccatcaaggaggtgaacctggccgccaccaccgacaagagaaccagcttctacctgcccctggacgccatcaagcagctgcacatcagcagcaccaccaccgtgagcgaggtgatccagggcctgctgaagaagttcatggtggtggacaacccccagaagttcgccctgttcaagagaatccacaaggacggccaggtgctgttccagaagctgagcatcgccgacagacccctgtacctgagactgctggccggccccgacaccgaggtgctgagcttcgtgctgaaggagaacgagaccggcgaggtggagtgggacgccttcagcatccccgagctgcagaacttcttcctgagcagctggtgcatccagatctacctgtactactag

SEQ ID NO: 12599 - DNA, 555 bp, synthetic construct
  misc_feature 1..555: note = Description of Artificial Sequence: Synthetic coding sequence
  source 1..555: mol_type = other DNA
atgccccagagcaagagcagaaagatcgccatcctgggctacagaagcgtgggcaagagcagcctgaccatccagttcgtggagggccagttcgtggacagctacgaccccaccatcgagaacaccttcaccaagctgatcaccgtgaacggccaggagtaccacctgcagctggtggacaccgccggccaggacgagtacagcatcttcccccagacctacagcatcgacatcaacggctacatcctggtgtacagcgtgaccagcatcaagagcttcgaggtgatcaaggtgatccacggcaagctgctggacatggtgggcaaggtgcagatccccatcatgctggtgggcaacaagaaggacctgcacatggagagagtgatcagctacgaggagggcaaggccctggccgagagctggaacgccgccttcctggagagcagcgccaaggagaaccagaccgccgtggacgtgttcagaagaatcatcctggaggccgagaagatggacggcgccgccagccagggcaagagcagctgcagcgtgatgtag

SEQ ID NO: 12600 - DNA, 582 bp, synthetic construct
  misc_feature 1..582: note = Description of Artificial Sequence: Synthetic coding sequence
  source 1..582: mol_type = other DNA
atggccgccatcagaaagaagctggtgatcgtgggcgacggcgcctgcggcaagacctgcctgctgatcgtgttcagcaaggaccagttccccgaggtgtacgtgcccaccgtgttcgagaactacgtggccgacatcgaggtggacggcaagcaggtggagctggccctgtgggacaccgccggccaggaggactacgacagactgagacccctgagctaccccgacaccgacgtgatcctgatgtgcttcagcatcgacagccccgacagcctggagaacatccccgagaagtggacccccgaggtgaagcacttctgccccaacgtgcccatcatcctggtgggcaacaagaaggacctgagaaacgacgagcacaccagaagagagctggccaagatgaagcaggagcccgtgaagcccgaggagggcagagacatggccaacagaatcggcgccttcggctacatggagtgcagcgccaagaccaaggacggcgtgagagaggtgttcgagatggccaccagagccgccctgcaggccagaagaggcaagaagaagagcggctgcctggtgctgtag

SEQ ID NO: 12601 - DNA, 591 bp, synthetic construct
  misc_feature 1..591: note = Description of Artificial Sequence: Synthetic coding sequence
  source 1..591: mol_type = other DNA
atggccgccatcagaaagaagctggtggtggtgggcgacggcgcctgcggcaagacctgcctgctgatcgtgttcagcaaggacgagttccccgaggtgtacgtgcccaccgtgttcgagaactacgtggccgacatcgaggtggacggcaagcaggtggagctggccctgtgggacaccgccggccaggaggactacgacagactgagacccctgagctaccccgacaccgacgtgatcctgatgtgcttcagcgtggacagccccgacagcctggagaacatccccgagaagtgggtgcccgaggtgaagcacttctgccccaacgtgcccatcatcctggtggccaacaagaaggacctgagaagcgacgagcacgtgagaaccgagctggccagaatgaagcaggagcccgtgagaaccgacgacggcagagccatggccgtgagaatccaggcctacgactacctggagtgcagcgccaagaccaaggagggcgtgagagaggtgttcgagaccgccaccagagccgccctgcagaagagatacggcagccagaacggctgcatcaactgctgcaaggtgctgtag

SEQ ID NO: 12602 - DNA, 582 bp, synthetic construct
  misc_feature 1..582: note = Description of Artificial Sequence: Synthetic coding sequence
  source 1..582: mol_type = other DNA
atggccgccatcagaaagaagctggtgatcgtgggcgacggcgcctgcggcaagacctgcctgctgatcgtgttcagcaaggaccagttccccgaggtgtacgtgcccaccgtgttcgagaactacatcgccgacatcgaggtggacggcaagcaggtggagctggccctgtgggacaccgccggccaggaggactacgacagactgagacccctgagctaccccgacaccgacgtgatcctgatgtgcttcagcatcgacagccccgacagcctggagaacatccccgagaagtggacccccgaggtgaagcacttctgccccaacgtgcccatcatcctggtgggcaacaagaaggacctgagacaggacgagcacaccagaagagagctggccaagatgaagcaggagcccgtgagaagcgaggagggcagagacatggccaacagaatcagcgccttcggctacctggagtgcagcgccaagaccaaggagggcgtgagagaggtgttcgagatggccaccagagccggcctgcaggtgagaaagaacaagagaagaagaggctgccccatcctgtag

SEQ ID NO: 12603 - DNA, 582 bp, synthetic construct; identical to SEQ ID NO: 12602
  misc_feature 1..582: note = Description of Artificial Sequence: Synthetic coding sequence
  source 1..582: mol_type = other DNA

SEQ ID NO: 12604 - DNA, 582 bp, synthetic construct; identical to SEQ ID NO: 12602
  misc_feature 1..582: note = Description of Artificial Sequence: Synthetic coding sequence
  source 1..582: mol_type = other DNA

SEQ ID NO: 12605 - DNA, 582 bp, synthetic construct; identical to SEQ ID NO: 12602
  misc_feature 1..582: note = Description of Artificial Sequence: Synthetic coding sequence
  source 1..582: mol_type = other DNA

SEQ ID NO: 12606 - DNA, 600 bp, synthetic construct
  misc_feature 1..600: note = Description of Artificial Sequence: Synthetic coding sequence
  source 1..600: mol_type = other DNA
atggccgccatcagaaagaagctggtgatcgtgggcgacggcgcctgcggcaagacctgcctgctgatcgtgttcagcaaggaccagttccccgaggtgtacgtgcccaccgtgttcgagaactacatcgccgacatcgaggtggacggcaagcaggtggagctggccctgtgggacaccgccggccaggaggactacgacagactgagacccctgagctaccccgacaccgacgtgatcctgatgtgcttcagcatcgacagccccgacagcctggagaacatccccgagaagtggacccccgaggtgaagcacttctgccccaacgtgcccatcatcctggtgggcaacaagaaggacctgagaaaggccggcacctggagaaccggcagcgtgcccctggccaccctgagcgcccagcccagacccagaagagagtgcggcagatgcctgagatggcccctgggcctggccagcagaagcgccagaaccagcgtgggcggcgccgtgcccttcagcgagatccccaaggccttccccacctgccccctgcccagccagggctacagaaactacccccccaccacccccgccagctag

SEQ ID NO: 12607 - DNA, 582 bp, synthetic construct; identical to SEQ ID NO: 12602
  misc_feature 1..582: note = Description of Artificial Sequence: Synthetic coding sequence
  source 1..582: mol_type = other DNA

SEQ ID NO: 12608 - DNA, 582 bp, synthetic construct; identical to SEQ ID NO: 12602
  misc_feature 1..582: note = Description of Artificial Sequence: Synthetic coding sequence
  source 1..582: mol_type = other DNA

SEQ ID NO: 12609 - DNA, 582 bp, synthetic construct; identical to SEQ ID NO: 12602
  misc_feature 1..582: note = Description of Artificial Sequence: Synthetic coding sequence
  source 1..582: mol_type = other DNA

SEQ ID NO: 12610 - DNA, 279 bp, synthetic construct
  misc_feature 1..279: note = Description of Artificial Sequence: Synthetic coding sequence
  source 1..279: mol_type = other DNA
atggccgccatcagaaagaagctggtgatcgtgggcgacggcgcctgcggcaagacctgcctgctgatcgtgttcagcaaggaccagttccccgaggtgtacgtgcccaccgtgttcgagaactacatcgccgacatcgaggtggacggcaagcaggtggagctggccctgtgggacaccgccggccaggaggactacgacagactgagacccctgagctaccccgacaccgacgtgatcctgatgtgcttcagcatcgacagccccgacagcctgtag

SEQ ID NO: 12611 - DNA, 570 bp, synthetic construct
  misc_feature 1..570: note = Description of Artificial Sequence: Synthetic coding sequence
  source 1..570: mol_type = other DNA
atggccgccatcagaaagaagctggtgatcgtgggcgacggcgcctgcggcaagacctgcctgctgatcgtgttcagcaaggaccagttccccgaggtgtacgtgcccaccgtgttcgagaactacatcgccgacatcgaggtggacggcaagcaggtggagctggccctgtgggacaccgccggccaggaggactacgacagactgagacccctgagctaccccgacaccgacgtgatcctgatgtgcttcagcatcgacagccccgacagcctggagaacatccccgagaagtggacccccgaggtgaagcacttctgccccaacgtgcccatcatcctggtgggcaacaagaaggacctgagacaggacgagcacaccagaagagagctggccaagatgaagcaggagcccgtgagaagcgaggagggcagagacatggccaacagaatcagcgccttcggctacctggagtgcagcgccaagaccaaggagggcgtgagagaggtgttcgagatggccaccagagccggcctgcaggtgagaaagaacaagagaagaagaggctag

SEQ ID NO: 12612 - DNA, 384 bp, synthetic construct
  misc_feature 1..384: note = Description of Artificial Sequence: Synthetic coding sequence
  source 1..384: mol_type = other DNA
atggccgccatcagaaagaagctggtgatcgtgggcgacggcgcctgcggcaagacctgcctgctgatcgtgttcagcaaggaccagttccccgaggtgtacgtgcccaccgtgttcgagaactacatcgccgacatcgaggtggacggcaagcaggtggagctggccctgtgggacaccgccggccaggaggactacgacagactgagacccctgagctaccccgacaccgacgtgatcctgatgtgcttcagcatcgacagccccgacagcctggagaacatccccgagaagtggacccccgaggtgaagcacttctgccccaacgtgcccatcatcctggtgggcaacaagaaggacctgagacaggacgagcacacctag

SEQ ID NO: 12613 - DNA, 690 bp, synthetic construct
  misc_feature 1..690: note = Description of Artificial Sequence: Synthetic coding sequence
  source 1..690: mol_type = other DNA
atggtgagcatcagcggcggcgacctgcccaccggcctggacttcatcagcgcccccgagcccgccctgagcagctgcagcctgggcaccagcgccggctggagccccaccatggccgccatcagaaagaagctggtgatcgtgggcgacggcgcctgcggcaagacctgcctgctgatcgtgttcagcaaggaccagttccccgaggtgtacgtgcccaccgtgttcgagaactacatcgccgacatcgaggtggacggcaagcaggtggagctggccctgtgggacaccgccggccaggaggactacgacagactgagacccctgagctaccccgacaccgacgtgatcctgatgtgcttcagcatcgacagccccgacagcctggagaacatccccgagaagtggacccccgaggtgaagcacttctgccccaacgtgcccatcatcctggtgggcaacaagaaggacctgagacaggacgagcacaccagaagagagctggccaagatgaagcaggagcccgtgagaagcgaggagggcagagacatggccaacagaatcagcgccttcggctacctggagtgcagcgccaagaccaaggagggcgtgagagaggtgttcgagatggccaccagagccggcctgcaggtgagaaagaacaagagaagaagaggctgccccatctag

SEQ ID NO: 12614 - DNA, 510 bp, synthetic construct
  misc_feature 1..510: note = Description of Artificial Sequence: Synthetic coding sequence
  source 1..510: mol_type = other DNA
atggccgccatcagaaagaagctggtgatcgtgggcgacggcgcctgcggcaagacctgcctgctgatcgtgttcagcaaggaccagttccccgaggtgtacgtgcccaccgtgttcgagaactacatcgccgacatcgaggtggacggcaagcaggtggagctggccctgtgggacaccgccggccaggaggactacgacagactgagacccctgagctaccccgacaccgacgtgatcctgatgtgcttcagcatcgacagccccgacagcctggagaacatccccgagaagtggacccccgaggtgaagcacttctgccccaacgtgcccatcatcctggtgggcaacaagaaggacctgagacaggacgagcacaccagaagagagctggccaagatgaagcaggagcccgtgagaagcgaggagggcagagacatggccaacagaatcagcgccttcggctacctggagtgcagcgccaagaccaaggagggcgtgagagagtag

SEQ ID NO: 12615 - DNA, 3144 bp, synthetic construct
  misc_feature 1..3144: note = Description of Artificial Sequence: Synthetic coding sequence
  source 1..3144: mol_type = other DNA
atgatggccgccgaggccggcagcgaggagggcggccccgtgaccgccggcgccggcggcggcggcgccgccgccggcagcagcgcctaccccgccgtgtgcagagtgaagatccccgccgccctgcccgtggccgccgccccctaccccggcctggtggagaccggcgtggccggcaccctgggcggcggcgccgccctgggcagcgagttcctgggcgccggcagcgtggccggcgccctgggcggcgccggcctgaccggcggcggcaccgccgccggcgtggccggcgccgccgccggcgtggccggcgccgccgtggccggccccagcggcgacatggccctgaccaagctgcccaccagcctgctggccgagaccctgggccccggcggcggcttcccccccctgcccccccccccctacctgccccccctgggcgccggcctgggcaccgtggacgagggcgacagcctggacggccccgagtacgaggaggaggaggtggccatccccctgaccgccccccccaccaaccagtggtaccacggcaagctggacagaaccatcgccgaggagagactgagacaggccggcaagagcggcagctacctgatcagagagagcgacagaagacccggcagcttcgtgctgagcttcctgagccagatgaacgtggtgaaccacttcagaatcatcgccatgtgcggcgactactacatcggcggcagaagattcagcagcctgagcgacctgatcggctactacagccacgtgagctgcctgctgaagggcgagaagctgctgtaccccgtggccccccccgagcccgtggaggacagaagaagagtgagagccatcctgccctacaccaaggtgcccgacaccgacgagatcagcttcctgaagggcgacatgttcatcgtgcacaacgagctggaggacggctggatgtgggtgaccaacctgagaaccgacgagcagggcctgatcgtggaggacctggtggaggaggtgggcagagaggaggacccccacgagggcaagatctggttccacggcaagatcagcaagcaggaggcctacaacctgctgatgaccgtgggccaggtgtgcagcttcctggtgagacccagcgacaacacccccggcgactacagcctgtacttcagaaccaacgagaacatccagagattcaagatctgccccacccccaacaaccagttcatgatgggcggcagatactacaacagcatcggcgacatcatcgaccactacagaaaggagcagatcgtggagggctactacctgaaggagcccgtgcccatgcaggaccaggagcaggtgctgaacgacaccgtggacggcaaggagatctacaacaccatcagaagaaagaccaaggacgccttctacaagaacatcgtgaagaagggctacctgctgaagaagggcaagggcaagagatggaagaacctgtacttcatcctggagggcagcgacgcccagctgatctacttcgagagcgagaagagagccaccaagcccaagggcctgatcgacctgagcgtgtgcagcgtgtacgtggtgcacgacagcctgttcggcagacccaactgcttccagatcgtggtgcagcacttcagcgaggagcactacatcttctacttcgccggcgagacccccgagcaggccgaggactggatgaagggcctgcaggccttctgcaacctgagaaagagcagccccggcaccagcaacaagagactgagacaggtgagcagcctggtgctgcacatcgaggaggcccacaagctgcccgtgaagcacttcaccaacccctactgcaacatctacctgaacagcgtgcaggtggccaagacccacgccagagagggccagaaccccgtgtggagcgaggagttcgtgttcgacgacctgccccccgacatcaacagattcgagatcaccctgagcaacaagaccaagaagagcaaggaccccgacatcctgttcatgagatgccagctgagcagactgcagaagggccacgccaccgacgagtggttcctgctgagcagccacatccccctgaagggcatcgagcccggcagcctgagagtgagagccagatacagcatggagaagatcatgcccgaggaggagtacagcgagttcaaggagctgatcctgcagaaggagctgcacgtggtgtacgccctgagccacgtgtgcggccaggacagaaccctgctggccagcatcctgctgagaatcttcctgcacgagaagctggagagcctgctgctgtgcaccctgaacgacagagagatcagcatggaggacgaggccaccaccctgttcagagccaccaccctggccagcaccctgatggagcagtacatgaaggccaccgccacccagttcgtgcaccacgccctgaaggacagcatcctgaagatcatggagagcaagcagagctgcgagctgagccccagcaagctggagaagaacgaggacgtgaacaccaacctgacccacctgctgaacatcctgagcgagctggtggagaagatcttcatggccagcgagatcctgccccccaccctgagatacatctacggctgcctgcagaagagcgtgcagcacaagtggcccaccaacaccaccatgagaaccagagtggtgagcggcttcgtgttcctgagactgatctgccccgccatcctgaaccccagaatgttcaacatcatcagcgacagccccagccccatcgccgccagaaccctgatcctggtggccaagagcgtgcagaacctggccaacctggtggagttcggcgccaaggagccctacatggagggcgtgaaccccttcatcaagagcaacaagcacagaatgatcatgttcctggacgagctgggcaacgtgcccgagctgcccgacaccaccgagcacagcagaaccgacctgagcagagacctggccgccctgcacgagatctgcgtggcccacagcgacgagctgagaaccctgagcaacgagagaggcgcccagcagcacgtgctgaagaagctgctggccatcaccgagctgctgcagcagaagcagaaccagtacaccaagaccaacgacgtgagatag

SEQ ID NO: 12616 - DNA, 2613 bp, synthetic construct
  misc_feature 1..2613: note = Description of Artificial Sequence: Synthetic coding sequence
  source 1..2613: mol_type = other DNA
atgaagggctggtaccacggcaagctggacagaaccatcgccgaggagagactgagacaggccggcaagagcggcagctacctgatcagagagagcgacagaagacccggcagcttcgtgctgagcttcctgagccagatgaacgtggtgaaccacttcagaatcatcgccatgtgcggcgactactacatcggcggcagaagattcagcagcctgagcgacctgatcggctactacagccacgtgagctgcctgctgaagggcgagaagctgctgtaccccgtggccccccccgagcccgtggaggacagaagaagagtgagagccatcctgccctacaccaaggtgcccgacaccgacgagatcagcttcctgaagggcgacatgttcatcgtgcacaacgagctggaggacggctggatgtgggtgaccaacctgagaaccgacgagcagggcctgatcgtggaggacctggtggaggaggtgggcagagaggaggacccccacgagggcaagatctggttccacggcaagatcagcaagcaggaggcctacaacctgctgatgaccgtgggccaggtgtgcagcttcctggtgagacccagcgacaacacccccggcgactacagcctgtacttcagaaccaacgagaacatccagagattcaagatctgccccacccccaacaaccagttcatgatgggcggcagatactacaacagcatcggcgacatcatcgaccactacagaaaggagcagatcgtggagggctactacctgaaggagcccgtgcccatgcaggaccaggagcaggtgctgaacgacaccgtggacggcaaggagatctacaacaccatcagaagaaagaccaaggacgccttctacaagaacatcgtgaagaagggctacctgctgaagaagggcaagggcaagagatggaagaacctgtacttcatcctggagggcagcgacgcccagctgatctacttcgagagcgagaagagagccaccaagcccaagggcctgatcgacctgagcgtgtgcagcgtgtacgtggtgcacgacagcctgttcggcagacccaactgcttccagatcgtggtgcagcacttcagcgaggagcactacatcttctacttcgccggcgagacccccgagcaggccgaggactggatgaagggcctgcaggccttctgcaacctgagaaagagcagccccggcaccagcaacaagagactgagacaggtgagcagcctggtgctgcacatcgaggaggcccacaagctgcccgtgaagcacttcaccaacccctactgcaacatctacctgaacagcgtgcaggtggccaagacccacgccagagagggccagaaccccgtgtggagcgaggagttcgtgttcgacgacctgccccccgacatcaacagattcgagatcaccctgagcaacaagaccaagaagagcaaggaccccgacatcctgttcatgagatgccagctgagcagactgcagaagggccacgccaccgacgagtggttcctgctgagcagccacatccccctgaagggcatcgagcccggcagcctgagagtgagagccagatacagcatggagaagatcatgcccgaggaggagtacagcgagttcaaggagctgatcctgcagaaggagctgcacgtggtgtacgccctgagccacgtgtgcggccaggacagaaccctgctggccagcatcctgctgagaatcttcctgcacgagaagctggagagcctgctgctgtgcaccctgaacgacagagagatcagcatggaggacgaggccaccaccctgttcagagccaccaccctggccagcaccctgatggagcagtacatgaaggccaccgccacccagttcgtgcaccacgccctgaaggacagcatcctgaagatcatggagagcaagcagagctgcgagctgagccccagcaagctggagaagaacgaggacgtgaacaccaacctgacccacctgctgaacatcctgagcgagctggtggagaagatcttcatggccagcgagatcctgccccccaccctgagatacatctacggctgcctgcagaagagcgtgcagcacaagtggcccaccaacaccaccatgagaaccagagtggtgagcggcttcgtgttcctgagactgatctgccccgccatcctgaaccccagaatgttcaacatcatcagcgacagccccagccccatcgccgccagaaccctgatcctggtggccaagagcgtgcagaacctggccaacctggtggagttcggcgccaaggagccctacatggagggcgtgaaccccttcatcaagagcaacaagcacagaatgatcatgttcctggacgagctgggcaacgtgcccgagctgcccgacaccaccgagcacagcagaaccgacctgagcagagacctggccgccctgcacgagatctgcgtggcccacagcgacgagctgagaaccctgagcaacgagagaggcgcccagcagcacgtgctgaagaagctgctggccatcaccgagctgctgcagcagaagcagaaccagtacaccaagaccaacgacgtgagatag

SEQ ID NO: 12617 - DNA, 2646 bp, synthetic construct
  misc_feature 1..2646: note = Description of Artificial Sequence: Synthetic coding sequence
  source 1..2646: mol_type = other DNA
atgtgcctggtgaagagctggttcctgagcatcagaagcagatggtaccacggcaagctggacagaaccatcgccgaggagagactgagacaggccggcaagagcggcagctacctgatcagagagagcgacagaagacccggcagcttcgtgctgagcttcctgagccagatgaacgtggtgaaccacttcagaatcatcgccatgtgcggcgactactacatcggcggcagaagattcagcagcctgagcgacctgatcggctactacagccacgtgagctgcctgctgaagggcgagaagctgctgtaccccgtggccccccccgagcccgtggaggacagaagaagagtgagagccatcctgccctacaccaaggtgcccgacaccgacgagatcagcttcctgaagggcgacatgttcatcgtgcacaacgagctggaggacggctggatgtgggtgaccaacctgagaaccgacgagcagggcctgatcgtggaggacctggtggaggaggtgggcagagaggaggacccccacgagggcaagatctggttccacggcaagatcagcaagcaggaggcctacaacctgctgatgaccgtgggccaggtgtgcagcttcctggtgagacccagcgacaacacccccggcgactacagcctgtacttcagaaccaacgagaacatccagagattcaagatctgccccacccccaacaaccagttcatgatgggcggcagatactacaacagcatcggcgacatcatcgaccactacagaaaggagcagatcgtggagggctactacctgaaggagcccgtgcccatgcaggaccaggagcaggtgctgaacgacaccgtggacggcaaggagatctacaacaccatcagaagaaagaccaaggacgccttctacaagaacatcgtgaagaagggctacctgctgaagaagggcaagggcaagagatggaagaacctgtacttcatcctggagggcagcgacgcccagctgatctacttcgagagcgagaagagagccaccaagcccaagggcctgatcgacctgagcgtgtgcagcgtgtacgtggtgcacgacagcctgttcggcagacccaactgcttccagatcgtggtgcagcacttcagcgaggagcactacatcttctacttcgccggcgagacccccgagcaggccgaggactggatgaagggcctgcaggccttctgcaacctgagaaagagcagccccggcaccagcaacaagagactgagacaggtgagcagcctggtgctgcacatcgaggaggcccacaagctgcccgtgaagcacttcaccaacccctactgcaacatctacctgaacagcgtgcaggtggccaagacccacgccagagagggccagaaccccgtgtggagcgaggagttcgtgttcgacgacctgccccccgacatcaacagattcgagatcaccctgagcaacaagaccaagaagagcaaggaccccgacatcctgttcatgagatgccagctgagcagactgcagaagggccacgccaccgacgagtggttcctgctgagcagccacatccccctgaagggcatcgagcccggcagcctgagagtgagagccagatacagcatggagaagatcatgcccgaggaggagtacagcgagttcaaggagctgatcctgcagaaggagctgcacgtggtgtacgccctgagccacgtgtgcggccaggacagaaccctgctggccagcatcctgctgagaatcttcctgcacgagaagctggagagcctgctgctgtgcaccctgaacgacagagagatcagcatggaggacgaggccaccaccctgttcagagccaccaccctggccagcaccctgatggagcagtacatgaaggccaccgccacccagttcgtgcaccacgccctgaaggacagcatcctgaagatcatggagagcaagcagagctgcgagctgagccccagcaagctggagaagaacgaggacgtgaacaccaacctgacccacctgctgaacatcctgagcgagctggtggagaagatcttcatggccagcgagatcctgccccccaccctgagatacatctacggctgcctgcagaagagcgtgcagcacaagtggcccaccaacaccaccatgagaaccagagtggtgagcggcttcgtgttcctgagactgatctgccccgccatcctgaaccccagaatgttcaacatcatcagcgacagccccagccccatcgccgccagaaccctgatcctggtggccaagagcgtgcagaacctggccaacctggtggagttcggcgccaaggagccctacatggagggcgtgaaccccttcatcaagagcaacaagcacagaatgatcatgttcctggacgagctgggcaacgtgcccgagctgcccgacaccaccgagcacagcagaaccgacctgagcagagacctggccgccctgcacgagatctgcgtggcccacagcgacgagctgagaaccctgagcaacgagagaggcgcccagcagcacgtgctgaagaagctgctggccatcaccgagctgctgcagcagaagcagaaccagtacaccaagaccaacgacgtgagatag

SEQ ID NO: 12618 - DNA, 2643 bp, synthetic construct
  misc_feature 1..2643: note = Description of Artificial Sequence: Synthetic coding sequence
  source 1..2643: mol_type = other DNA
atgagaaccggctacagcagcgtgcccagcaagctgagatggtaccacggcaagctggacagaaccatcgccgaggagagactgagacaggccggcaagagcggcagctacctgatcagagagagcgacagaagacccggcagcttcgtgctgagcttcctgagccagatgaacgtggtgaaccacttcagaatcatcgccatgtgcggcgactactacatcggcggcagaagattcagcagcctgagcgacctgatcggctactacagccacgtgagctgcctgctgaagggcgagaagctgctgtaccccgtggccccccccgagcccgtggaggacagaagaagagtgagagccatcctgccctacaccaaggtgcccgacaccgacgagatcagcttcctgaagggcgacatgttcatcgtgcacaacgagctggaggacggctggatgtgggtgaccaacctgagaaccgacgagcagggcctgatcgtggaggacctggtggaggaggtgggcagagaggaggacccccacgagggcaagatctggttccacggcaagatcagcaagcaggaggcctacaacctgctgatgaccgtgggccaggtgtgcagcttcctggtgagacccagcgacaacacccccggcgactacagcctgtacttcagaaccaacgagaacatccagagattcaagatctgccccacccccaacaaccagttcatgatgggcggcagatactacaacagcatcggcgacatcatcgaccactacagaaaggagcagatcgtggagggctactacctgaaggagcccgtgcccatgcaggaccaggagcaggtgctgaacgacaccgtggacggcaaggagatctacaacaccatcagaagaaagaccaaggacgccttctacaagaacatcgtgaagaagggctacctgctgaagaagggcaagggcaagagatggaagaacctgtacttcatcctggagggcagcgacgcccagctgatctacttcgagagcgagaagagagccaccaagcccaagggcctgatcgacctgagcgtgtgcagcgtgtacgtggtgcacgacagcctgttcggcagacccaactgcttccagatcgtggtgcagcacttcagcgaggagcactacatcttctacttcgccggcgagacccccgagcaggccgaggactggatgaagggcctgcaggccttctgcaacctgagaaagagcagccccggcaccagcaacaagagactgagacaggtgagcagcctggtgctgcacatcgaggaggcccacaagctgcccgtgaagcacttcaccaacccctactgcaacatctacctgaacagcgtgcaggtggccaagacccacgccagagagggccagaaccccgtgtggagcgaggagttcgtgttcgacgacctgccccccgacatcaacagattcgagatcaccctgagcaacaagaccaagaagagcaaggaccccgacatcctgttcatgagatgccagctgagcagactgcagaagggccacgccaccgacgagtggttcctgctgagcagccacatccccctgaagggcatcgagcccggcagcctgagagtgagagccagatacagcatggagaagatcatgcccgaggaggagtacagcgagttcaaggagctgatcctgcagaaggagctgcacgtggtgtacgccctgagccacgtgtgcggccaggacagaaccctgctggccagcatcctgctgagaatcttcctgcacgagaagctggagagcctgctgctgtgcaccctgaacgacagagagatcagcatggaggacgaggccaccaccctgttcagagccaccaccctggccagcaccctgatggagcagtacatgaaggccaccgccacccagttcgtgcaccacgccctgaaggacagcatcctgaagatcatggagagcaagcagagctgcgagctgagccccagcaagctggagaagaacgaggacgtgaacaccaacctgacccacctgctgaacatcctgagcgagctggtggagaagatcttcatggccagcgagatcctgccccccaccctgagatacatctacggctgcctgcagaagagcgtgcagcacaagtggcccaccaacaccaccatgagaaccagagtggtgagcggcttcgtgttcctgagactgatctgccccgccatcctgaaccccagaatgttcaacatcatcagcgacagccccagccccatcgccgccagaaccctgatcctggtggccaagagcgtgcagaacctggccaacctggtggagttcggcgccaaggagccctacatggagggcgtgaaccccttcatcaagagcaacaagcacagaatgatcatgttcctggacgagctgggcaacgtgcccgagctgcccgacaccaccgagcacagcagaaccgacctgagcagagacctggccgccctgcacgagatctgcgtggcccacagcgacgagctgagaaccctgagcaacgagagaggcgcccagcagcacgtgctgaagaagctgctggccatcaccgagctgctgcagcagaagcagaaccagtacaccaagaccaacgacgtgagatag

SEQ ID NO: 12619 - DNA, 2616 bp, synthetic construct
  misc_feature 1..2616: note = Description of Artificial Sequence: Synthetic coding sequence
  source 1..2616: mol_type = other DNA
agaggcgacgccagcggctggggctgcagcgagcccggccccggcggcccctggggcagcagagccggcagagtgggccagagcagagccggcttcaacatgatggccgccgaggccggcagcgaggagggcggccccgtgaccgccggcgccggcggcggcggcgccgccgccggcagcagcgcctaccccgccgtgtgcagagtgaagatccccgccgccctgcccgtggccgccgccccctaccccggcctggtggagaccggcgtggccggcaccctgggcggcggcgccgccctgggcagcgagttcctgggcgccggcagcgtggccggcgccctgggcggcgccggcctgaccggcggcggcaccgccgccggcgtggccggcgccgccgccggcgtggccggcgccgccgtggccggccccagcggcgacatggccctgaccaagctgcccaccagcctgctggccgagaccctgggccccggcggcggcttcccccccctgcccccccccccctacctgccccccctgggcgccggcctgggcaccgtggacgagggcgacagcctggacggccccgagtacgaggaggaggaggtggccatccccctgaccgccccccccaccaaccagtggtaccacggcaagctggacagaaccatcgccgaggagagactgagacaggccggcaagagcggcagctacctgatcagagagagcgacagaagacccggcagcttcgtgctgagcttcctgagccagatgaacgtggtgaaccacttcagaatcatcgccatgtgcggcgactactacatcggcggcagaagattcagcagcctgagcgacctgatcggctactacagccacgtgagctgcctgctgaagggcgagaagctgctgtaccccgtggccccccccgagcccgtggaggacagaagaagagtgagagccatcctgccctacaccaaggtgcccgacaccgacgagatcagcttcctgaagggcgacatgttcatcgtgcacaacgagctggaggacggctggatgtgggtgaccaacctgagaaccgacgagcagggcctgatcgtggaggacctggtggaggaggtgggcagagaggaggacccccacgagggcaagatctggttccacggcaagatcagcaagcaggaggcctacaacctgctgatgaccgtgggccaggtgtgcagcttcctggtgagacccagcgacaacacccccggcgactacagcctgtacttcagaaccaacgagaacatccagagattcaagatctgccccacccccaacaaccagttcatgatgggcggcagatactacaacagcatcggcgacatcatcgaccactacagaaaggagcagatcgtggagggctactacctgaaggagcccgtgcccatgcaggaccaggagcaggtgctgaacgacaccgtggacggcaaggagatctacaacaccatcagaagaaagaccaaggacgccttctacaagaacatcgtgaagaagggctacctgctgaagaagggcaagggcaagagatggaagaacctgtacttcatcctggagggcagcgacgcccagctgatctacttcgagagcgagaagagagccaccaagcccaagggcctgatcgacctgagcgtgtgcagcgtgtacgtggtgcacgacagcctgttcggcagacccaactgcttccagatcgtggtgcagcacttcagcgaggagcactacatcttctacttcgccggcgagacccccgagcaggccgaggactggatgaagggcctgcaggccttctgcaacctgagaaagagcagccccggcaccagcaacaagagactgagacaggtgagcagcctggtgctgcacatcgaggaggcccacaagctgcccgtgaagcacttcaccaacccctactgcaacatctacctgaacagcgtgcaggtggccaagacccacgccagagagggccagaaccccgtgtggagcgaggagttcgtgttcgacgacctgccccccgacatcaacagattcgagatcaccctgagcaacaagaccaagaagagcaaggaccccgacatcctgttcatgagatgccagctgagcagactgcagaagggccacgccaccgacgagtggttcctgctgagcagccacatccccctgaagggcatcgagcccggcagcctgagagtgagagccagatacagcatggagaagatcatgcccgaggaggagtacagcgagttcaaggagctgatcctgcagaaggagctgcacgtggtgtacgccctgagccacgtgtgcggccaggacagaaccctgctggccagcatcctgctgagaatcttcctgcacgagaagctggagagcctgctgctgtgcaccctgaacgacagagagatcagcatggaggacgaggccaccaccctgttcagagccaccaccctggccagcaccctgatggagcagtacatgaaggccaccgccacccagttcgtgcaccacgccctgaaggacagcatcctgaagatcatggagagcaagcagagctgcgagctgagcagcagcaagctgcagaaggcctag

SEQ ID NO: 12620 - DNA, 1161 bp, synthetic construct
  misc_feature 1..1161: note = Description of Artificial Sequence: Synthetic coding sequence
  source 1..1161: mol_type = other DNA
atgaacccccagatcagaaaccccatggagagaatgtacagagacaccttctacgacaacttcgagaacgagcccatcctgtacggcagaagctacacctggctgtgctacgaggtgaagatcaagagaggcagaagcaacctgctgtgggacaccggcgtgttcagaggccccgtgctgcccaagagacagagcaaccacagacaggaggtgtacttcagattcgagaaccacgccgagatgtgcttcctgagctggttctgcggcaacagactgcccgccaacagaagattccagatcacctggttcgtgagctggaacccctgcctgccctgcgtggtgaaggtgaccaagttcctggccgagcaccccaacgtgaccctgaccatcagcgccgccagactgtactactacagagacagagactggagatgggtgctgctgagactgcacaaggccggcgccagagtgaagatcatggactacgaggacttcgcctactgctgggagaacttcgtgtgcaacgagggccagcccttcatgccctggtacaagttcgacgacaactacgccagcctgcacagaaccctgaaggagatcctgagaaaccccatggaggccatgtacccccacatcttctacttccacttcaagaacctgctgaaggcctgcggcagaaacgagagctggctgtgcttcaccatggaggtgaccaagcaccacagcgccgtgttcagaaagagaggcgtgttcagaaaccaggtggaccccgagacccactgccacgccgagagatgcttcctgagctggttctgcgacgacatcctgagccccaacaccaactacgaggtgacctggtacaccagctggagcccctgccccgagtgcgccggcgaggtggccgagttcctggccagacacagcaacgtgaacctgaccatcttcaccgccagactgtgctacttctgggacaccgactaccaggagggcctgtgcagcctgagccaggagggcgccagcgtgaagatcatgggctacaaggacttcgtgagctgctggaagaacttcgtgtacagcgacgacgagcccttcaagccctggaagggcctgcagaccaacttcagactgctgaagagaagactgagagagatcctgcagtag

SEQ ID NO: 12621 - DNA, 348 bp, synthetic construct
  misc_feature 1..348: note = Description of Artificial Sequence: Synthetic coding sequence
  source 1..348: mol_type = other DNA
atgggcggcagcctgagagtggccgtgctgggcgcccccggcgtgggcaagaccgccatcatcagacagttcctgttcggcgactaccccgagagacacagacccaccgacggccccagactgtacagacccgccgtgctgctggacggcgccgtgtacgacctgagcatcagagacggcgacgtggccggccccggcagcagccccggcggccccgaggagtggcccgacgccaaggactggagcctgcaggacaccgacgccttcgtgctggtgtacgacatctgcagccccgacagcttcgactacgtgaaggccctgagacagagaatcgccgagaccagatag

SEQ ID NO: 12622 - DNA, 579 bp, synthetic construct
  misc_feature 1..579: note = Description of Artificial Sequence: Synthetic coding sequence
  source 1..579: mol_type = other DNA
atgcaggccatcaagtgcgtggtggtgggcgacggcgccgtgggcaagacctgcctgctgatcagctacaccaccaacgccttccccggcgagtacatccccaccgtgttcgacaactacagcgccaacgtgatggtggacggcaagcccgtgaacctgggcctgtgggacaccgccggccaggaggactacgacagactgagacccctgagctacccccagaccgacgtgttcctgatctgcttcagcctggtgagccccgccagcttcgagaacgtgagagccaagtggtaccccgaggtgagacaccactgccccaacacccccatcatcctggtgggcaccaagctggacctgagagacgacaaggacaccatcgagaagctgaaggagaagaagctgacccccatcacctacccccagggcctggccatggccaaggagatcggcgccgtgaagtacctggagtgcagcgccctgacccagagaggcctgaagaccgtgttcgacgaggccatcagagccgtgctgtgccccccccccgtgaagaagagaaagagaaagtgcctgctgctgtag

SEQ ID NO: 12623 - DNA, 636 bp, synthetic construct
  misc_feature 1..636: note = Description of Artificial Sequence: Synthetic coding sequence
  source 1..636: mol_type = other DNA
atgcaggccatcaagtgcgtggtggtgggcgacggcgccgtgggcaagacctgcctgctgatcagctacaccaccaacgccttccccggcgagtacatccccaccgtgttcgacaactacagcgccaacgtgatggtggacggcaagcccgtgaacctgggcctgtgggacaccgccggccaggaggactacgacagactgagacccctgagctacccccagaccgtgggcgagacctacggcaaggacatcaccagcagaggcaaggacaagcccatcgccgacgtgttcctgatctgcttcagcctggtgagccccgccagcttcgagaacgtgagagccaagtggtaccccgaggtgagacaccactgccccaacacccccatcatcctggtgggcaccaagctggacctgagagacgacaaggacaccatcgagaagctgaaggagaagaagctgacccccatcacctacccccagggcctggccatggccaaggagatcggcgccgtgaagtacctggagtgcagcgccctgacccagagaggcctgaagaccgtgttcgacgaggccatcagagccgtgctgtgccccccccccgtgaagaagagaaagagaaagtgcctgctgctgtag

SEQ ID NO: 12624 - DNA, 579 bp, synthetic construct
  misc_feature 1..579: note = Description of Artificial Sequence: Synthetic coding sequence
  source 1..579: mol_type = other DNA
atgcaggccatcaagtgcgtggtggtgggcgacggcgccgtgggcaagacctgcctgctgatcagctacaccaccaacgccttccccggcgagtacatccccaccgtgttcgacaactacagcgccaacgtgatggtggacagcaagcccgtgaacctgggcctgtgggacaccgccggccaggaggactacgacagactgagacccctgagctacccccagaccgacgtgttcctgatctgcttcagcctggtgagccccgccagctacgagaacgtgagagccaagtggttccccgaggtgagacaccactgccccagcacccccatcatcctggtgggcaccaagctggacctgagagacgacaaggacaccatcgagaagctgaaggagaagaagctggcccccatcacctacccccagggcctggccctggccaaggagatcgacagcgtgaagtacctggagtgcagcgccctgacccagagaggcctgaagaccgtgttcgacgaggccatcagagccgtgctgtgcccccagcccaccagacagcagaagagagcctgcagcctgctgtag

SEQ ID NO: 12625 - DNA, 261 bp, synthetic construct
  misc_feature 1..261: note = Description of Artificial Sequence: Synthetic coding sequence
  source 1..261: mol_type = other DNA
atgcaggccatcaagtgcgtggtggtgggcgacggcgccgtgggcaagacctgcctgctgatcagctacaccaccaacgccttccccggcgagtacatccccaccgtgcccggcagaccctgcgccctgctgcaggacgccgaggccggcctgagcagcgacgtggagggcgcctgctggtgccagacccaggagggcagaatgaccggcgaggcccccgcccccccctggcccgccctgagaggcccccaccacagctag

SEQ ID NO: 12626 - DNA, 558 bp, synthetic construct
  misc_feature 1..558: note = Description of Artificial Sequence: Synthetic coding sequence
  source 1..558: mol_type = other DNA
atgcaggccatcaaggccgtgggcaagacctgcctgctgatcagctacaccaccaacgccttccccggcgagtacatccccaccgtgttcgacaactacagcgccaacgtgatggtggacagcaagcccgtgaacctgggcctgtgggacaccgccggccaggaggactacgacagactgagacccctgagctacccccagaccgacgtgttcctgatctgcttcagcctggtgagccccgccagctacgagaacgtgagagccaagtggttccccgaggtgagacaccactgccccagcacccccatcatcctggtgggcaccaagctggacctgagagacgacaaggacaccatcgagaagctgaaggagaagaagctggcccccatcacctacccccagggcctggccctggccaaggagatcgacagcgtgaagtacctggagtgcagcgccctgacccagagaggcctgaagaccgtgttcgacgaggccatcagagccgtgctgtgcccccagcccaccagacagcagaagagagcctgcagcctgctgtag

SEQ ID NO: 12627 - DNA, 447 bp, synthetic construct
  misc_feature 1..447: note = Description of Artificial Sequence: Synthetic coding sequence
  source 1..447: mol_type = other DNA
atggtggacagcaagcccgtgaacctgggcctgtgggacaccgccggccaggaggactacgacagactgagacccctgagctacccccagaccgacgtgttcctgatctgcttcagcctggtgagccccgccagctacgagaacgtgagagccaagtggttccccgaggtgagacaccactgccccagcacccccatcatcctggtgggcaccaagctggacctgagagacgacaaggacaccatcgagaagctgaaggagaagaagctggcccccatcacctacccccagggcctggccctggccaaggagatcgacagcgtgaagtacctggagtgcagcgccctgacccagagaggcctgaagaccgtgttcgacgaggccatcagagccgtgctgtgcccccagcccaccagacagcagaagagagcctgcagcctgctgtag

SEQ ID NO: 12628 - DNA, 501 bp, synthetic construct
  misc_feature 1..501: note = Description of Artificial Sequence: Synthetic coding sequence
  source 1..501: mol_type = other DNA
atgcaggccatcaagtgcgtggtggtgggcgacggcgccgtgggcaagacctgcctgctgatcagctacaccaccaacgccttccccggcgagtacatccccaccgtgttcgacaactacagcgccaacgtgatggtggacagcaagcccgtgaacctgggcctgtgggacaccgccggccaggaggactacgacagactgagacccctgagctacccccagaccgacgtgttcctgatctgcttcagcctggtgagccccgccagctacgagaacgtgagagccaagtggttccccgaggtgagacaccactgccccagcacccccatcatcctggtgggcaccaagctggacctgagagacgacaaggacaccatcgagaagctgaaggagaagaagctggcccccatcacctacccccagggcctggccctggccaaggagatcgacagcgtgaagtacctggagtgcagcgccctgacccagagaggcctgaagtag

SEQ ID NO: 12629 - DNA, 4785 bp, synthetic construct
  misc_feature 1..4785: note = Description of Artificial Sequence: Synthetic coding sequence
  source 1..4785: mol_type = other DNA
atgaagctgtacgtgttcctggtgaacaccggcaccaccctgaccttcgacaccgagctgaccgtgcagaccgtggccgacctgaagcacgccatccagagcaagtacaagatcgccatccagcaccaggtgctggtggtgaacggcggcgagtgcatggccgccgacagaagagtgtgcacctacagcgccggcaccgacaccaaccccatcttcctgttcaacaaggagatgatcctgtgcgacagaccccccgccatccccaagaccaccttcagcaccgagaacgacatggagatcaaggtggaggagagcctgatgatgcccgccgtgttccacaccgtggccagcagaacccagctggccctggagatgtacgaggtggccaagaagctgtgcagcttctgcgagggcctggtgcacgacgagcacctgcagcaccagggctgggccgccatcatggccaacctggaggactgcagcaacagctaccagaagctgctgttcaagttcgagagcatctacagcaactacctgcagagcatcgaggacatcaagctgaagctgacccacctgggcaccgccgtgagcgtgatggccaagatccccctgctggagtgcctgaccagacacagctacagagagtgcctgggcagactggacagcctgcccgagcacgaggacagcgagaaggccgagatgaagagaagcaccgagctggtgctgagccccgacatgcccagaaccaccaacgagagcctgctgaccagcttccccaagagcgtggagcacgtgagccccgacaccgccgacgccgagagcggcaaggagatcagagagagctgccagagcaccgtgcaccagcaggacgagaccaccatcgacaccaaggacggcgacctgcccttcttcaacgtgagcctgctggactggatcaacgtgcaggacagacccaacgacgtggagagcctggtgagaaagtgcttcgacagcatgagcagactggaccccagaatcatcagacccttcatcgccgagtgcagacagaccatcgccaagctggacaaccagaacatgaaggccatcaagggcctggaggacagactgtacgccctggaccagatgatcgccagctgcggcagactggtgaacgagcagaaggagctggcccagggcttcctggccaaccagaagagagccgagaacctgaaggacgccagcgtgctgcccgacctgtgcctgagccacgccaaccagctgatgatcatgctgcagaaccacagaaagctgctggacatcaagcagaagtgcaccaccgccaagcaggagctggccaacaacctgcacgtgagactgaagtggtgctgcttcgtgatgctgcacgccgaccaggacggcgagaagctgcaggccctgctgagactggtgatcgagctgctggagagagtgaagatcgtggaggccctgagcaccgtgccccagatgtactgcctggccgtggtggaggtggtgagaagaaagatgttcatcaagcactacagagagtgggccggcgccctggtgaaggacggcaagagactgtacgaggccgagaagagcaagagagagagcttcggcaagctgttcagaaagagcttcctgagaaacagactgttcagaggcctggacagctggccccccagcttctgcacccagaagcccagaaagttcgactgcgagctgcccgacatcagcctgaaggacctgcagttcctgcagagcttctgccccagcgaggtgcagcccttcctgagagtgcccctgctgtgcgacttcgagcccctgcaccagcacgtgctggccctgcacaacctggtgaaggccgcccagagcctggacgagatgagccagaccatcaccgacctgctgagcgagcagaaggccagcgtgagccagaccagcccccagagcgccagcagccccagaatggagagcaccgccggcatcaccaccaccaccagccccagaacccccccccccctgaccgtgcaggaccccctgtgccccgccgtgtgccccctggaggagctgagccccgacagcatcgacgcccacaccttcgacttcgagaccatcccccaccccaacatcgagcagaccatccaccaggtgagcctggacctggacagcctggccgagagccccgagagcgacttcatgagcgccgtgaacgagttcgtgatcgaggagaacctgagcagccccaaccccatcagcgacccccagagccccgagatgatggtggagagcctgtacagcagcgtgatcaacgccatcgacagcagaagaatgcaggacaccaacgtgtgcggcaaggaggacttcggcgaccacaccagcctgaacgtgcagctggagagatgcagagtggtggcccaggacagccacttcagcatccagaccatcaaggaggacctgtgccacttcagaaccttcgtgcagaaggagcagtgcgacttcagcaacagcctgaagtgcaccgccgtggagatcagaaacatcatcgagaaggtgaagtgcagcctggagatcaccctgaaggagaagcaccagaaggagctgctgagcctgaagaacgagtacgagggcaagctggacggcctgatcaaggagaccgaggagaacgagaacaagatcaagaagctgaagggcgagctggtgtgcctggaggaggtgctgcagaacaaggacaacgagttcgccctggtgaagcacgagaaggaggccgtgatctgcctgcagaacgagaaggaccagaagctgctggagatggagaacatcatgcacagccagaactgcgagatcaaggagctgaagcagagcagagagatcgtgctggaggacctgaagaagctgcacgtggagaacgacgagaagctgcagctgctgagagccgagctgcagagcctggagcagagccacctgaaggagctggaggacaccctgcaggtgagacacatccaggagttcgagaaggtgatgaccgaccacagagtgagcctggaggagctgaagaaggagaaccagcagatcatcaaccagatccaggagagccacgccgagatcatccaggagaaggagaagcagctgcaggagctgaagctgaaggtgagcgacctgagcgacaccagatgcaagctggaggtggagctggccctgaaggaggccgagaccgacgagatcaagatcctgctggaggagagcagagcccagcagaaggagaccctgaagagcctgctggagcaggagaccgagaacctgagaaccgagatcagcaagctgaaccagaagatccaggacaacaacgagaactaccaggtgggcctggccgagctgagaaccctgatgaccatcgagaaggaccagtgcatcagcgagctgatcagcagacacgaggaggagagcaacatcctgaaggccgagctgaacaaggtgaccagcctgcacaaccaggccttcgagatcgagaagaacctgaaggagcagatcatcgagctgcagagcaagctggacagcgagctgagcgccctggagagacagaaggacgagaagatcacccagcaggaggagaagtacgaggccatcatccagaacctggagaaggacagacagaagctggtgagcagccaggagcaggacagagagcagctgatccagaagctgaactgcgagaaggacgaggccatccagaccgccctgaaggagttcaagctggagagagaggtggtggagaaggagctgctggagaaggtgaagcacctggagaaccagatcgccaagagccccgccatcgacagcaccagaggcgacagcagcagcctggtggccgagctgcaggagaagctgcaggaggagaaggccaagttcctggagcagctggaggagcaggagaagagaaagaacgaggagatgcagaacgtgagaaccagcctgatcgccgagcagcagaccaacttcaacaccgtgctgaccagagagaagatgagaaaggagaacatcatcaacgacctgagcgacaagctgaagagcaccatgcagcagcaggagagagacaaggacctgatcgagagcctgagcgaggacagagccagactgctggaggagaagaagaagctggaggaggaggtgagcaagctgagaagcagcagcttcgtgcccagcccctacgtggccaccgcccccgagctgtacggcgcctgcgcccccgagctgcccggcgagagcgacagaagcgccgtggagaccgccgacgagggcagagtggacagcgccatggagaccagcatgatgagcgtgcaggagaacatccacatgctgagcgaggagaagcagagaatcatgctgctggagagaaccctgcagctgaaggaggaggagaacaagagactgaaccagagactgatgagccagagcatgagcagcgtgagcagcagacacagcgagaagatcgccatcagagacttccaggtgggcgacctggtgctgatcatcctggacgagagacacgacaactacgtgctgttcaccgtgagccccaccctgtacttcctgcacagcgagagcctgcccgccctggacctgaagcccggcgagggcgccagcggcgccagcagaagaccctgggtgctgggcaaggtgatggagaaggagtactgccaggccaagaaggcccagaacagattcaaggtgcccctgggcaccaagttctacagagtgaaggccgtgagctggaacaagaaggtgtag

SEQ ID NO: 12630 - DNA, 4776 bp, synthetic construct
  misc_feature 1..4776: note = Description of Artificial Sequence: Synthetic coding sequence
  source 1..4776: mol_type = other DNA
atgaagctgtacgtgttcctggtgaacaccggcaccaccctgaccttcgacaccgagctgaccgtgcagaccgtggccgacctgaagcacgccatccagagcaagtacaagatcgccatccagcaccaggtgctggtggtgaacggcggcgagtgcatggccgccgacagaagagtgtgcacctacagcgccggcaccgacaccaaccccatcttcctgttcaacaaggagatgatcctgtgcgacagaccccccgccatccccaagaccaccttcagcaccgagaacgacatggagatcaaggtggaggagagcctgatgatgcccgccgtgttccacaccgtggccagcagaacccagctggccctggagatgtacgaggtggccaagaagctgtgcagcttctgcgagggcctggtgcacgacgagcacctgcagcaccagggctgggccgccatcatggccaacctggaggactgcagcaacagctaccagaagctgctgttcaagttcgagagcatctacagcaactacctgcagagcatcgaggacatcaagctgaagctgacccacctgggcaccgccgtgagcgtgatggccaagatccccctgctggagtgcctgaccagacacagctacagagagtgcctgggcagactggacagcctgcccgagcacgaggacagcgagaaggccgagatgaagagaagcaccgagctggtgctgagccccgacatgcccagaaccaccaacgagagcctgctgaccagcttccccaagagcgtggagcacgtgagccccgacaccgccgacgccgagagcggcaaggagatcagagagagctgccagagcaccgtgcaccagcaggacgagaccaccatcgacaccaaggacggcgacctgcccttcttcaacgtgagcctgctggactggatcaacgtgcaggacagacccaacgacgtggagagcctggtgagaaagtgcttcgacagcatgagcagactggaccccagaatcatcagacccttcatcgccgagtgcagacagaccatcgccaagctggacaaccagaacatgaaggccatcaagggcctggaggacagactgtacgccctggaccagatgatcgccagctgcggcagactggtgaacgagcagaaggagctggcccagggcttcctggccaaccagaagagagccgagaacctgaaggacgccagcgtgctgcccgacctgtgcctgagccacgccaaccagctgatgatcatgctgcagaaccacagaaagctgctggacatcaagcagaagtgcaccaccgccaagcaggagctggccaacaacctgcacgtgagactgaagtggtgctgcttcgtgatgctgcacgccgaccaggacggcgagaagctgcaggccctgctgagactggtgatcgagctgctggagagagtgaagatcgtggaggccctgagcaccgtgccccagatgtactgcctggccgtggtggaggtggtgagaagaaagatgttcatcaagcactacagagagtgggccggcgccctggtgaaggacggcaagagactgtacgaggccgagaagagcaagagagagagcttcggcaagctgttcagaaagagcttcctgagaaacagactgttcagaggcctggacagctggccccccagcttctgcacccagaagcccagaaagttcgactgcgagctgcccgacatcagcctgaaggacctgcagttcctgcagagcttctgccccagcgaggtgcagcccttcctgagagtgcccctgctgtgcgacttcgagcccctgcaccagcacgtgctggccctgcacaacctggtgaaggccgcccagagcctggacgagatgagccagaccatcaccgacctgctgagcgagcagaaggccagcgtgagccagaccagcccccagagcgccagcagccccagaatggagagcaccgccggcatcaccaccaccaccagccccagaacccccccccccctgaccgtgcaggaccccctgtgccccgccgtgtgccccctggaggagctgagccccgacagcatcgacgcccacaccttcgacttcgagaccatcccccaccccaacatcgagcagaccatccaccaggtgagcctggacctggacagcctggccgagagccccgagagcgacttcatgagcgccgtgaacgagttcgtgatcgaggagaacctgagcagccccaaccccatcagcgacccccagagccccgagatgatggtggagagcctgtacagcagcgtgatcaacgccatcgacagcagaagaatgcaggacaccaacgtgtgcggcaaggaggacttcggcgaccacaccagcctgaacgtgcagctggagagatgcagagtggtggcccaggacagccacttcagcatccagaccatcaaggaggacctgtgccacttcagaaccttcgtgcagaaggagcagtgcgacttcagcaacagcctgaagtgcaccgccgtggagatcagaaacatcatcgagaaggtgaagtgcagcctggagatcaccctgaaggagaagcaccagaaggagctgctgagcctgaagaacgagtacgagggcaagctggacggcctgatcaaggagaccgaggagaacgagaacaagatcaagaagctgaagggcgagctggtgtgcctggaggaggtgctgcagaacaaggacaacgagttcgccctggtgaagcacgagaaggaggccgtgatctgcctgcagaacgagaaggaccagaagctgctggagatggagaacatcatgcacagccagaactgcgagatcaaggagctgaagcagagcagagagatcgtgctggaggacctgaagaagctgcacgtggagaacgacgagaagctgcagctgctgagagccgagctgcagagcctggagcagagccacctgaaggagctggaggacaccctgcaggtgagacacatccaggagttcgagaaggtgatgaccgaccacagagtgagcctggaggagctgaagaaggagaaccagcagatcatcaaccagatccaggagagccacgccgagatcatccaggagaaggagaagcagctgcaggagctgaagctgaaggtgagcgacctgagcgacaccagatgcaagctggaggtggagctggccctgaaggaggccgagaccgacgagatcaagatcctgctggaggagagcagagcccagcagaaggagaccctgaagagcctgctggagcaggagaccgagaacctgagaaccgagatcagcaagctgaaccagaagatccaggacaacaacgagaactaccaggtgggcctggccgagctgagaaccctgatgaccatcgagaaggaccagtgcatcagcgagctgatcagcagacacgaggaggagagcaacatcctgaaggccgagctgaacaaggtgaccagcctgcacaaccaggccttcgagatcgagaagaacctgaaggagcagatcatcgagctgcagagcaagctggacagcgagctgagcgccctggagagacagaaggacgagaagatcacccagcaggaggagaagtacgaggccatcatccagaacctggagaaggacagacagaagctggtgagcagccaggagcaggacagagagcagctgatccagaagctgaactgcgagaaggacgaggccatccagaccgccctgaaggagttcaagctggagagagaggtggtggagaaggagctgctggagaaggtgaagcacctggagaaccagatcgccaagagccccgccatcgacagcaccagaggcgacagcagcagcctggtggccgagctgcaggagaagctgcaggaggagaaggccaagttcctggagcagctggaggagcaggagaagagaaagaacgaggagatgcagaacgtgagaaccagcctgatcgccgagcagcagaccaacttcaacaccgtgctgaccagagagaagatgagaaaggagaacatcatcaacgacctgagcgacaagctgaagagcaccatgcagcagcaggagagagacaaggacctgatcgagagcctgagcgaggacagagccagactgctggaggagaagaagaagctggaggaggaggtgagcaagctgagaagcagcagcttcgtgcccagcccctacgtggccaccgcccccgagctgtacggcgcctgcgcccccgagctgcccggcgagagcgacagaagcgccgtggagaccgccgacgagggcagagtggacagcgccatggagaccagcatgatgagcgtgcaggagaacatccacatgctgagcgaggagaagcagagaatcatgctgctggagagaaccctgcagctgaaggaggaggagaacaagagactgaaccagagactgatgagccagagcatgagcagcgtgagcagcagacacagcgagaagatcgccatcagagacttccaggtgggcgacctggtgctgatcatcctggacgagagacacgacaactacgtgctgttcaccgtgagccccaccctgtacttcctgcacagcgagagcctgcccgccctggacctgaagcccgccagcggcgccagcagaagaccctgggtgctgggcaaggtgatggagaaggagtactgccaggccaagaaggcccagaacagattcaaggtgcccctgggcaccaagttctacagagtgaaggccgtgagctggaacaagaaggtgtag

SEQ ID NO: 12631 - DNA, 48 bp, synthetic construct
  misc_feature 1..48: note = Description of Artificial Sequence: Synthetic coding sequence
  source 1..48: mol_type = other DNA
atgaagctgtacgtgttcctggtgaacaccggcaccaccctgacctag

SEQ ID NO: 12632 - DNA, 4776 bp, synthetic construct; identical to SEQ ID NO: 12630
  misc_feature 1..4776: note = Description of Artificial Sequence: Synthetic coding sequence
  source 1..4776: mol_type = other DNA

SEQ ID NO: 12633 - DNA, 6471 bp, synthetic construct
  misc_feature 1..6471: note = Description of Artificial Sequence: Synthetic coding sequence
  source 1..6471: mol_type = other DNA
atgagcgacacccccagcaccggcttcagcatcatccaccccaccagcagcgagggccaggtgcccccccccagacacctgagcctgacccaccccgtggtggccaagagaatcagcttctacaagagcggcgacccccagttcggcggcgtgagagtggtggtgaaccccagaagcttcaagagcttcgacgccctgctggacaacctgagcagaaaggtgcccctgcccttcggcgtgagaaacatcagcacccccagaggcagacacagcatcaccagactggaggagctggaggacggcgagagctacctgtgcagccacggcagaaaggtgcagcccgtggacctggacaaggccagaagaagacccagaccctggctgagcagcagagccatcagcgcccacagccccccccaccccgtggccgtggccgcccccggcatgcccagaccccccagaagcctggtggtgttcagaaacggcgaccccaagaccagaagagccgtgctgctgagcagaagagtgacccagagcttcgaggccttcctgcagcacctgaccgaggtgatgcagagacccgtggtgaagctgtacgccaccgacggcagaagagtgcccagcctgcaggccgtgatcctgagcagcggcgccgtggtggccgccggcagagagcccttcaagcccggcaactacgacatccagaagtacctgctgcccgccagactgcccggcatcagccagagagtgtaccccaagggcaacgccaagagcgagagcagaaagatcagcacccacatgagcagcagcagcagaagccagatctacagcgtgagcagcgagaagacccacaacaacgactgctacctggactacagcttcgtgcccgagaagtacctggccctggagaagaacgacagccagaacctgcccatctaccccagcgaggacgacatcgagaagagcatcatcttcaaccaggacggcaccatgaccgtggagatgaaggtgagattcagaatcaaggaggaggagaccatcaagtggaccaccaccgtgagcaagaccggccccagcaacaacgacgagaagagcgagatgagcttccccggcagaaccgagagcagaagcagcggcctgaagctggccgcctgcagcttcagcgccgacgtgagccccatggagagaagcagcaaccaggagggcagcctggccgaggagatcaacatccagatgaccgaccaggtggccgagacctgcagcagcgccagctgggagaacgccaccgtggacaccgacatcatccagggcacccaggaccaggccaagcacagattctacagaccccccacccccggcctgagaagagtgagacagaagaagagcgtgatcggcagcgtgaccctggtgagcgagaccgaggtgcaggagaagatgatcggccagttcagctacagcgaggagagagagagcggcgagaacaagagcgagtaccacatgttcacccacagctgcagcaagatgagcagcgtgagcaacaagcccgtgctggtgcagatcaacaacaacgaccagatggaggagagcagcctggagagaaagaaggagaacagcctgctgaagagcagcgccatcagcgccggcgtgatcgagatcaccagccagaagatgctggagatgagccacaacaacggcctgcccagcaccatcagcaacaacagcatcgtggaggaggacgtggtggactgcgtggtgctggacaacaagaccggcatcaagaacttcaagacctacggcaacaccaacgacagattcagccccatcagcgccgacgccacccacttcagcagcaacaacagcggcaccgacaagaacatcagcgaggcccccgccagcgaggccagcagcaccgtgaccgccagaatcgacagactgatcaacgagttcgcccagtgcggcctgaccaagctgcccaagaacgagaagaagatcctgagcagcgtggccagcaagaagaagaagaagagcagacagcaggccatcaacagcagataccaggacggccagctggccaccaagggcatcctgaacaagaacgagagaatcaacaccaagggcagaatcaccaaggagatgatcgtgcaggacagcgacagccccctgaagggcggcatcctgtgcgaggaggacctgcagaagagcgacaccgtgatcgagagcaacaccttctgcagcaagagcaacctgaacagcaccatcagcaagaacttccacagaaacaagctgaacaccacccagaacagcaaggtgcagggcctgctgaccaagagaaagagcagaagcctgaacaagatcagcctgggcgcccccaagaagagagagatcggccagagagacaaggtgttcccccacaacgagagcaagtactgcaagagcaccttcgagaacaagagcctgttccacgtgttcaacatcctggagcagaagcccaaggacttctacgccccccagagccaggccgaggtggccagcggctacctgagaggcatggccaagaagagcctggtgagcaaggtgaccgacagccacatcaccctgaagagccagaagaagagaaagggcgacaaggtgaaggccagcgccatcctgagcaagcagcacgccaccaccagagccaacagcctggccagcctgaagaagcccgacttccccgaggccatcgcccaccacagcatccagaactacatccagagctggctgcagaacatcaacccctaccccaccctgaagcccatcaagagcgcccccgtgtgcagaaacgagaccagcgtggtgaactgcagcaacaacagcttcagcggcaacgacccccacaccaacagcggcaagatcagcaacttcgtgatggagagcaacaagcacatcaccaagatcgccggcctgaccggcgacaacctgtgcaaggagggcgacaagagcttcatcgccaacgacaccggcgaggaggacctgcacgagacccaggtgggcagcctgaacgacgcctacctggtgcccctgcacgagcactgcaccctgagccagagcgccatcaacgaccacaacaccaagagccacatcgccgccgagaagagcggccccgagaagaagctggtgtaccaggagatcaacctggccagaaagagacagagcgtggaggccgccatccaggtggaccccatcgaggaggagacccccaaggacctgctgcccgtgctgatgctgcaccagctgcaggccagcgtgcccggcatccacaagacccagaacggcgtggtgcagatgcccggcagcctggccggcgtgcccttccacagcgccatctgcaacagcagcaccaacctgctgctggcctggctgctggtgctgaacctgaagggcagcatgaacagcttctgccaggtggacgcccacaaggccaccaacaagagcagcgagaccctggccctgctggagatcctgaagcacatcgccatcaccgaggaggccgacgacctgaaggccgccgtggccaacctggtggagagcaccaccagccacttcggcctgagcgagaaggagcaggacatggtgcccatcgacctgagcgccaactgcagcaccgtgaacatccagagcgtgcccaagtgcagcgagaacgagagaacccagggcatcagcagcctggacggcggctgcagcgccagcgaggcctgcgcccccgaggtgtgcgtgctggaggtgacctgcagcccctgcgagatgtgcaccgtgaacaaggcctacagccccaaggagacctgcaaccccagcgacaccttcttccccagcgacggctacggcgtggaccagaccagcatgaacaaggcctgcttcctgggcgaggtgtgcagcctgaccgacaccgtgttcagcgacaaggcctgcgcccagaaggagaaccacacctacgagggcgcctgccccatcgacgagacctacgtgcccgtgaacgtgtgcaacaccatcgacttcctgaacagcaaggagaacacctacaccgacaacctggacagcaccgaggagctggagagaggcgacgacatccagaaggacctgaacatcctgaccgaccccgagtacaagaacggcttcaacaccctggtgagccaccagaacgtgagcaacctgagcagctgcggcctgtgcctgagcgagaaggaggccgagctggacaagaagcacagcagcctggacgacttcgagaactgcagcctgagaaagttccaggacgagaacgcctacaccagcttcgacatggaggagcccagaaccagcgaggagcccggcagcatcaccaacagcatgaccagcagcgagagaaacatcagcgagctggagagcttcgaggagctggagaaccacgacaccgacatcttcaacaccgtggtgaacggcggcgagcaggccaccgaggagctgatccaggaggaggtggaggccagcaagaccctggagctgatcgacatcagcagcaagaacatcatggaggagaagagaatgaacggcatcatctacgagatcatcagcaagagactggccaccccccccagcctggacttctgctacgacagcaagcagaacagcgagaaggagaccaacgagggcgagaccaagatggtgaagatgatggtgaagaccatggagaccggcagctacagcgagagcagccccgacctgaagaagtgcatcaagagccccgtgaccagcgactggagcgactacagacccgacagcgacagcgagcagccctacaagaccagcagcgacgaccccaacgacagcggcgagctgacccaggagaaggagtacaacatcggcttcgtgaagagagccatcgagaagctgtacggcaaggccgacatcatcaagcccagcttcttccccggcagcaccagaaagagccaggtgtgcccctacaacagcgtggagttccagtgcagcagaaaggccagcctgtacgacagcgagggccagagcttcggcagcagcgagcaggtgagcagcagcagcagcatgctgcaggagttccaggaggagagacaggacaagtgcgacgtgagcgccgtgagagacaactactgcagaggcgacatcgtggagcccggcaccaagcagaacgacgacagcagaatcctgaccgacatcgaggagggcgtgctgatcgacaagggcaagtggctgctgaaggagaaccacctgctgagaatgagcagcgagaaccccggcatgtgcggcaacgccgacaccaccagcgtggacaccctgctggacaacaacagcagcgaggtgccctacagccacttcggcaacctggcccccggccccaccatggacgagctgagcagcagcgagctggaggagctgacccagcccctggagctgaagtgcaactacttcaacatgccccacggcagcgacagcgagcccttccacgaggacctgctggacgtgagaaacgagacctgcgccaaggagagaatcgccaaccaccacaccgaggagaagggcagccaccagagcgagagagtgtgcaccagcgtgacccacagcttcatcagcgccggcaacaaggtgtaccccgtgagcgacgacgccatcaagaaccagcccctgcccggcagcaacatgatccacggcaccctgcaggaggccgacagcctggacaagctgtacgccctgtgcggccagcactgccccatcctgaccgtgatcatccagcccatgaacgaggaggacagaggcttcgcctacagaaaggagagcgacatcgagaacttcctgggcttctacctgtggatgaagatccacccctacctgctgcagaccgacaagaacgtgttcagagaggagaacaacaaggccagcatgagacagaacctgatcgacaacgccatcggcgacatcttcgaccagttctacttcagcaacaccttcgacctgatgggcaagagaagaaagcagaagagaatcaacttcctgggcctggaggaggagggcaacctgaagaagttccagcccgacctgaaggagagattctgcatgaacttcctgcacaccagcctgctggtggtgggcaacgtggacagcaacacccaggacctgagcggccagaccaacgagatcttcaaggccgtggacgagaacaacaacctgctgaacaacagattccagggcagcagaaccaacctgaaccaggtggtgagagagaacatcaactgccactacttcttcgagatgctgggccaggcctgcctgctggacatctgccaggtggagaccagcctgaacatcagcaacagaaacatcctggagctgtgcatgttcgagggcgagaacctgttcatctgggaggaggaggacatcctgaacctgaccgacctggagagcagcagagagcaggaggacctgtag

SEQ ID NO: 12634 - DNA, 1212 bp, synthetic construct
  misc_feature 1..1212: note = Description of Artificial Sequence: Synthetic coding sequence
  source 1..1212: mol_type = other DNA
atgaccccccccctgctgcaccacgacctgaagacccagaacatcctgctggacaacgagttccacgtgaagatcgccgacttcggcctgagcaagtggagaatgatgagcctgagccagagcagaagcagcaagagcgcccccgagggcggcaccatcatctacatgccccccgagaactacgagcccggccagaagagcagagccagcatcaagcacgacatctacagctacgccgtgatcacctgggaggtgctgagcagaaagcagcccttcgaggacgtgaccaaccccctgcagatcatgtacagcgtgagccagggccacagacccgtgatcaacgaggagagcctgccctacgacatcccccacagagccagaatgatcagcctgatcgagagcggctgggcccagaaccccgacgagagacccagcttcctgaagtgcctgatcgagctggagcccgtgctgagaaccttcgaggagatcaccttcctggaggccgtgatccagctgaagaagaccaagctgcagagcgtgagcagcgccatccacctgtgcgacaagaagaagatggagctgagcctgaacatccccgtgaaccacggcccccaggaggagagctgcggcagcagccagctgcacgagaacagcggcagccccgagaccagcagaagcctgcccgccccccaggacaacgacttcctgagcagaaaggcccaggactgctacttcatgaagctgcaccactgccccggcaaccacagctgggacagcaccatcagcggcagccagagagccgccttctgcgaccacaagaccaccccctgcagcagcgccatcatcaaccccctgagcaccgccggcaacagcgagagactgcagcccggcatcgcccagcagtggatccagagcaagagagaggacatcgtgaaccagatgaccgaggcctgcctgaaccagagcctggacgccctgctgagcagagacctgatcatgaaggaggactacgagctggtgagcaccaagcccaccagaaccagcaaggtgagacagctgctggacaccaccgacatccagggcgaggagttcgccaaggtgatcgtgcagaagctgaaggacaacaagcagatgggcctgcagccctaccccgagatcctggtggtgagcagaagccccagcctgaacctgctgcagaacaagagcatgtag

SEQ ID NO: 12635 - DNA, 10377 bp, synthetic construct
  misc_feature 1..10377: note = Description of Artificial Sequence: Synthetic coding sequence
  source 1..10377: mol_type = other DNA
atggagagaagcggctgggccagacagaccttcctgctggccctgctgctgggcgccaccctgagagccagagccgccgccggctactaccccagattcagccccttcttcttcctgtgcacccaccacggcgagctggagggcgacggcgagcagggcgaggtgctgatcagcctgcacatcgccggcaaccccacctactacgtgcccggccaggagtaccacgtgaccatcagcaccagcaccttcttcgacggcctgctggtgaccggcctgtacaccagcaccagcgtgcaggccagccagagcatcggcggcagcagcgccttcggcttcggcatcatgagcgaccaccagttcggcaaccagttcatgtgcagcgtggtggccagccacgtgagccacctgcccaccaccaacctgagcttcatctggatcgccccccccgccggcaccggctgcgtgaacttcatggccaccgccacccacagaggccaggtgatcttcaaggacgccctggcccagcagctgtgcgagcagggcgcccccaccgacgtgaccgtgcacccccacctggccgagatccacagcgacagcatcatcctgagagacgacttcgacagctaccaccagctgcagctgaaccccaacatctgggtggagtgcaacaactgcgagaccggcgagcagtgcggcgccatcatgcacggcaacgccgtgaccttctgcgagccctacggccccagagagctgatcaccaccggcctgaacaccaccaccgccagcgtgctgcagttcagcatcggcagcggcagctgcagattcagctacagcgaccccagcatcatcgtgctgtacgccaagaacaacagcgccgactggatccagctggagaagatcagagcccccagcaacgtgagcaccatcatccacatcctgtacctgcccgaggacgccaagggcgagaacgtgcagttccagtggaagcaggagaacctgagagtgggcgaggtgtacgaggcctgctgggccctggacaacatcctgatcatcaacagcgcccacagacaggtggtgctggaggacagcctggaccccgtggacaccggcaactggctgttcttccccggcgccaccgtgaagcacagctgccagagcgacggcaacagcatctacttccacggcaacgagggcagcgagttcaacttcgccaccaccagagacgtggacctgagcaccgaggacatccaggagcagtggagcgaggagttcgagagccagcccaccggctgggacgtgctgggcgccgtgatcggcaccgagtgcggcaccatcgagagcggcctgagcatggtgttcctgaaggacggcgagagaaagctgtgcacccccagcatggacaccaccggctacggcaacctgagattctacttcgtgatgggcggcatctgcgaccccggcaacagccacgagaacgacatcatcctgtacgccaagatcgagggcagaaaggagcacatcaccctggacaccctgagctacagcagctacaaggtgcccagcctggtgagcgtggtgatcaaccccgagctgcagacccccgccaccaagttctgcctgagacagaagaaccaccagggccacaacagaaacgtgtgggccgtggacttcttccacgtgctgcccgtgctgcccagcaccatgagccacatgatccagttcagcatcaacctgggctgcggcacccaccagcccggcaacagcgtgagcctggagttcagcaccaaccacggcagaagctggagcctgctgcacaccgagtgcctgcccgagatctgcgccggcccccacctgccccacagcaccgtgtacagcagcgagaactacagcggctggaacagaatcaccatccccctgcccaacgccgccctgaccagaaacaccagaatcagatggagacagaccggccccatcctgggcaacatgtgggccatcgacaacgtgtacatcggccccagctgcctgaagttctgcagcggcagaggccagtgcaccagacacggctgcaagtgcgaccccggcttcagcggccccgcctgcgagatggccagccagaccttccccatgttcatcagcgagagcttcggcagcagcagactgagcagctaccacaacttctacagcatcagaggcgccgaggtgagcttcggctgcggcgtgctggccagcggcaaggccctggtgttcaacaaggacggcagaagacagctgatcaccagcttcctggacagcagccagagcagattcctgcagttcaccctgagactgggcagcaagagcgtgctgagcacctgcagagcccccgaccagcccggcgagggcgtgctgctgcactacagctacgacaacggcatcacctggaagctgctggagcactacagctacctgagctaccacgagcccagaatcatcagcgtggagctgcccggcgacgccaagcagttcggcatccagttcagatggtggcagccctaccacagcagccagagagaggacgtgtgggccatcgacgagatcatcatgaccagcgtgctgttcaacagcatcagcctggacttcaccaacctggtggaggtgacccagagcctgggcttctacctgggcaacgtgcagccctactgcggccacgactggaccctgtgcttcaccggcgacagcaagctggccagcagcatgagatacgtggagacccagagcatgcagatcggcgccagctacatgatccagttcagcctggtgatgggctgcggccagaagtacaccccccacatggacaaccaggtgaagctggagtacagcaccaaccacggcctgacctggcacctggtgcaggaggagtgcctgcccagcatgcccagctgccaggagttcaccagcgccagcatctaccacgccagcgagttcacccagtggagaagagtgatcgtgctgctgccccagaagacctggagcagcgccaccagattcagatggagccagagctactacaccgcccaggacgagtgggccctggacagcatctacatcggccagcagtgccccaacatgtgcagcggccacggcagctgcgaccacggcatctgcagatgcgaccagggctaccagggcaccgagtgccaccccgaggccgccctgcccagcaccatcatgagcgacttcgagaaccagaacggctgggagagcgactggcaggaggtgatcggcggcgagatcgtgaagcccgagcagggctgcggcgtgatcagcagcggcagcagcctgtacttcagcaaggccggcaagagacagctggtgagctgggacctggacaccagctgggtggacttcgtgcagttctacatccagatcggcggcgagagcgccagctgcaacaagcccgacagcagagaggagggcgtgctgctgcagtacagcaacaacggcggcatccagtggcacctgctggccgagatgtacttcagcgacttcagcaagcccagattcgtgtacctggagctgcccgccgccgccaagaccccctgcaccagattcagatggtggcagcccgtgttcagcggcgaggactacgaccagtgggccgtggacgacatcatcatcctgagcgagaagcagaagcagatcatccccgtgatcaaccccaccctgccccagaacttctacgagaagcccgccttcgactaccccatgaaccagatgagcgtgtggctgatgctggccaacgagggcatggtgaagaacgagaccttctgcgccgccacccccagcgccatgatcttcggcaagagcgacggcgacagattcgccgtgaccagagacctgaccctgaagcccggctacgtgctgcagttcaagctgaacatcggctgcgccaaccagttcagcagcaccgcccccgtgctgctgcagtacagccacgacgccggcatgagctggttcctggtgaaggagggctgctaccccgccagcgccggcaagggctgcgagggcaacagcagagagctgagcgagcccaccatgtaccacaccggcgacttcgaggagtggaccagaatcaccatcgtgatccccagaagcctggccagcagcaagaccagattcagatggatccaggagagcagcagccagaagaacgtgccccccttcggcctggacggcgtgtacatcagcgagccctgccccagctactgcagcggccacggcgactgcatcagcggcgtgtgcttctgcgacctgggctacaccgccgcccagggcacctgcgtgagcaacgtgcccaaccacaacgagatgttcgacagattcgagggcaagctgagccccctgtggtacaagatcaccggcgcccaggtgggcaccggctgcggcaccctgaacgacggcaagagcctgtacttcaacggccccggcaagagagaggccagaaccgtgcccctggacaccagaaacatcagactggtgcagttctacatccagatcggcagcaagaccagcggcatcacctgcatcaagcccagaaccagaaacgagggcctgatcgtgcagtacagcaacgacaacggcatcctgtggcacctgctgagagagctggacttcatgagcttcctggagccccagatcatcagcatcgacctgccccaggacgccaagacccccgccaccgccttcagatggtggcagccccagcacggcaagcacagcgcccagtgggccctggacgacgtgctgatcggcatgaacgacagcagccagaccggcttccaggacaagttcgacggcagcatcgacctgcaggccaactggtacagaatccagggcggccaggtggacatcgactgcctgagcatggacaccgccctgatcttcaccgagaacatcggcaagcccagatacgccgagacctgggacttccacgtgagcgccagcaccttcctgcagttcgagatgagcatgggctgcagcaagcccttcagcaacagccacagcgtgcagctgcagtacagcctgaacaacggcaaggactggcacctggtgaccgaggagtgcgtgccccccaccatcggctgcctgcactacaccgagagcagcatctacaccagcgagagattccagaactggaagagaatcaccgtgtacctgcccctgagcaccatcagccccagaaccagattcagatggatccaggccaactacaccgtgggcgccgacagctgggccatcgacaacgtggtgctggccagcggctgcccctggatgtgcagcggcagaggcatctgcgacgccggcagatgcgtgtgcgacagaggcttcggcggcccctactgcgtgcccgtggtgcccctgcccagcatcctgaaggacgacttcaacggcaacctgcaccccgacctgtggcccgaggtgtacggcgccgagagaggcaacctgaacggcgagaccatcaagagcggcaccagcctgatcttcaagggcgagggcctgagaatgctgatcagcagagacctggactgcaccaacaccatgtacgtgcagttcagcctgagattcatcgccaagagcacccccgagagaagccacagcatcctgctgcagttcagcatcagcggcggcatcacctggcacctgatggacgagttctacttcccccagaccaccaacatcctgttcatcaacgtgcccctgccctacaccgcccagaccaacgccaccagattcagactgtggcagccctacaacaacggcaagaaggaggagatctggatcgtggacgacttcatcatcgacggcaacaacgtgaacaaccccgtgatgctgctggacaccttcgacttcggccccagagaggacaactggttcttctaccccggcggcaacatcggcctgtactgcccctacagcagcaagggcgcccccgaggaggacagcgccatggtgttcgtgagcaacgaggtgggcgagcacagcatcaccaccagagacctgaacgtgaacgagaacaccatcatccagttcgagatcaacgtgggctgcagcaccgacagcagcagcgccgaccccgtgagactggagttcagcagagacttcggcgccacctggcacctgctgctgcccctgtgctaccacagcagcagccacgtgagcagcctgtgcagcaccgagcaccaccccagcagcacctactacgccggcaccatgcagggctggagaagagaggtggtgcacttcggcaagctgcacctgtgcggcagcgtgagattcagatggtaccagggcttctaccccgccggcagccagcccgtgacctgggccatcgacaacgtgtacatcggcccccagtgcgaggagatgtgcaacggccagggcagctgcatcaacggcaccaagtgcatctgcgaccccggctacagcggccccacctgcaagatcagcaccaagaaccccgacttcctgaaggacgacttcgagggccagctggagagcgacagattcctgctgatgagcggcggcaagcccagcagaaagtgcggcatcctgagcagcggcaacaacctgttcttcaacgaggacggcctgagaatgctgatgaccagagacctggacctgagccacgccagattcgtgcagttcttcatgagactgggctgcggcaagggcgtgcccgaccccagaagccagcccgtgctgctgcagtacagcctgaacggcggcctgagctggagcctgctgcaggagttcctgttcagcaacagcagcaacgtgggcagatacatcgccctggagatccccctgaaggccagaagcggcagcaccagactgagatggtggcagcccagcgagaacggccacttctacagcccctgggtgatcgaccagatcctgatcggcggcaacatcagcggcaacaccgtgctggaggacgacttcaccaccctggacagcagaaagtggctgctgcaccccggcggcaccaagatgcccgtgtgcggcagcaccggcgacgccctggtgttcatcgagaaggccagcaccagatacgtggtgagcaccgacgtggccgtgaacgaggacagcttcctgcagatcgacttcgccgccagctgcagcgtgaccgacagctgctacgccatcgagctggagtacagcgtggacctgggcctgagctggcaccccctggtgagagactgcctgcccaccaacgtggagtgcagcagataccacctgcagagaatcctggtgagcgacaccttcaacaagtggaccagaatcaccctgcccctgcccccctacaccagaagccaggccaccagattcagatggcaccagcccgcccccttcgacaagcagcagacctgggccatcgacaacgtgtacatcggcgacggctgcatcgacatgtgcagcggccacggcagatgcatccagggcaactgcgtgtgcgacgagcagtggggcggcctgtactgcgacgaccccgagaccagcctgcccacccagctgaaggacaacttcaacagagcccccagcagccagaactggctgaccgtgaacggcggcaagctgagcaccgtgtgcggcgccgtggccagcggcatggccctgcacttcagcggcggctgcagcagactgctggtgaccgtggacctgaacctgaccaacgccgagttcatccagttctacttcatgtacggctgcctgatcacccccaacaacagaaaccagggcgtgctgctggagtacagcgtgaacggcggcatcacctggaacctgctgatggagatcttctacgaccagtacagcaagcccggcttcgtgaacatcctgctgccccccgacgccaaggagatcgccaccagattcagatggtggcagcccagacacgacggcctggaccagaacgactgggccatcgacaacgtgctgatcagcggcagcgccgaccagagaaccgtgatgctggacaccttcagcagcgcccccgtgccccagcacgagagaagccccgccgacgccggccccgtgggcagaatcgccttcgacatgttcatggaggacaagaccagcgtgaacgagcactggctgttccacgacgactgcaccgtggagagattctgcgacagccccgacggcgtgatgctgtgcggcagccacgacggcagagaggtgtacgccgtgacccacgacctgacccccaccgagggctggatcatgcagttcaagatcagcgtgggctgcaaggtgagcgagaagatcgcccagaaccagatccacgtgcagtacagcaccgacttcggcgtgagctggaactacctggtgccccagtgcctgcccgccgaccccaagtgcagcggcagcgtgagccagcccagcgtgttcttccccaccaagggctggaagagaatcacctaccccctgcccgagagcctggtgggcaaccccgtgagattcagattctaccagaagtacagcgacatgcagtgggccatcgacaacttctacctgggccccggctgcctggacaactgcagaggccacggcgactgcctgagagagcagtgcatctgcgaccccggctacagcggccccaactgctacctgacccacaccctgaagaccttcctgaaggagagattcgacagcgaggagatcaagcccgacctgtggatgagcctggagggcggcagcacctgcaccgagtgcggcatcctggccgaggacaccgccctgtacttcggcggcagcaccgtgagacaggccgtgacccaggacctggacctgagaggcgccaagttcctgcagtactggggcagaatcggcagcgagaacaacatgaccagctgccacagacccatctgcagaaaggagggcgtgctgctggactacagcaccgacggcggcatcacctggaccctgctgcacgagatggactaccagaagtacatcagcgtgagacacgactacatcctgctgcccgaggacgccctgaccaacaccaccagactgagatggtggcagcccttcgtgatcagcaacggcatcgtggtgagcggcgtggagagagcccagtgggccctggacaacatcctgatcggcggcgccgagatcaaccccagccagctggtggacaccttcgacgacgagggcaccagccacgaggagaactggagcttctaccccaacgccgtgagaaccgccggcttctgcggcaaccccagcttccacctgtactggcccaacaagaagaaggacaagacccacaacgccctgagcagcagagagctgatcatccagcccggctacatgatgcagttcaagatcgtggtgggctgcgaggccaccagctgcggcgacctgcacagcgtgatgctggagtacaccaaggacgccagaagcgacagctggcagctggtgcagacccagtgcctgcccagcagcagcaacagcatcggctgcagccccttccagttccacgaggccaccatctacaacagcgtgaacagcagcagctggaagagaatcaccatccagctgcccgaccacgtgagcagcagcgccacccagttcagatggatccagaagggcgaggagaccgagaagcagagctgggccatcgaccacgtgtacatcggcgaggcctgccccaagctgtgcagcggccacggctactgcaccaccggcgccatctgcatctgcgacgagagcttccagggcgacgactgcagcgtgttcagccacgacctgcccagctacatcaaggacaacttcgagagcgccagagtgaccgaggccaactgggagaccatccagggcggcgtgatcggcagcggctgcggccagctggccccctacgcccacggcgacagcctgtacttcaacggctgccagatcagacaggccgccaccaagcccctggacctgaccagagccagcaagatcatgttcgtgctgcagatcggcagcatgagccagaccgacagctgcaacagcgacctgagcggcccccacgccgtggacaaggccgtgctgctgcagtacagcgtgaacaacggcatcacctggcacgtgatcgcccagcaccagcccaaggacttcacccaggcccagagagtgagctacaacgtgcccctggaggccagaatgaagggcgtgctgctgagatggtggcagcccagacacaacggcaccggccacgaccagtgggccctggaccacgtggaggtggtgctgaccagaaagcagaactacatgatgaacttcagcagacagcacggcctgagacacttctacaacagaagaagaagaagcctgagaagatacccctag

SEQ ID NO: 12636 - DNA, 10383 bp, synthetic construct
  misc_feature 1..10383: note = Description of Artificial Sequence: Synthetic coding sequence
  source 1..10383: mol_type = other DNA
atggagagaagcggctgggccagacagaccttcctgctggccctgctgctgggcgccaccctgagagccagagccgccgccggctactaccccagattcagccccttcttcttcctgtgcacccaccacggcgagctggagggcgacggcgagcagggcgaggtgctgatcagcctgcacatcgccggcaaccccacctactacgtgcccggccaggagtaccacgtgaccatcagcaccagcaccttcttcgacggcctgctggtgaccggcctgtacaccagcaccagcgtgcaggccagccagagcatcggcggcagcagcgccttcggcttcggcatcatgagcgaccaccagttcggcaaccagttcatgtgcagcgtggtggccagccacgtgagccacctgcccaccaccaacctgagcttcatctggatcgccccccccgccggcaccggctgcgtgaacttcatggccaccgccacccacagaggccaggtgatcttcaaggacgccctggcccagcagctgtgcgagcagggcgcccccaccgacgtgaccgtgcacccccacctggccgagatccacagcgacagcatcatcctgagagacgacttcgacagctaccaccagctgcagctgaaccccaacatctgggtggagtgcaacaactgcgagaccggcgagcagtgcggcgccatcatgcacggcaacgccgtgaccttctgcgagccctacggccccagagagctgatcaccaccggcctgaacaccaccaccgccagcgtgctgcagttcagcatcggcagcggcagctgcagattcagctacagcgaccccagcatcatcgtgctgtacgccaagaacaacagcgccgactggatccagctggagaagatcagagcccccagcaacgtgagcaccatcatccacatcctgtacctgcccgaggacgccaagggcgagaacgtgcagttccagtggaagcaggagaacctgagagtgggcgaggtgtacgaggcctgctgggccctggacaacatcctgatcatcaacagcgcccacagacaggtggtgctggaggacagcctggaccccgtggacaccggcaactggctgttcttccccggcgccaccgtgaagcacagctgccagagcgacggcaacagcatctacttccacggcaacgagggcagcgagttcaacttcgccaccaccagagacgtggacctgagcaccgaggacatccaggagcagtggagcgaggagttcgagagccagcccaccggctgggacgtgctgggcgccgtgatcggcaccgagtgcggcaccatcgagagcggcctgagcatggtgttcctgaaggacggcgagagaaagctgtgcacccccagcatggacaccaccggctacggcaacctgagattctacttcgtgatgggcggcatctgcgaccccggcaacagccacgagaacgacatcatcctgtacgccaagatcgagggcagaaaggagcacatcaccctggacaccctgagctacagcagctacaaggtgcccagcctggtgagcgtggtgatcaaccccgagctgcagacccccgccaccaagttctgcctgagacagaagaaccaccagggccacaacagaaacgtgtgggccgtggacttcttccacgtgctgcccgtgctgcccagcaccatgagccacatgatccagttcagcatcaacctgggctgcggcacccaccagcccggcaacagcgtgagcctggagttcagcaccaaccacggcagaagctggagcctgctgcacaccgagtgcctgcccgagatctgcgccggcccccacctgccccacagcaccgtgtacagcagcgagaactacagcggctggaacagaatcaccatccccctgcccaacgccgccctgaccagaaacaccagaatcagatggagacagaccggccccatcctgggcaacatgtgggccatcgacaacgtgtacatcggccccagctgcctgaagttctgcagcggcagaggccagtgcaccagacacggctgcaagtgcgaccccggcttcagcggccccgcctgcgagatggccagccagaccttccccatgttcatcagcgagagcttcggcagcagcagactgagcagctaccacaacttctacagcatcagaggcgccgaggtgagcttcggctgcggcgtgctggccagcggcaaggccctggtgttcaacaaggacggcagaagacagctgatcaccagcttcctggacagcagccagagcagattcctgcagttcaccctgagactgggcagcaagagcgtgctgagcacctgcagagcccccgaccagcccggcgagggcgtgctgctgcactacagctacgacaacggcatcacctggaagctgctggagcactacagctacctgagctaccacgagcccagaatcatcagcgtggagctgcccggcgacgccaagcagttcggcatccagttcagatggtggcagccctaccacagcagccagagagaggacgtgtgggccatcgacgagatcatcatgaccagcgtgctgttcaacagcatcagcctggacttcaccaacctggtggaggtgacccagagcctgggcttctacctgggcaacgtgcagccctactgcggccacgactggaccctgtgcttcaccggcgacagcaagctggccagcagcatgagatacgtggagacccagagcatgcagatcggcgccagctacatgatccagttcagcctggtgatgggctgcggccagaagtacaccccccacatggacaaccaggtgaagctggagtacagcaccaaccacggcctgacctggcacctggtgcaggaggagtgcctgcccagcatgcccagctgccaggagttcaccagcgccagcatctaccacgccagcgagttcacccagtggagaagagtgatcgtgctgctgccccagaagacctggagcagcgccaccagattcagatggagccagagctactacaccgcccaggacgagtgggccctggacagcatctacatcggccagcagtgccccaacatgtgcagcggccacggcagctgcgaccacggcatctgcagatgcgaccagggctaccagggcaccgagtgccaccccgaggccgccctgcccagcaccatcatgagcgacttcgagaaccagaacggctgggagagcgactggcaggaggtgatcggcggcgagatcgtgaagcccgagcagggctgcggcgtgatcagcagcggcagcagcctgtacttcagcaaggccggcaagagacagctggtgagctgggacctggacaccagctgggtggacttcgtgcagttctacatccagatcggcggcgagagcgccagctgcaacaagcccgacagcagagaggagggcgtgctgctgcagtacagcaacaacggcggcatccagtggcacctgctggccgagatgtacttcagcgacttcagcaagcccagattcgtgtacctggagctgcccgccgccgccaagaccccctgcaccagattcagatggtggcagcccgtgttcagcggcgaggactacgaccagtgggccgtggacgacatcatcatcctgagcgagaagcagaagcagatcatccccgtgatcaaccccaccctgccccagaacttctacgagaagcccgccttcgactaccccatgaaccagatgagcgtgtggctgatgctggccaacgagggcatggtgaagaacgagaccttctgcgccgccacccccagcgccatgatcttcggcaagagcgacggcgacagattcgccgtgaccagagacctgaccctgaagcccggctacgtgctgcagttcaagctgaacatcggctgcgccaaccagttcagcagcaccgcccccgtgctgctgcagtacagccacgacgccggcatgagctggttcctggtgaaggagggctgctaccccgccagcgccggcaagggctgcgagggcaacagcagagagctgagcgagcccaccatgtaccacaccggcgacttcgaggagtggaccagaatcaccatcgtgatccccagaagcctggccagcagcaagaccagattcagatggatccaggagagcagcagccagaagaacgtgccccccttcggcctggacggcgtgtacatcagcgagccctgccccagctactgcagcggccacggcgactgcatcagcggcgtgtgcttctgcgacctgggctacaccgccgcccagggcacctgcgtgagcaacgtgcccaaccacaacgagatgttcgacagattcgagggcaagctgagccccctgtggtacaagatcaccggcgcccaggtgggcaccggctgcggcaccctgaacgacggcaagagcctgtacttcaacggccccggcaagagagaggccagaaccgtgcccctggacaccagaaacatcagactggtgcagttctacatccagatcggcagcaagaccagcggcatcacctgcatcaagcccagaaccagaaacgagggcctgatcgtgcagtacagcaacgacaacggcatcctgtggcacctgctgagagagctggacttcatgagcttcctggagccccagatcatcagcatcgacctgccccaggacgccaagacccccgccaccgccttcagatggtggcagccccagcacggcaagcacagcgcccagtgggccctggacgacgtgctgatcggcatgaacgacagcagccagaccggcttccaggacaagttcgacggcagcatcgacctgcaggccaactggtacagaatccagggcggccaggtggacatcgactgcctgagcatggacaccgccctgatcttcaccgagaacatcggcaagcccagatacgccgagacctgggacttccacgtgagcgccagcaccttcctgcagttcgagatgagcatgggctgcagcaagcccttcagcaacagccacagcgtgcagctgcagtacagcctgaacaacggcaaggactggcacctggtgaccgaggagtgcgtgccccccaccatcggctgcctgcactacaccgagagcagcatctacaccagcgagagattccagaactggaagagaatcaccgtgtacctgcccctgagcaccatcagccccagaaccagattcagatggatccaggccaactacaccgtgggcgccgacagctgggccatcgacaacgtggtgctggccagcggctgcccctggatgtgcagcggcagaggcatctgcgacgccggcagatgcgtgtgcgacagaggcttcggcggcccctactgcgtgcccgtggtgcccctgcccagcatcctgaaggacgacttcaacggcaacctgcaccccgacctgtggcccgaggtgtacggcgccgagagaggcaacctgaacggcgagaccatcaagagcggcaccagcctgatcttcaagggcgagggcctgagaatgctgatcagcagagacctggactgcaccaacaccatgtacgtgcagttcagcctgagattcatcgccaagagcacccccgagagaagccacagcatcctgctgcagttcagcatcagcggcggcatcacctggcacctgatggacgagttctacttcccccagaccaccaacatcctgttcatcaacgtgcccctgccctacaccgcccagaccaacgccaccagattcagactgtggcagccctacaacaacggcaagaaggaggagatctggatcgtggacgacttcatcatcgacggcaacaacgtgaacaaccccgtgatgctgctggacaccttcgacttcggccccagagaggacaactggttcttctaccccggcggcaacatcggcctgtactgcccctacagcagcaagggcgcccccgaggaggacagcgccatggtgttcgtgagcaacgaggtgggcgagcacagcatcaccaccagagacctgaacgtgaacgagaacaccatcatccagttcgagatcaacgtgggctgcagcaccgacagcagcagcgccgaccccgtgagactggagttcagcagagacttcggcgccacctggcacctgctgctgcccctgtgctaccacagcagcagccacgtgagcagcctgtgcagcaccgagcaccaccccagcagcacctactacgccggcaccatgcagggctggagaagagaggtggtgcacttcggcaagctgcacctgtgcggcagcgtgagattcagatggtaccagggcttctaccccgccggcagccagcccgtgacctgggccatcgacaacgtgtacatcggcccccagtgcgaggagatgtgcaacggccagggcagctgcatcaacggcaccaagtgcatctgcgaccccggctacagcggccccacctgcaagatcagcaccaagaaccccgacttcctgaaggacgacttcgagggccagctggagagcgacagattcctgctgatgagcggcggcaagcccagcagaaagtgcggcatcctgagcagcggcaacaacctgttcttcaacgaggacggcctgagaatgctgatgaccagagacctggacctgagccacgccagattcgtgcagttcttcatgagactgggctgcggcaagggcgtgcccgaccccagaagccagcccgtgctgctgcagtacagcctgaacggcggcctgagctggagcctgctgcaggagttcctgttcagcaacagcagcaacgtgggcagatacatcgccctggagatccccctgaaggccagaagcggcagcaccagactgagatggtggcagcccagcgagaacggccacttctacagcccctgggtgatcgaccagatcctgatcggcggcaacatcagcggcaacaccgtgctggaggacgacttcaccaccctggacagcagaaagtggctgctgcaccccggcggcaccaagatgcccgtgtgcggcagcaccggcgacgccctggtgttcatcgagaaggccagcaccagatacgtggtgagcaccgacgtggccgtgaacgaggacagcttcctgcagatcgacttcgccgccagctgcagcgtgaccgacagctgctacgccatcgagctggagtacagcgtggacctgggcctgagctggcaccccctggtgagagactgcctgcccaccaacgtggagtgcagcagataccacctgcagagaatcctggtgagcgacaccttcaacaagtggaccagaatcaccctgcccctgcccccctacaccagaagccaggccaccagattcagatggcaccagcccgcccccttcgacaagcagcagacctgggccatcgacaacgtgtacatcggcgacggctgcatcgacatgtgcagcggccacggcagatgcatccagggcaactgcgtgtgcgacgagcagtggggcggcctgtactgcgacgaccccgagaccagcctgcccacccagctgaaggacaacttcaacagagcccccagcagccagaactggctgaccgtgaacggcggcaagctgagcaccgtgtgcggcgccgtggccagcggcatggccctgcacttcagcggcggctgcagcagactgctggtgaccgtggacctgaacctgaccaacgccgagttcatccagttctacttcatgtacggctgcctgatcacccccaacaacagaaaccagggcgtgctgctggagtacagcgtgaacggcggcatcacctggaacctgctgatggagatcttctacgaccagtacagcaagcccggcttcgtgaacatcctgctgccccccgacgccaaggagatcgccaccagattcagatggtggcagcccagacacgacggcctggaccagaacgactgggccatcgacaacgtgctgatcagcggcagcgccgaccagagaaccgtgatgctggacaccttcagcagcgcccccgtgccccagcacgagagaagccccgccgacgccggccccgtgggcagaatcgccttcgacatgttcatggaggacaagaccagcgtgaacgagcactggctgttccacgacgactgcaccgtggagagattctgcgacagccccgacggcgtgatgctgtgcggcagccacgacggcagagaggtgtacgccgtgacccacgacctgacccccaccgagggctggatcatgcagttcaagatcagcgtgggctgcaaggtgagcgagaagatcgcccagaaccagatccacgtgcagtacagcaccgacttcggcgtgagctggaactacctggtgccccagtgcctgcccgccgaccccaagtgcagcggcagcgtgagccagcccagcgtgttcttccccaccaagggctggaagagaatcacctaccccctgcccgagagcctggtgggcaaccccgtgagattcagattctaccagaagtacagcgacatgcagtgggccatcgacaacttctacctgggccccggctgcctggacaactgcagaggccacggcgactgcctgagagagcagtgcatctgcgaccccggctacagcggccccaactgctacctgacccacaccctgaagaccttcctgaaggagagattcgacagcgaggagatcaagcccgacctgtggatgagcctggagggcggcagcacctgcaccgagtgcggcatcctggccgaggacaccgccctgtacttcggcggcagcaccgtgagacaggccgtgacccaggacctggacctgagaggcgccaagttcctgcagtactggggcagaatcggcagcgagaacaacatgaccagctgccacagacccatctgcagaaaggagggcgtgctgctggactacagcaccgacggcggcatcacctggaccctgctgcacgagatggactaccagaagtacatcagcgtgagacacgactacatcctgctgcccgaggacgccctgaccaacaccaccagactgagatggtggcagcccttcgtgatcagcaacggcatcgtggtgagcggcgtggagagagcccagtgggccctggacaacatcctgatcggcggcgccgagatcaaccccagccagctggtggacaccttcgacgacgagggcaccagccacgaggagaactggagcttctaccccaacgccgtgagaaccgccggcttctgcggcaaccccagcttccacctgtactggcccaacaagaagaaggacaagacccacaacgccctgagcagcagagagctgatcatccagcccggctacatgatgcagttcaagatcgtggtgggctgcgaggccaccagctgcggcgacctgcacagcgtgatgctggagtacaccaaggacgccagaagcgacagctggcagctggtgcagacccagtgcctgcccagcagcagcaacagcatcggctgcagccccttccagttccacgaggccaccatctacaacagcgtgaacagcagcagctggaagagaatcaccatccagctgcccgaccacgtgagcagcagcgccacccagttcagatggatccagaagggcgaggagaccgagaagcagagctgggccatcgaccacgtgtacatcggcgaggcctgccccaagctgtgcagcggccacggctactgcaccaccggcgccatctgcatctgcgacgagagcttccagggcgacgactgcagcgtgttcagccacgacctgcccagctacatcaaggacaacttcgagagcgccagagtgaccgaggccaactgggagaccatccagggcggcgtgatcggcagcggctgcggccagctggccccctacgcccacggcgacagcctgtacttcaacggctgccagatcagacaggccgccaccaagcccctggacctgaccagagccagcaagatcatgttcgtgctgcagatcggcagcatgagccagaccgacagctgcaacagcgacctgagcggcccccacgccgtggacaaggccgtgctgctgcagtacagcgtgaacaacggcatcacctggcacgtgatcgcccagcaccagcccaaggacttcacccaggcccagagagtgagctacaacgtgcccctggaggccagaatgaagggcgtgctgctgagatggtggcagcccagacacaacggcaccggccacgaccagtgggccctggaccacgtggaggtggtgctgttcagcaccagaaagcagaactacatgatgaacttcagcagacagcacggcctgagacacttctacaacagaagaagaagaagcctgagaagatacccctag

SEQ ID NO: 12637 - DNA, 2934 bp, synthetic construct
  misc_feature 1..2934: note = Description of Artificial Sequence: Synthetic coding sequence
  source 1..2934: mol_type = other DNA
atgtgcagcggccacggcagatgcatccagggcaactgcgtgtgcgacgagcagtggggcggcctgtactgcgacgaccccgagaccagcctgcccacccagctgaaggacaacttcaacagagcccccagcagccagaactggctgaccgtgaacggcggcaagctgagcaccgtgtgcggcgccgtggccagcggcatggccctgcacttcagcggcggctgcagcagactgctggtgaccgtggacctgaacctgaccaacgccgagttcatccagttctacttcatgtacggctgcctgatcacccccaacaacagaaaccagggcgtgctgctggagtacagcgtgaacggcggcatcacctggaacctgctgatggagatcttctacgaccagtacagcaagcccggcttcgtgaacatcctgctgccccccgacgccaaggagatcgccaccagattcagatggtggcagcccagacacgacggcctggaccagaacgactgggccatcgacaacgtgctgatcagcggcagcgccgaccagagaaccgtgatgctggacaccttcagcagcgcccccgtgccccagcacgagagaagccccgccgacgccggccccgtgggcagaatcgccttcgacatgttcatggaggacaagaccagcgtgaacgagcactggctgttccacgacgactgcaccgtggagagattctgcgacagccccgacggcgtgatgctgtgcggcagccacgacggcagagaggtgtacgccgtgacccacgacctgacccccaccgagggctggatcatgcagttcaagatcagcgtgggctgcaaggtgagcgagaagatcgcccagaaccagatccacgtgcagtacagcaccgacttcggcgtgagctggaactacctggtgccccagtgcctgcccgccgaccccaagtgcagcggcagcgtgagccagcccagcgtgttcttccccaccaagggctggaagagaatcacctaccccctgcccgagagcctggtgggcaaccccgtgagattcagattctaccagaagtacagcgacatgcagtgggccatcgacaacttctacctgggccccggctgcctggacaactgcagaggccacggcgactgcctgagagagcagtgcatctgcgaccccggctacagcggccccaactgctacctgacccacaccctgaagaccttcctgaaggagagattcgacagcgaggagatcaagcccgacctgtggatgagcctggagggcggcagcacctgcaccgagtgcggcatcctggccgaggacaccgccctgtacttcggcggcagcaccgtgagacaggccgtgacccaggacctggacctgagaggcgccaagttcctgcagtactggggcagaatcggcagcgagaacaacatgaccagctgccacagacccatctgcagaaaggagggcgtgctgctggactacagcaccgacggcggcatcacctggaccctgctgcacgagatggactaccagaagtacatcagcgtgagacacgactacatcctgctgcccgaggacgccctgaccaacaccaccagactgagatggtggcagcccttcgtgatcagcaacggcatcgtggtgagcggcgtggagagagcccagtgggccctggacaacatcctgatcggcggcgccgagatcaaccccagccagctggtggacaccttcgacgacgagggcaccagccacgaggagaactggagcttctaccccaacgccgtgagaaccgccggcttctgcggcaaccccagcttccacctgtactggcccaacaagaagaaggacaagacccacaacgccctgagcagcagagagctgatcatccagcccggctacatgatgcagttcaagatcgtggtgggctgcgaggccaccagctgcggcgacctgcacagcgtgatgctggagtacaccaaggacgccagaagcgacagctggcagctggtgcagacccagtgcctgcccagcagcagcaacagcatcggctgcagccccttccagttccacgaggccaccatctacaacagcgtgaacagcagcagctggaagagaatcaccatccagctgcccgaccacgtgagcagcagcgccacccagttcagatggatccagaagggcgaggagaccgagaagcagagctgggccatcgaccacgtgtacatcggcgaggcctgccccaagctgtgcagcggccacggctactgcaccaccggcgccatctgcatctgcgacgagagcttccagggcgacgactgcagcgtgttcagccacgacctgcccagctacatcaaggacaacttcgagagcgccagagtgaccgaggccaactgggagaccatccagggcggcgtgatcggcagcggctgcggccagctggccccctacgcccacggcgacagcctgtacttcaacggctgccagatcagacaggccgccaccaagcccctggacctgaccagagccagcaagatcatgttcgtgctgcagatcggcagcatgagccagaccgacagctgcaacagcgacctgagcggcccccacgccgtggacaaggccgtgctgctgcagtacagcgtgaacaacggcatcacctggcacgtgatcgcccagcaccagcccaaggacttcacccaggcccagagagtgagctacaacgtgcccctggaggccagaatgaagggcgtgctgctgagatggtggcagcccagacacaacggcaccggccacgaccagtgggccctggaccacgtggaggtggtgctggtgaccaccagaaagcagaactacatgatgaacttcagcagacagcacggcctgagacacttctacaacagaagaagaagaagcctgagaagatacccctag

SEQ ID NO: 12638 - DNA, 10383 bp, synthetic construct
  misc_feature 1..10383: note = Description of Artificial Sequence: Synthetic coding sequence
  source 1..10383: mol_type = other DNA
atggagagaagcggctgggccagacagaccttcctgctggccctgctgctgggcgccaccctgagagccagagccgccgccggctactaccccagattcagccccttcttcttcctgtgcacccaccacggcgagctggagggcgacggcgagcagggcgaggtgctgatcagcctgcacatcgccggcaaccccacctactacgtgcccggccaggagtaccacgtgaccatcagcaccagcaccttcttcgacggcctgctggtgaccggcctgtacaccagcaccagcgtgcaggccagccagagcatcggcggcagcagcgccttcggcttcggcatcatgagcgaccaccagttcggcaaccagttcatgtgcagcgtggtggccagccacgtgagccacctgcccaccaccaacctgagcttcatctggatcgccccccccgccggcaccggctgcgtgaacttcatggccaccgccacccacagaggccaggtgatcttcaaggacgccctggcccagcagctgtgcgagcagggcgcccccaccgacgtgaccgtgcacccccacctggccgagatccacagcgacagcatcatcctgagagacgacttcgacagctaccaccagctgcagctgaaccccaacatctgggtggagtgcaacaactgcgagaccggcgagcagtgcggcgccatcatgcacggcaacgccgtgaccttctgcgagccctacggccccagagagctgatcaccaccggcctgaacaccaccaccgccagcgtgctgcagttcagcatcggcagcggcagctgcagattcagctacagcgaccccagcatcatcgtgctgtacgccaagaacaacagcgccgactggatccagctggagaagatcagagcccccagcaacgtgagcaccatcatccacatcctgtacctgcccgaggacgccaagggcgagaacgtgcagttccagtggaagcaggagaacctgagagtgggcgaggtgtacgaggcctgctgggccctggacaacatcctgatcatcaacagcgcccacagacaggtggtgctggaggacagcctggaccccgtggacaccggcaactggctgttcttccccggcgccaccgtgaagcacagctgccagagcgacggcaacagcatctacttccacggcaacgagggcagcgagttcaacttcgccaccaccagagacgtggacctgagcaccgaggacatccaggagcagtggagcgaggagttcgagagccagcccaccggctgggacgtgctgggcgccgtgatcggcaccgagtgcggcaccatcgagagcggcctgagcatggtgttcctgaaggacggcgagagaaagctgtgcacccccagcatggacaccaccggctacggcaacctgagattctacttcgtgatgggcggcatctgcgaccccggcaacagccacgagaacgacatcatcctgtacgccaagatcgagggcagaaaggagcacatcaccctggacaccctgagctacagcagctacaaggtgcccagcctggtgagcgtggtgatcaaccccgagctgcagacccccgccaccaagttctgcctgagacagaagaaccaccagggccacaacagaaacgtgtgggccgtggacttcttccacgtgctgcccgtgctgcccagcaccatgagccacatgatccagttcagcatcaacctgggctgcggcacccaccagcccggcaacagcgtgagcctggagttcagcaccaaccacggcagaagctggagcctgctgcacaccgagtgcctgcccgagatctgcgccggcccccacctgccccacagcaccgtgtacagcagcgagaactacagcggctggaacagaatcaccatccccctgcccaacgccgccctgaccagaaacaccagaatcagatggagacagaccggccccatcctgggcaacatgtgggccatcgacaacgtgtacatcggccccagctgcctgaagttctgcagcggcagaggccagtgcaccagacacggctgcaagtgcgaccccggcttcagcggccccgcctgcgagatggccagccagaccttccccatgttcatcagcgagagcttcggcagcagcagactgagcagctaccacaacttctacagcatcagaggcgccgaggtgagcttcggctgcggcgtgctggccagcggcaaggccctggtgttcaacaaggacggcagaagacagctgatcaccagcttcctggacagcagccagagcagattcctgcagttcaccctgagactgggcagcaagagcgtgctgagcacctgcagagcccccgaccagcccggcgagggcgtgctgctgcactacagctacgacaacggcatcacctggaagctgctggagcactacagctacctgagctaccacgagcccagaatcatcagcgtggagctgcccggcgacgccaagcagttcggcatccagttcagatggtggcagccctaccacagcagccagagagaggacgtgtgggccatcgacgagatcatcatgaccagcgtgctgttcaacagcatcagcctggacttcaccaacctggtggaggtgacccagagcctgggcttctacctgggcaacgtgcagccctactgcggccacgactggaccctgtgcttcaccggcgacagcaagctggccagcagcatgagatacgtggagacccagagcatgcagatcggcgccagctacatgatccagttcagcctggtgatgggctgcggccagaagtacaccccccacatggacaaccaggtgaagctggagtacagcaccaaccacggcctgacctggcacctggtgcaggaggagtgcctgcccagcatgcccagctgccaggagttcaccagcgccagcatctaccacgccagcgagttcacccagtggagaagagtgatcgtgctgctgccccagaagacctggagcagcgccaccagattcagatggagccagagctactacaccgcccaggacgagtgggccctggacagcatctacatcggccagcagtgccccaacatgtgcagcggccacggcagctgcgaccacggcatctgcagatgcgaccagggctaccagggcaccgagtgccaccccgaggccgccctgcccagcaccatcatgagcgacttcgagaaccagaacggctgggagagcgactggcaggaggtgatcggcggcgagatcgtgaagcccgagcagggctgcggcgtgatcagcagcggcagcagcctgtacttcagcaaggccggcaagagacagctggtgagctgggacctggacaccagctgggtggacttcgtgcagttctacatccagatcggcggcgagagcgccagctgcaacaagcccgacagcagagaggagggcgtgctgctgcagtacagcaacaacggcggcatccagtggcacctgctggccgagatgtacttcagcgacttcagcaagcccagattcgtgtacctggagctgcccgccgccgccaagaccccctgcaccagattcagatggtggcagcccgtgttcagcggcgaggactacgaccagtgggccgtggacgacatcatcatcctgagcgagaagcagaagcagatcatccccgtgatcaaccccaccctgccccagaacttctacgagaagcccgccttcgactaccccatgaaccagatgagcgtgtggctgatgctggccaacgagggcatggtgaagaacgagaccttctgcgccgccacccccagcgccatgatcttcggcaagagcgacggcgacagattcgccgtgaccagagacctgaccctgaagcccggctacgtgctgcagttcaagctgaacatcggctgcgccaaccagttcagcagcaccgcccccgtgctgctgcagtacagccacgacgccggcatgagctggttcctggtgaaggagggctgctaccccgccagcgccggcaagggctgcgagggcaacagcagagagctgagcgagcccaccatgtaccacaccggcgacttcgaggagtggaccagaatcaccatcgtgatccccagaagcctggccagcagcaagaccagattcagatggatccaggagagcagcagccagaagaacgtgccccccttcggcctggacggcgtgtacatcagcgagccctgccccagctactgcagcggccacggcgactgcatcagcggcgtgtgcttctgcgacctgggctacaccgccgcccagggcacctgcgtgagcaacgtgcccaaccacaacgagatgttcgacagattcgagggcaagctgagccccctgtggtacaagatcaccggcgcccaggtgggcaccggctgcggcaccctgaacgacggcaagagcctgtacttcaacggccccggcaagagagaggccagaaccgtgcccctggacaccagaaacatcagactggtgcagttctacatccagatcggcagcaagaccagcggcatcacctgcatcaagcccagaaccagaaacgagggcctgatcgtgcagtacagcaacgacaacggcatcctgtggcacctgctgagagagctggacttcatgagcttcctggagccccagatcatcagcatcgacctgccccaggacgccaagacccccgccaccgccttcagatggtggcagccccagcacggcaagcacagcgcccagtgggccctggacgacgtgctgatcggcatgaacgacagcagccagaccggcttccaggacaagttcgacggcagcatcgacctgcaggccaactggtacagaatccagggcggccaggtggacatcgactgcctgagcatggacaccgccctgatcttcaccgagaacatcggcaagcccagatacgccgagacctgggacttccacgtgagcgccagcaccttcctgcagttcgagatgagcatgggctgcagcaagcccttcagcaacagccacagcgtgcagctgcagtacagcctgaacaacggcaaggactggcacctggtgaccgaggagtgcgtgccccccaccatcggctgcctgcactacaccgagagcagcatctacaccagcgagagattccagaactggaagagaatcaccgtgtacctgcccctgagcaccatcagccccagaaccagattcagatggatccaggccaactacaccgtgggcgccgacagctgggccatcgacaacgtggtgctggccagcggctgcccctggatgtgcagcggcagaggcatctgcgacgccggcagatgcgtgtgcgacagaggcttcggcggcccctactgcgtgcccgtggtgcccctgcccagcatcctgaaggacgacttcaacggcaacctgcaccccgacctgtggcccgaggtgtacggcgccgagagaggcaacctgaacggcgagaccatcaagagcggcaccagcctgatcttcaagggcgagggcctgagaatgctgatcagcagagacctggactgcaccaacaccatgtacgtgcagttcagcctgagattcatcgccaagagcacccccgagagaagccacagcatcctgctgcagttcagcatcagcggcggcatcacctggcacctgatggacgagttctacttcccccagaccaccaacatcctgttcatcaacgtgcccctgccctacaccgcccagaccaacgccaccagattcagactgtggcagccctacaacaacggcaagaaggaggagatctggatcgtggacgacttcatcatcgacggcaacaacgtgaacaaccccgtgatgctgctggacaccttcgacttcggccccagagaggacaactggttcttctaccccggcggcaacatcggcctgtactgcccctacagcagcaagggcgcccccgaggaggacagcgccatggtgttcgtgagcaacgaggtgggcgagcacagcatcaccaccagagacctgaacgtgaacgagaacaccatcatccagttcgagatcaacgtgggctgcagcaccgacagcagcagcgccgaccccgtgagactggagttcagcagagacttcggcgccacctggcacctgctgctgcccctgtgctaccacagcagcagccacgtgagcagcctgtgcagcaccgagcaccaccccagcagcacctactacgccggcaccatgcagggctggagaagagaggtggtgcacttcggcaagctgcacctgtgcggcagcgtgagattcagatggtaccagggcttctaccccgccggcagccagcccgtgacctgggccatcgacaacgtgtacatcggcccccagtgcgaggagatgtgcaacggccagggcagctgcatcaacggcaccaagtgcatctgcgaccccggctacagcggccccacctgcaagatcagcaccaagaaccccgacttcctgaaggacgacttcgagggccagctggagagcgacagattcctgctgatgagcggcggcaagcccagcagaaagtgcggcatcctgagcagcggcaacaacctgttcttcaacgaggacggcctgagaatgctgatgaccagagacctggacctgagccacgccagattcgtgcagttcttcatgagactgggctgcggcaagggcgtgcccgaccccagaagccagcccgtgctgctgcagtacagcctgaacggcggcctgagctggagcctgctgcaggagttcctgttcagcaacagcagcaacgtgggcagatacatcgccctggagatccccctgaaggccagaagcggcagcaccagactgagatggtggcagcccagcgagaacggccacttctacagcccctgggtgatcgaccagatcctgatcggcggcaacatcagcggcaacaccgtgctggaggacgacttcaccaccctggacagcagaaagtggctgctgcaccccggcggcaccaagatgcccgtgtgcggcagcaccggcgacgccctggtgttcatcgagaaggccagcaccagatacgtggtgagcaccgacgtggccgtgaacgaggacagcttcctgcagatcgacttcgccgccagctgcagcgtgaccgacagctgctacgccatcgagctggagtacagcgtggacctgggcctgagctggcaccccctggtgagagactgcctgcccaccaacgtggagtgcagcagataccacctgcagagaatcctggtgagcgacaccttcaacaagtggaccagaatcaccctgcccctgcccccctacaccagaagccaggccaccagattcagatggcaccagcccgcccccttcgacaagcagcagacctgggccatcgacaacgtgtacatcggcgacggctgcatcgacatgtgcagcggccacggcagatgcatccagggcaactgcgtgtgcgacgagcagtggggcggcctgtactgcgacgaccccgagaccagcctgcccacccagctgaaggacaacttcaacagagcccccagcagccagaactggctgaccgtgaacggcggcaagctgagcaccgtgtgcggcgccgtggccagcggcatggccctgcacttcagcggcggctgcagcagactgctggtgaccgtggacctgaacctgaccaacgccgagttcatccagttctacttcatgtacggctgcctgatcacccccaacaacagaaaccagggcgtgctgctggagtacagcgtgaacggcggcatcacctggaacctgctgatggagatcttctacgaccagtacagcaagcccggcttcgtgaacatcctgctgccccccgacgccaaggagatcgccaccagattcagatggtggcagcccagacacgacggcctggaccagaacgactgggccatcgacaacgtgctgatcagcggcagcgccgaccagagaaccgtgatgctggacaccttcagcagcgcccccgtgccccagcacgagagaagccccgccgacgccggccccgtgggcagaatcgccttcgacatgttcatggaggacaagaccagcgtgaacgagcactggctgttccacgacgactgcaccgtggagagattctgcgacagccccgacggcgtgatgctgtgcggcagccacgacggcagagaggtgtacgccgtgacccacgacctgacccccaccgagggctggatcatgcagttcaagatcagcgtgggctgcaaggtgagcgagaagatcgcccagaaccagatccacgtgcagtacagcaccgacttcggcgtgagctggaactacctggtgccccagtgcctgcccgccgaccccaagtgcagcggcagcgtgagccagcccagcgtgttcttccccaccaagggctggaagagaatcacctaccccctgcccgagagcctggtgggcaaccccgtgagattcagattctaccagaagtacagcgacatgcagtgggccatcgacaacttctacctgggccccggctgcctggacaactgcagaggccacggcgactgcctgagagagcagtgcatctgcgaccccggctacagcggccccaactgctacctgacccacaccctgaagaccttcctgaaggagagattcgacagcgaggagatcaagcccgacctgtggatgagcctggagggcggcagcacctgcaccgagtgcggcatcctggccgaggacaccgccctgtacttcggcggcagcaccgtgagacaggccgtgacccaggacctggacctgagaggcgccaagttcctgcagtactggggcagaatcggcagcgagaacaacatgaccagctgccacagacccatctgcagaaaggagggcgtgctgctggactacagcaccgacggcggcatcacctggaccctgctgcacgagatggactaccagaagtacatcagcgtgagacacgactacatcctgctgcccgaggacgccctgaccaacaccaccagactgagatggtggcagcccttcgtgatcagcaacggcatcgtggtgagcggcgtggagagagcccagtgggccctggacaacatcctgatcggcggcgccgagatcaaccccagccagctggtggacaccttcgacgacgagggcaccagccacgaggagaactggagcttctaccccaacgccgtgagaaccgccggcttctgcggcaaccccagcttccacctgtactggcccaacaagaagaaggacaagacccacaacgccctgagcagcagagagctgatcatccagcccggctacatgatgcagttcaagatcgtggtgggctgcgaggccaccagctgcggcgacctgcacagcgtgatgctggagtacaccaaggacgccagaagcgacagctggcagctggtgcagacccagtgcctgcccagcagcagcaacagcatcggctgcagccccttccagttccacgaggccaccatctacaacagcgtgaacagcagcagctggaagagaatcaccatccagctgcccgaccacgtgagcagcagcgccacccagttcagatggatccagaagggcgaggagaccgagaagcagagctgggccatcgaccacgtgtacatcggcgaggcctgccccaagctgtgcagcggccacggctactgcaccaccggcgccatctgcatctgcgacgagagcttccagggcgacgactgcagcgtgttcagccacgacctgcccagctacatcaaggacaacttcgagagcgccagagtgaccgaggccaactgggagaccatccagggcggcgtgatcggcagcggctgcggccagctggccccctacgcccacggcgacagcctgtacttcaacggctgccagatcagacaggccgccaccaagcccctggacctgaccagagccagcaagatcatgttcgtgctgcagatcggcagcatgagccagaccgacagctgcaacagcgacctgagcggcccccacgccgtggacaaggccgtgctgctgcagtacagcgtgaacaacggcatcacctggcacgtgatcgcccagcaccagcccaaggacttcacccaggcccagagagtgagctacaacgtgcccctggaggccagaatgaagggcgtgctgctgagatggtggcagcccagacacaacggcaccggccacgaccagtgggccctggaccacgtggaggtggtgctggtgagcaccagaaagcagaactacatgatgaacttcagcagacagcacggcctgagacacttctacaacagaagaagaagaagcctgagaagatacccctag

SEQ ID NO: 12639 - DNA, 10284 bp, synthetic construct
  misc_feature 1..10284: note = Description of Artificial Sequence: Synthetic coding sequence
  source 1..10284: mol_type = other DNA
atggagagaagcggctgggccagacagaccttcctgctggccctgctgctgggcgccaccctgagagccagagccgccgccggctactaccccagattcagccccttcttcttcctgtgcacccaccacggcgagctggagggcgacggcgagcagggcgaggtgctgatcagcctgcacatcgccggcaaccccacctactacgtgcccggccaggagtaccacgtgaccatcagcaccagcaccttcttcgacggcctgctggtgaccggcctgtacaccagcaccagcgtgcaggccagccagagcatcggcggcagcagcgccttcggcttcggcatcatgagcgaccaccagttcggcaaccagttcatgtgcagcgtggtggccagccacgtgagccacctgcccaccaccaacctgagcttcatctggatcgccccccccgccggcaccggctgcgtgaacttcatggccaccgccacccacagaggccaggtgatcttcaaggacgccctggcccagcagctgtgcgagcagggcgcccccaccgacgtgaccgtgcacccccacctggccgagatccacagcgacagcatcatcctgagagacgacttcgacagctaccaccagctgcagctgaaccccaacatctgggtggagtgcaacaactgcgagaccggcgagcagtgcggcgccatcatgcacggcaacgccgtgaccttctgcgagccctacggccccagagagctgatcaccaccggcctgaacaccaccaccgccagcgtgctgcagttcagcatcggcagcggcagctgcagattcagctacagcgaccccagcatcatcgtgctgtacgccaagaacaacagcgccgactggatccagctggagaagatcagagcccccagcaacgtgagcaccatcatccacatcctgtacctgcccgaggacgccaagggcgagaacgtgcagttccagtggaagcaggagaacctgagagtgggcgaggtgtacgaggcctgctgggccctggacaacatcctgatcatcaacagcgcccacagacaggtggtgctggaggacagcctggaccccgtggacaccggcaactggctgttcttccccggcgccaccgtgaagcacagctgccagagcgacggcaacagcatctacttccacggcaacgagggcagcgagttcaacttcgccaccaccagagacgtggacctgagcaccgaggacatccaggagcagtggagcgaggagttcgagagccagcccaccggctgggacgtgctgggcgccgtgatcggcaccgagtgcggcaccatcgagagcggcctgagcatggtgttcctgaaggacggcgagagaaagctgtgcacccccagcatggacaccaccggctacggcaacctgagattctacttcgtgatgggcggcatctgcgaccccggcaacagccacgagaacgacatcatcctgtacgccaagatcgagggcagaaaggagcacatcaccctggacaccctgagctacagcagctacaaggtgcccagcctggtgagcgtggtgatcaaccccgagctgcagacccccgccaccaagttctgcctgagacagaagaaccaccagggccacaacagaaacgtgtgggccgtggacttcttccacgtgctgcccgtgctgcccagcaccatgagccacatgatccagttcagcatcaacctgggctgcggcacccaccagcccggcaacagcgtgagcctggagttcagcaccaaccacggcagaagctggagcctgctgcacaccgagtgcctgcccgagatctgcgccggcccccacctgccccacagcaccgtgtacagcagcgagaactacagcggctggaacagaatcaccatccccctgcccaacgccgccctgaccagaaacaccagaatcagatggagacagaccggccccatcctgggcaacatgtgggccatcgacaacgtgtacatcggccccagctgcctgaagttctgcagcggcagaggccagtgcaccagacacggctgcaagtgcgaccccggcttcagcggccccgcctgcgagatggccagccagaccttccccatgttcatcagcgagagcttcggcagcagcagactgagcagctaccacaacttctacagcatcagaggcgccgaggtgagcttcggctgcggcgtgctggccagcggcaaggccctggtgttcaacaaggacggcagaagacagctgatcaccagcttcctggacagcagccagagcagattcctgcagttcaccctgagactgggcagcaagagcgtgctgagcacctgcagagcccccgaccagcccggcgagggcgtgctgctgcactacagctacgacaacggcatcacctggaagctgctggagcactacagctacctgagctaccacgagcccagaatcatcagcgtggagctgcccggcgacgccaagcagttcggcatccagttcagatggtggcagccctaccacagcagccagagagaggacgtgtgggccatcgacgagatcatcatgaccagcgtgctgttcaacagcatcagcctggacttcaccaacctggtggaggtgacccagagcctgggcttctacctgggcaacgtgcagccctactgcggccacgactggaccctgtgcttcaccggcgacagcaagctggccagcagcatgagatacgtggagacccagagcatgcagatcggcgccagctacatgatccagttcagcctggtgatgggctgcggccagaagtacaccccccacatggacaaccaggtgaagctggagtacagcaccaaccacggcctgacctggcacctggtgcaggaggagtgcctgcccagcatgcccagctgccaggagttcaccagcgccagcatctaccacgccagcgagttcacccagtggagaagagtgatcgtgctgctgccccagaagacctggagcagcgccaccagattcagatggagccagagctactacaccgcccaggacgagtgggccctggacagcatctacatcggccagcagtgccccaacatgtgcagcggccacggcagctgcgaccacggcatctgcagatgcgaccagggctaccagggcaccgagtgccaccccgaggccgccctgcccagcaccatcatgagcgacttcgagaaccagaacggctgggagagcgactggcaggaggtgatcggcggcgagatcgtgaagcccgagcagggctgcggcgtgatcagcagcggcagcagcctgtacttcagcaaggccggcaagagacagctggtgagctgggacctggacaccagctgggtggacttcgtgcagttctacatccagatcggcggcgagagcgccagctgcaacaagcccgacagcagagaggagggcgtgctgctgcagtacagcaacaacggcggcatccagtggcacctgctggccgagatgtacttcagcgacttcagcaagcccagattcgtgtacctggagctgcccgccgccgccaagaccccctgcaccagattcagatggtggcagcccgtgttcagcggcgaggactacgaccagtgggccgtggacgacatcatcatcctgagcgagaagcagaagcagatcatccccgtgatcaaccccaccctgccccagaacttctacgagaagcccgccttcgactaccccatgaaccagatgagcgtgtggctgatgctggccaacgagggcatggtgaagaacgagaccttctgcgccgccacccccagcgccatgatcttcggcaagagcgacggcgacagattcgccgtgaccagagacctgaccctgaagcccggctacgtgctgcagttcaagctgaacatcggctgcgccaaccagttcagcagcaccgcccccgtgctgctgcagtacagccacgacgccggcatgagctggttcctggtgaaggagggctgctaccccgccagcgccggcaagggctgcgagggcaacagcagagagctgagcgagcccaccatgtaccacaccggcgacttcgaggagtggaccagaatcaccatcgtgatccccagaagcctggccagcagcaagaccagattcagatggatccaggagagcagcagccagaagaacgtgccccccttcggcctggacggcgtgtacatcagcgagccctgccccagctactgcagcggccacggcgactgcatcagcggcgtgtgcttctgcgacctgggctacaccgccgcccagggcacctgcgtgagcaacgtgcccaaccacaacgagatgttcgacagattcgagggcaagctgagccccctgtggtacaagatcaccggcgcccaggtgggcaccggctgcggcaccctgaacgacggcaagagcctgtacttcaacggccccggcaagagagaggccagaaccgtgcccctggacaccagaaacatcagactggtgcagttctacatccagatcggcagcaagaccagcggcatcacctgcatcaagcccagaaccagaaacgagggcctgatcgtgcagtacagcaacgacaacggcatcctgtggcacctgctgagagagctggacttcatgagcttcctggagccccagatcatcagcatcgacctgccccaggacgccaagacccccgccaccgccttcagatggtggcagccccagcacggcaagcacagcgcccagtgggccctggacgacgtgctgatcggcatgaacgacagcagccagaccggcttccaggacaagttcgacggcagcatcgacctgcaggccaactggtacagaatccagggcggccaggtggacatcgactgcctgagcatggacaccgccctgatcttcaccgagaacatcggcaagcccagatacgccgagacctgggacttccacgtgagcgccagcaccttcctgcagttcgagatgagcatgggctgcagcaagcccttcagcaacagccacagcgtgcagctgcagtacagcctgaacaacggcaaggactggcacctggtgaccgaggagtgcgtgccccccaccatcggctgcctgcactacaccgagagcagcatctacaccagcgagagattccagaactggaagagaatcaccgtgtacctgcccctgagcaccatcagccccagaaccagattcagatggatccaggccaactacaccgtgggcgccgacagctgggccatcgacaacgtggtgctggccagcggctgcccctggatgtgcagcggcagaggcatctgcgacgccggcagatgcgtgtgcgacagaggcttcggcggcccctactgcgtgcccgtggtgcccctgcccagcatcctgaaggacgacttcaacggcaacctgcaccccgacctgtggcccgaggtgtacggcgccgagagaggcaacctgaacggcgagaccatcaagagcggcaccagcctgatcttcaagggcgagggcctgagaatgctgatcagcagagacctggactgcaccaacaccatgtacgtgcagttcagcctgagattcatcgccaagagcacccccgagagaagccacagcatcctgctgcagttcagcatcagcggcggcatcacctggcacctgatggacgagttctacttcccccagaccaccaacatcctgttcatcaacgtgcccctgccctacaccgcccagaccaacgccaccagattcagactgtggcagccctacaacaacggcaagaaggaggagatctggatcgtggacgacttcatcatcgacggcaacaacgtgaacaaccccgtgatgctgctggacaccttcgacttcggccccagagaggacaactggttcttctaccccggcggcaacatcggcctgtactgcccctacagcagcaagggcgcccccgaggaggacagcgccatggtgttcgtgagcaacgaggtgggcgagcacagcatcaccaccagagacctgaacgtgaacgagaacaccatcatccagttcgagatcaacgtgggctgcagcaccgacagcagcagcgccgaccccgtgagactggagttcagcagagacttcggcgccacctggcacctgctgctgcccctgtgctaccacagcagcagccacgtgagcagcctgtgcagcaccgagcaccaccccagcagcacctactacgccggcaccatgcagggctggagaagagaggtggtgcacttcggcaagctgcacctgtgcggcagcgtgagattcagatggtaccagggcttctaccccgccggcagccagcccgtgacctgggccatcgacaacgtgtacatcggcccccagtgcgaggagatgtgcaacggccagggcagctgcatcaacggcaccaagtgcatctgcgaccccggctacagcggccccacctgcaagatcagcaccaagaaccccgacttcctgaaggacgacttcgagggccagctggagagcgacagattcctgctgatgagcggcggcaagcccagcagaaagtgcggcatcctgagcagcggcaacaacctgttcttcaacgaggacggcctgagaatgctgatgaccagagacctggacctgagccacgccagattcgtgcagttcttcatgagactgggctgcggcaagggcgtgcccgaccccagaagccagcccgtgctgctgcagtacagcctgaacggcggcctgagctggagcctgctgcaggagttcctgttcagcaacagcagcaacgtgggcagatacatcgccctggagatccccctgaaggccagaagcggcagcaccagactgagatggtggcagcccagcgagaacggccacttctacagcccctgggtgatcgaccagatcctgatcggcggcaacatcagcggcaacaccgtgctggaggacgacttcaccaccctggacagcagaaagtggctgctgcaccccggcggcaccaagatgcccgtgtgcggcagcaccggcgacgccctggtgttcatcgagaaggccagcaccagatacgtggtgagcaccgacgtggccgtgaacgaggacagcttcctgcagatcgacttcgccgccagctgcagcgtgaccgacagctgctacgccatcgagctggagtacagcgtggacctgggcctgagctggcaccccctggtgagagactgcctgcccaccaacgtggagtgcagcagataccacctgcagagaatcctggtgagcgacaccttcaacaagtggaccagaatcaccctgcccctgcccccctacaccagaagccaggccaccagattcagatggcaccagcccgcccccttcgacaagcagcagacctgggccatcgacaacgtgtacatcggcgacggctgcatcgacatgtgcagcggccacggcagatgcatccagggcaactgcgtgtgcgacgagcagtggggcggcctgtactgcgacgaccccgagaccagcctgcccacccagctgaaggacaacttcaacagagcccccagcagccagaactggctgaccgtgaacggcggcaagctgagcaccgtgtgcggcgccgtggccagcggcatggccctgcacttcagcggcggctgcagcagactgctggtgaccgtggacctgaacctgaccaacgccgagttcatccagttctacttcatgtacggctgcctgatcacccccaacaacagaaaccagggcgtgctgctggagtacagcgtgaacggcggcatcacctggaacctgctgatggagatcttctacgaccagtacagcaagcccggcttcgtgaacatcctgctgccccccgacgccaaggagatcgccaccagattcagatggtggcagcccagacacgacggcctggaccagaacgactgggccatcgacaacgtgctgatcagcggcagcgccgaccagagaaccgtgatgctggacaccttcagcagcgcccccgtgccccagcacgagagaagccccgccgacgccggccccgtgggcagaatcgccttcgacatgttcatggaggacaagaccagcgtgaacgagcactggctgttccacgacgactgcaccgtggagagattctgcgacagccccgacggcgtgatgctgtgcggcagccacgacggcagagaggtgtacgccgtgacccacgacctgacccccaccgagggctggatcatgcagttcaagatcagcgtgggctgcaaggtgagcgagaagatcgcccagaaccagatccacgtgcagtacagcaccgacttcggcgtgagctggaactacctggtgccccagtgcctgcccgccgaccccaagtgcagcggcagcgtgagccagcccagcgtgttcttccccaccaagggctggaagagaatcacctaccccctgcccgagagcctggtgggcaaccccgtgagattcagattctaccagaagtacagcgacatgcagtgggccatcgacaacttctacctgggccccggctgcctggacaactgcagaggccacggcgactgcctgagagagcagtgcatctgcgaccccggctacagcggccccaactgctacctgacccacaccctgaagaccttcctgaaggagagattcgacagcgaggagatcaagcccgacctgtggatgagcctggagggcggcagcacctgcaccgagtgcggcatcctggccgaggacaccgccctgtacttcggcggcagcaccgtgagacaggccgtgacccaggacctggacctgagaggcgccaagttcctgcagtactggggcagaatcggcagcgagaacaacatgaccagctgccacagacccatctgcagaaaggagggcgtgctgctggactacagcaccgacggcggcatcacctggaccctgctgcacgagatggactaccagaagtacatcagcgtgagacacgactacatcctgctgcccgaggacgccctgaccaacaccaccagactgagatggtggcagcccttcgtgatcagcaacggcatcgtggtgagcggcgtggagagagcccagtgggccctggacaacatcctgatcggcggcgccgagatcaaccccagccagctggtggacaccttcgacgacgagggcaccagccacgaggagaactggagcttctaccccaacgccgtgagaaccgccggcttctgcggcaaccccagcttccacctgtactggcccaacaagaagaaggacaagacccacaacgccctgagcagcagagagctgatcatccagcccggctacatgatgcagttcaagatcgtggtgggctgcgaggccaccagctgcggcgacctgcacagcgtgatgctggagtacaccaaggacgccagaagcgacagctggcagctggtgcagacccagtgcctgcccagcagcagcaacagcatcggctgcagccccttccagttccacgaggccaccatctacaacagcgtgaacagcagcagctggaagagaatcaccatccagctgcccgaccacgtgagcagcagcgccacccagttcagatggatccagaagggcgaggagaccgagaagcagagctgggccatcgaccacgtgtacatcggcgaggcctgccccaagctgtgcagcggccacggctactgcaccaccggcgccatctgcatctgcgacgagagcttccagggcgacgactgcagcgtgttcagccacgacctgcccagctacatcaaggacaacttcgagagcgccagagtgaccgaggccaactgggagaccatccagggcggcgtgatcggcagcggctgcggccagctggccccctacgcccacggcgacagcctgtacttcaacggctgccagatcagacaggccgccaccaagcccctggacctgaccagagccagcaagatcatgttcgtgctgcagatcggcagcatgagccagaccgacagctgcaacagcgacctgagcggcccccacgccgtggacaaggccgtgctgctgcagtacagcgtgaacaacggcatcacctggcacgtgatcgcccagcaccagcccaaggacttcacccaggcccagagagtgagctacaacgtgcccctggaggccagaatgaagggcgtgctgctgagatggtggcagcccagacacaacggcaccggccacgaccagtgggccctggaccacgtggaggtggtgctgtag

SEQ ID NO: 12640 - DNA, 1668 bp, synthetic construct
  misc_feature 1..1668: note = Description of Artificial Sequence: Synthetic coding sequence
  source 1..1668: mol_type = other DNA
atgaagaagcacgacttcgccgagaacctgcccagcagcctgctgatcatcatcctggtgatcttcaccctgagcggcagcaagttcggcagaggcaccggcctgacccagcccagccagagaaccagcgccagaagaagcttcggcagaagcaagagattcagcatcaccagaagcctggacgacctggagagcgccaccgtgagcgacggcgagctgaccggcgccgacctgaaggactgcgtgagcaacaacagcctgagcagcaacgccagcctgcccagcgtgcagagctgcagaagactgagagagagaagagtggccagctgggccgtgagcttcgagagactgctgcaggaccccgtgggcgtgagatacttcagcgacttcctgagaaaggagttcagcgaggagaacatcctgttctggcaggcctgcgagtacttcaaccacgtgcccgcccacgacaagaaggagctgagctacagagccagagagatcttcagcaagttcctgtgcagcaaggccaccacccccgtgaacatcgacagccaggcccagctggccgacgacgtgctgagagccccccaccccgacatgttcaaggagcagcagctgcagatcttcaacctgatgaagttcgacagctacaccagattcctgaagagccccctgtaccaggagtgcatcctggccgaggtggagggcagagccctgcccgacagccagcaggtgcccagcagccccgccagcaagcacagcctgggcagcgaccacagcagcgtgagcacccccaagaagctgagcggcaagagcaagagcggcagaagcctgaacgaggagctgggcgacgaggacagcgagaagaagagaaagggcgccttcttcagctggagcagaaccagaagcaccggcagaagccagaagaagagagagcacggcgaccacgccgacgacgccctgcacgccaacggcggcctgtgcagaagagagagccagggcagcgtgagcagcgccggcagcctggacctgagcgaggcctgcagaaccctggcccccgagaaggacaaggccaccaagcactgctgcatccacctgcccgacggcaccagctgcgtggtggccgtgaaggccggcttcagcatcaaggacatcctgagcggcctgtgcgagagacacggcatcaacggcgccgccgccgacctgttcctggtgggcggcgacaagcccctggtgctgcaccaggacagcagcatcctggagagcagagacctgagactggagaagagaaccctgttcagactggacctggtgcccatcaacagaagcgtgggcctgaaggccaagcccaccaagcccgtgaccgaggtgctgagacccgtggtggccagatacggcctggacctgagcggcctgctggtgagactgagcggcgagaaggagcccctggacctgggcgcccccatcagcagcctggacggccagagagtggtgctggaggagaaggaccccagcagaggcaaggccagcgccgacaagcagaagggcgtgcccgtgaagcagaacaccgccgtgaacagcagcagcagaaaccacagcgccaccagcttcctgagcctgttccccaagctgagagccaccgagcagatgaccaacgtgggctgctag

SEQ ID NO: 12641 - DNA, 4131 bp, synthetic construct
  misc_feature 1..4131: note = Description of Artificial Sequence: Synthetic coding sequence
  source 1..4131: mol_type = other DNA
atgttcagagccggcgaggccagcaagagacccctgcccggccccagcccccccagagtgagaagcgtggaggtggccagaggcagagccggctacggcttcaccctgagcggccaggccccctgcgtgctgagctgcgtgatgagaggcagccccgccgacttcgtgggcctgagagccggcgaccagatcctggccgtgaacgagatcaacgtgaagaaggccagccacgaggacgtggtgaagctgatcggcaagtgcagcggcgtgctgcacatggtgatcgccgagggcgtgggcagattcgagagctgcagcagcgacgaggagggcggcctgtacgagggcaagggctggctgaagcccaagctggacagcaaggccctgggcatcaacagagccgagagagtggtggaggagatgcagagcggcggcatcttcaacatgatcttcgagaaccccagcctgtgcgccagcaacagcgagcccctgaagctgaagcagagaagcctgagcgagagcgccgccaccagattcgacgtgggccacgagagcatcaacaaccccaaccccaacatgctgagcaaggaggagatcagcaaggtgatccacgacgacagcgtgttcagcatcggcctggagagccacgacgacttcgccctggacgccagcatcctgaacgtggccatgatcgtgggctacctgggcagcatcgagctgcccagcaccagcagcaacctggagagcgacagcctgcaggccatcagaggctgcatgagaagactgagagccgagcagaagatccacagcctggtgaccatgaagatcatgcacgactgcgtgcagctgagcaccgacaaggccggcgtggtggccgagtaccccgccgagaagctggccttcagcgccgtgtgccccgacgacagaagattcttcggcctggtgaccatgcagaccaacgacgacggcagcctggcccaggaggaggagggcgccctgagaaccagctgccacgtgttcatggtggaccccgacctgttcaaccacaagatccaccagggcatcgccagaagattcggcttcgagtgcaccgccgaccccgacaccaacggctgcctggagttccccgccagcagcctgcccgtgctgcagttcatcagcgtgctgtacagagacatgggcgagctgatcgagggcatgagagccagagccttcctggacggcgacgccgacgcccaccagaacaacagcaccagcagcaacagcgacagcggcatcggcaacttccaccaggaggagaagagcaacagagtgctggtggtggacctgggcggcagcagcagcagacacggccccggcggcagcgcctgggacggcgtgggcggcagaggcgcccagccctggggcgccccctggaccggccccttctgccccgaccccgagggcagcccccccttcgaggccgcccaccagaccgacagattctgggacctgaacaagcacctgggccccgccagccccgtggaggtgccccccgccagcctgagaagcagcgtgccccccagcaagagaggcaccgtgggcgccggctgcggcttcaaccagagatggctgcccgtgcacgtgctgagagagtggcagtgcggccacaccagcgaccaggacagctacaccgacagcaccgacggctggagcagcatcaactgcggcaccctgcccccccccatgagcaagatccccgccgacagatacagagtggagggcagcttcgcccagccccccctgaacgcccccaagagagagtggagcagaaaggccttcggcatgcagagcatcttcggcccccacagaaacgtgagaaagaccaaggaggacaagaagggcagcaagttcggcagaggcaccggcctgacccagcccagccagagaaccagcgccagaagaagcttcggcagaagcaagagattcagcatcaccagaagcctggacgacctggagagcgccaccgtgagcgacggcgagctgaccggcgccgacctgaaggactgcgtgagcaacaacagcctgagcagcaacgccagcctgcccagcgtgcagagctgcagaagactgagagagagaagagtggccagctgggccgtgagcttcgagagactgctgcaggaccccgtgggcgtgagatacttcagcgacttcctgagaaaggagttcagcgaggagaacatcctgttctggcaggcctgcgagtacttcaaccacgtgcccgcccacgacaagaaggagctgagctacagagccagagagatcttcagcaagttcctgtgcagcaaggccaccacccccgtgaacatcgacagccaggcccagctggccgacgacgtgctgagagccccccaccccgacatgttcaaggagcagcagctgcagatcttcaacctgatgaagttcgacagctacaccagattcctgaagagccccctgtaccaggagtgcatcctggccgaggtggagggcagagccctgcccgacagccagcaggtgcccagcagccccgccagcaagcacagcctgggcagcgaccacagcagcgtgagcacccccaagaagctgagcggcaagagcaagagcggcagaagcctgaacgaggagctgggcgacgaggacagcgagaagaagagaaagggcgccttcttcagctggagcagaaccagaagcaccggcagaagccagaagaagagagagcacggcgaccacgccgacgacgccctgcacgccaacggcggcctgtgcagaagagagagccagggcagcgtgagcagcgccggcagcctggacctgagcgaggcctgcagaaccctggcccccgagaaggacaaggccaccaagcactgctgcatccacctgcccgacggcaccagctgcgtggtggccgtgaaggccggcttcagcatcaaggacatcctgagcggcctgtgcgagagacacggcatcaacggcgccgccgccgacctgttcctggtgggcggcgacaagcccctggtgctgcaccaggacagcagcatcctggagagcagagacctgagactggagaagagaaccctgttcagactggacctggtgcccatcaacagaagcgtgggcctgaaggccaagcccaccaagcccgtgaccgaggtgctgagacccgtggtggccagatacggcctggacctgagcggcctgctggtgagactgagcggcgagaaggagcccctggacctgggcgcccccatcagcagcctggacggccagagagtggtgctggaggagaaggaccccagcagaggcaaggccagcgccgacaagcagaagggcgtgcccgtgaagcagaacaccgccgtgaacagcagcagcagaaaccacagcgccaccggcgaggagagaaccctgggcaagagcaacagcatcaagatcaagggcgagaacggcaagaacgccagagaccccagactgagcaagagagaggagagcatcgccaagatcggcaagaagaagtaccagaagatcaacctggacgaggccgaggagttcttcgagctgatcagcaaggcccagagcaacagagccgacgaccagagaggcctgctgagaaaggaggacctggtgctgcccgagttcctgagactgccccccggcagcaccgagctgaccctgcccacccccgccgccgtggccaagggcttcagcaagagaagcgccaccggcaacggcagagagagcgccagccagcccggcgagcagtgggagcccgtgcaggagagcagcgacagccccagcaccagccccggcagcgccagcagcccccccggcccccccggcaccaccccccccggccagaagagccccagcggccccttctgcaccccccagagccccgtgagcctggcccaggagggcaccgcccagatctggaagagacagagccaggaggtggaggccggcggcatccagaccgtggaggacgagcacgtggccgagctgaccctgatgggcgagggcgacatcagcagccccaacagcaccctgctgcccccccccagcaccccccaggaggtgcccggccccagcagacccggcaccagcagattctag

SEQ ID NO: 12642 - DNA, 2400 bp, synthetic construct
  misc_feature 1..2400: note = Description of Artificial Sequence: Synthetic coding sequence
  source 1..2400: mol_type = other DNA
atgaacctgggcaaggagctgagcaacgagacccacgtgagcaacgaccagcagagcgccaccgtgagcgacggcgagctgaccggcgccgacctgaaggactgcgtgagcaacaacagcctgagcagcaacgccagcctgcccagcgtgcagagctgcagaagactgagagagagaagagtggccagctgggccgtgagcttcgagagactgctgcaggaccccgtgggcgtgagatacttcagcgacttcctgagaaaggagttcagcgaggagaacatcctgttctggcaggcctgcgagtacttcaaccacgtgcccgcccacgacaagaaggagctgagctacagagccagagagatcttcagcaagttcctgtgcagcaaggccaccacccccgtgaacatcgacagccaggcccagctggccgacgacgtgctgagagccccccaccccgacatgttcaaggagcagcagctgcagatcttcaacctgatgaagttcgacagctacaccagattcctgaagagccccctgtaccaggagtgcatcctggccgaggtggagggcagagccctgcccgacagccagcaggtgcccagcagccccgccagcaagcacagcctgggcagcgaccacagcagcgtgagcacccccaagaagctgagcggcaagagcaagagcggcagaagcctgaacgaggagctgggcgacgaggacagcgagaagaagagaaagggcgccttcttcagctggagcagaaccagaagcaccggcagaagccagaagaagagagagcacggcgaccacgccgacgacgccctgcacgccaacggcggcctgtgcagaagagagagccagggcagcgtgagcagcgccggcagcctggacctgagcgaggcctgcagaaccctggcccccgagaaggacaaggccaccaagcactgctgcatccacctgcccgacggcaccagctgcgtggtggccgtgaaggccggcttcagcatcaaggacatcctgagcggcctgtgcgagagacacggcatcaacggcgccgccgccgacctgttcctggtgggcggcgacaagcccctggtgctgcaccaggacagcagcatcctggagagcagagacctgagactggagaagagaaccctgttcagactggacctggtgcccatcaacagaagcgtgggcctgaaggccaagcccaccaagcccgtgaccgaggtgctgagacccgtggtggccagatacggcctggacctgagcggcctgctggtgagactgagcggcgagaaggagcccctggacctgggcgcccccatcagcagcctggacggccagagagtggtgctggaggagaaggaccccagcagaggcaaggccagcgccgacaagcagaagggcgtgcccgtgaagcagaacaccgccgtgaacagcagcagcagaaaccacagcgccaccggcgaggagagaaccctgggcaagagcaacagcatcaagatcaagggcgagaacggcaagaacgccagagaccccagactgagcaagagagaggagagcatcgccaagatcggcaagaagaagtaccagaagatcaacctggacgaggccgaggagttcttcgagctgatcagcaaggcccagagcaacagagccgacgaccagagaggcctgctgagaaaggaggacctggtgctgcccgagttcctgagactgccccccggcagcaccgagctgaccctgcccacccccgccgccgtggccaagggcttcagcaagagaagcgccaccggcaacggcagagagagcgccagccagcccggcgagcagtgggagcccgtgcaggagagcagcgacagccccagcaccagccccggcagcgccagcagcccccccggcccccccggcaccaccccccccggccagaagagccccagcggccccttctgcaccccccagagccccgtgagcctggcccaggagggcaccgcccagatctggaagagacagagccaggaggtggaggccggcggcatccagaccgtggaggacgagcacgtggccgagctgaccctgatgggcgagggcgacatcagcagccccaacagcaccctgctgcccccccccagcaccccccaggaggtgcccggccccagcagacccggcagcggcacccacggcagcagagacctgcccgtgaacagaatcatcgacgtggacctggtgaccggcagcgcccccggcagagacggcggcatcgccggcgcccaggccggccccggcagaagccaggccagcggcggcccccccaccagcgacctgcccggcctgggccccgtgcccggcgagcccgccaagcccaagaccagcgcccaccacgccaccttcgtgtag

SEQ ID NO: 12643 - DNA, 4344 bp, synthetic construct
  misc_feature 1..4344: note = Description of Artificial Sequence: Synthetic coding sequence
  source 1..4344: mol_type = other DNA
atgttcagagccggcgaggccagcaagagacccctgcccggccccagcccccccagagtgagaagcgtggaggtggccagaggcagagccggctacggcttcaccctgagcggccaggccccctgcgtgctgagctgcgtgatgagaggcagccccgccgacttcgtgggcctgagagccggcgaccagatcctggccgtgaacgagatcaacgtgaagaaggccagccacgaggacgtggtgaagctgatcggcaagtgcagcggcgtgctgcacatggtgatcgccgagggcgtgggcagattcgagagctgcagcagcgacgaggagggcggcctgtacgagggcaagggctggctgaagcccaagctggacagcaaggccctgggcatcaacagagccgagagagtggtggaggagatgcagagcggcggcatcttcaacatgatcttcgagaaccccagcctgtgcgccagcaacagcgagcccctgaagctgaagcagagaagcctgagcgagagcgccgccaccagattcgacgtgggccacgagagcatcaacaaccccaaccccaacatgctgagcaaggaggagatcagcaaggtgatccacgacgacagcgtgttcagcatcggcctggagagccacgacgacttcgccctggacgccagcatcctgaacgtggccatgatcgtgggctacctgggcagcatcgagctgcccagcaccagcagcaacctggagagcgacagcctgcaggccatcagaggctgcatgagaagactgagagccgagcagaagatccacagcctggtgaccatgaagatcatgcacgactgcgtgcagctgagcaccgacaaggccggcgtggtggccgagtaccccgccgagaagctggccttcagcgccgtgtgccccgacgacagaagattcttcggcctggtgaccatgcagaccaacgacgacggcagcctggcccaggaggaggagggcgccctgagaaccagctgccacgtgttcatggtggaccccgacctgttcaaccacaagatccaccagggcatcgccagaagattcggcttcgagtgcaccgccgaccccgacaccaacggctgcctggagttccccgccagcagcctgcccgtgctgcagttcatcagcgtgctgtacagagacatgggcgagctgatcgagggcatgagagccagagccttcctggacggcgacgccgacgcccaccagaacaacagcaccagcagcaacagcgacagcggcatcggcaacttccaccaggaggagaagagcaacagagtgctggtggtggacctgggcggcagcagcagcagacacggccccggcggcagcgcctgggacggcgtgggcggcagaggcgcccagccctggggcgccccctggaccggccccttctgccccgaccccgagggcagcccccccttcgaggccgcccaccagaccgacagattctgggacctgaacaagcacctgggccccgccagccccgtggaggtgccccccgccagcctgagaagcagcgtgccccccagcaagagaggcaccgtgggcgccggctgcggcttcaaccagagatggctgcccgtgcacgtgctgagagagtggcagtgcggccacaccagcgaccaggacagctacaccgacagcaccgacggctggagcagcatcaactgcggcaccctgcccccccccatgagcaagatccccgccgacagatacagagtggagggcagcttcgcccagccccccctgaacgcccccaagagagagtggagcagaaaggccttcggcatgcagagcatcttcggcccccacagaaacgtgagaaagaccaaggaggacaagaagggcagcaagttcggcagaggcaccggcctgacccagcccagccagagaaccagcgccagaagaagcttcggcagaagcaagagattcagcatcaccagaagcctggacgacctggagagcgccaccgtgagcgacggcgagctgaccggcgccgacctgaaggactgcgtgagcaacaacagcctgagcagcaacgccagcctgcccagcgtgcagagctgcagaagactgagagagagaagagtggccagctgggccgtgagcttcgagagactgctgcaggaccccgtgggcgtgagatacttcagcgacttcctgagaaaggagttcagcgaggagaacatcctgttctggcaggcctgcgagtacttcaaccacgtgcccgcccacgacaagaaggagctgagctacagagccagagagatcttcagcaagttcctgtgcagcaaggccaccacccccgtgaacatcgacagccaggcccagctggccgacgacgtgctgagagccccccaccccgacatgttcaaggagcagcagctgcagatcttcaacctgatgaagttcgacagctacaccagattcctgaagagccccctgtaccaggagtgcatcctggccgaggtggagggcagagccctgcccgacagccagcaggtgcccagcagccccgccagcaagcacagcctgggcagcgaccacagcagcgtgagcacccccaagaagctgagcggcaagagcaagagcggcagaagcctgaacgaggagctgggcgacgaggacagcgagaagaagagaaagggcgccttcttcagctggagcagaaccagaagcaccggcagaagccagaagaagagagagcacggcgaccacgccgacgacgccctgcacgccaacggcggcctgtgcagaagagagagccagggcagcgtgagcagcgccggcagcctggacctgagcgaggcctgcagaaccctggcccccgagaaggacaaggccaccaagcactgctgcatccacctgcccgacggcaccagctgcgtggtggccgtgaaggccggcttcagcatcaaggacatcctgagcggcctgtgcgagagacacggcatcaacggcgccgccgccgacctgttcctggtgggcggcgacaagcccctggtgctgcaccaggacagcagcatcctggagagcagagacctgagactggagaagagaaccctgttcagactggacctggtgcccatcaacagaagcgtgggcctgaaggccaagcccaccaagcccgtgaccgaggtgctgagacccgtggtggccagatacggcctggacctgagcggcctgctggtgagactgagcggcgagaaggagcccctggacctgggcgcccccatcagcagcctggacggccagagagtggtgctggaggagaaggaccccagcagaggcaaggccagcgccgacaagcagaagggcgtgcccgtgaagcagaacaccgccgtgaacagcagcagcagaaaccacagcgccaccggcgaggagagaaccctgggcaagagcaacagcatcaagatcaagggcgagaacggcaagaacgccagagaccccagactgagcaagagagaggagagcatcgccaagatcggcaagaagaagtaccagaagatcaacctggacgaggccgaggagttcttcgagctgatcagcaaggcccagagcaacagagccgacgaccagagaggcctgctgagaaaggaggacctggtgctgcccgagttcctgagactgccccccggcagcaccgagctgaccctgcccacccccgccgccgtggccaagggcttcagcaagagaagcgccaccggcaacggcagagagagcgccagccagcccggcgagcagtgggagcccgtgcaggagagcagcgacagccccagcaccagccccggcagcgccagcagcccccccggcccccccggcaccaccccccccggccagaagagccccagcggccccttctgcaccccccagagccccgtgagcctggcccaggagggcaccgcccagatctggaagagacagagccaggaggtggaggccggcggcatccagaccgtggaggacgagcacgtggccgagctgaccctgatgggcgagggcgacatcagcagccccaacagcaccctgctgcccccccccagcaccccccaggaggtgcccggccccagcagacccggcagcggcacccacggcagcagagacctgcccgtgaacagaatcatcgacgtggacctggtgaccggcagcgcccccggcagagacggcggcatcgccggcgcccaggccggccccggcagaagccaggccagcggcggcccccccaccagcgacctgcccggcctgggccccgtgcccggcgagcccgccaagcccaagaccagcgcccaccacgccaccttcgtgtag

SEQ ID NO: 12644 - DNA, 4131 bp, synthetic construct; identical to SEQ ID NO: 12641
  misc_feature 1..4131: note = Description of Artificial Sequence: Synthetic coding sequence
  source 1..4131: mol_type = other DNA

SEQ ID NO: 12645 - DNA, 1500 bp, synthetic construct
  misc_feature 1..1500: note = Description of Artificial Sequence: Synthetic coding sequence
  source 1..1500: mol_type = other DNA
atgagcctgagcctgttcttccagagcgccaccgtgagcgacggcgagctgaccggcgccgacctgaaggactgcgtgagcaacaacagcctgagcagcaacgccagcctgcccagcgtgcagagctgcagaagactgagagagagaagagtggccagctgggccgtgagcttcgagagactgctgcaggaccccgtgggcgtgagatacttcagcgacttcctgagaaaggagttcagcgaggagaacatcctgttctggcaggcctgcgagtacttcaaccacgtgcccgcccacgacaagaaggagctgagctacagagccagagagatcttcagcaagttcctgtgcagcaaggccaccacccccgtgaacatcgacagccaggcccagctggccgacgacgtgctgagagccccccaccccgacatgttcaaggagcagcagctgcagatcttcaacctgatgaagttcgacagctacaccagattcctgaagagccccctgtaccaggagtgcatcctggccgaggtggagggcagagccctgcccgacagccagcaggtgcccagcagccccgccagcaagcacagcctgggcagcgaccacagcagcgtgagcacccccaagaagctgagcggcaagagcaagagcggcagaagcctgaacgaggagctgggcgacgaggacagcgagaagaagagaaagggcgccttcttcagctggagcagaaccagaagcaccggcagaagccagaagaagagagagcacggcgaccacgccgacgacgccctgcacgccaacggcggcctgtgcagaagagagagccagggcagcgtgagcagcgccggcagcctggacctgagcgaggcctgcagaaccctggcccccgagaaggacaaggccaccaagcactgctgcatccacctgcccgacggcaccagctgcgtggtggccgtgaaggccggcttcagcatcaaggacatcctgagcggcctgtgcgagagacacggcatcaacggcgccgccgccgacctgttcctggtgggcggcgacaagcccctggtgctgcaccaggacagcagcatcctggagagcagagacctgagactggagaagagaaccctgttcagactggacctggtgcccatcaacagaagcgtgggcctgaaggccaagcccaccaagcccgtgaccgaggtgctgagacccgtggtggccagatacggcctggacctgagcggcctgctggtgagactgagcggcgagaaggagcccctggacctgggcgcccccatcagcagcctggacggccagagagtggtgctggaggagaaggaccccagcagaggcaaggccagcgccgacaagcagaagggcgtgcccgtgaagcagaacaccgccgtgaacagcagcagcagaaaccacagcgccaccagcttcctgagcctgttccccaagctgagagccaccgagcagatgaccaacgtgggctgctag

SEQ ID NO: 12646 - DNA, 2004 bp, synthetic construct
  misc_feature 1..2004: note = Description of Artificial Sequence: Synthetic coding sequence
  source 1..2004: mol_type = other DNA
atgttcagagccggcgaggccagcaagagacccctgcccggccccagcccccccagagtgagaagcgtggaggtggccagaggcagagccggctacggcttcaccctgagcggccaggccccctgcgtgctgagctgcgtgatgagaggcagccccgccgacttcgtgggcctgagagccggcgaccagatcctggccgtgaacgagatcaacgtgaagaaggccagccacgaggacgtggtgaagctgatcggcaagtgcagcggcgtgctgcacatggtgatcgccgagggcgtgggcagattcgagagctgcagcagcgacgaggagggcggcctgtacgagggcaagggctggctgaagcccaagctggacagcaaggccctgggcatcaacagagccgagagagtggtggaggagatgcagagcggcggcatcttcaacatgatcttcgagaaccccagcctgtgcgccagcaacagcgagcccctgaagctgaagcagagaagcctgagcgagagcgccgccaccagattcgacgtgggccacgagagcatcaacaaccccaaccccaacatgctgagcaaggaggagatcagcaaggtgatccacgacgacagcgtgttcagcatcggcctggagagccacgacgacttcgccctggacgccagcatcctgaacgtggccatgatcgtgggctacctgggcagcatcgagctgcccagcaccagcagcaacctggagagcgacagcctgcaggccatcagaggctgcatgagaagactgagagccgagcagaagatccacagcctggtgaccatgaagatcatgcacgactgcgtgcagctgagcaccgacaaggccggcgtggtggccgagtaccccgccgagaagctggccttcagcgccgtgtgccccgacgacagaagattcttcggcctggtgaccatgcagaccaacgacgacggcagcctggcccaggaggaggagggcgccctgagaaccagctgccacgtgttcatggtggaccccgacctgttcaaccacaagatccaccagggcatcgccagaagattcggcttcgagtgcaccgccgaccccgacaccaacggctgcctggagttccccgccagcagcctgcccgtgctgcagttcatcagcgtgctgtacagagacatgggcgagctgatcgagggcatgagagccagagccttcctggacggcgacgccgacgcccaccagaacaacagcaccagcagcaacagcgacagcggcatcggcaacttccaccaggaggagaagagcaacagagtgctggtggtggacctgggcggcagcagcagcagacacggccccggcggcagcgcctgggacggcgtgggcggcagaggcgcccagccctggggcgccccctggaccggccccttctgccccgaccccgagggcagcccccccttcgaggccgcccaccagaccgacagattctgggacctgaacaagcacctgggccccgccagccccgtggaggtgccccccgccagcctgagaagcagcgtgccccccagcaagagaggcaccgtgggcgccggctgcggcttcaaccagagatggctgcccgtgcacgtgctgagagagtggcagtgcggccacaccagcgaccaggacagctacaccgacagcaccgacggctggagcagcatcaactgcggcaccctgcccccccccatgagcaagatccccgccgacagatacagagtggagggcagcttcgcccagccccccctgaacgcccccaagagagagtggagcagaaaggccttcggcatgcagagcatcttcggcccccacagaaacgtgagaaagaccaaggaggacaagaagggcagcaagttcggcagaggcaccggcctgacccagcccagccagagaaccagcgccagaagaagcttcggcagaagcaagagattcagcatcaccagaagcctggacgacctggagagctag

SEQ ID NO: 12647 - DNA, 636 bp, synthetic construct
  misc_feature 1..636: note = Description of Artificial Sequence: Synthetic coding sequence
  source 1..636: mol_type = other DNA
atgcagagcgccatgttcctggccgtgcagcacgactgcagacccatggacaagagcgccggcagcggccacaagagcgaggagaagagagagaagatgaagagaaccctgctgaaggactggaagaccagactgagctacttcctgcagaacagcagcacccccggcaagcccaagaccggcaagaagagcaagcagcaggccttcatcaagcccagccccgaggaggcccagctgtggagcgaggccttcgacgagctgctggccagcaagtacggcctggccgccttcagagccttcctgaagagcgagttctgcgaggagaacatcgagttctggctggcctgcgaggacttcaagaagaccaagagcccccagaagctgagcagcaaggccagaaagatctacaccgacttcatcgagaaggaggcccccaaggagatcaacatcgacttccagaccaagaccctgatcgcccagaacatccaggaggccaccagcggctgcttcaccaccgcccagaagagagtgtacagcctgatggagaacaacagctaccccagattcctggagagcgagttctaccaggacctgtgcaagaagccccagatcaccaccgagccccacgccacctag

SEQ ID NO: 12648 - DNA, 4203 bp, synthetic construct
  misc_feature 1..4203: note = Description of Artificial Sequence: Synthetic coding sequence
  source 1..4203: mol_type = other DNA
atgcccaagatcgtgctgaacggcgtgaccgtggacttccccttccagccctacaagtgccagcaggagtacatgaccaaggtgctggagtgcctgcagcagaaggtgaacggcatcctggagagccccaccggcaccggcaagaccctgtgcctgctgtgcaccaccctggcctggagagagcacctgagagacggcatcagcgccagaaagatcgccgagagagcccagggcgagctgttccccgacagagccctgagcagctggggcaacgccgccgccgccgccggcgaccccatcgcctgctacaccgacatccccaagatcatctacgccagcagaacccacagccagctgacccaggtgatcaacgagctgagaaacaccagctacagacccaaggtgtgcgtgctgggcagcagagagcagctgtgcatccaccccgaggtgaagaagcaggagagcaaccacctgcagatccacctgtgcagaaagaaggtggccagcagaagctgccacttctacaacaacgtggaggagaagagcctggagcaggagctggccagccccatcctggacatcgaggacctggtgaagagcggcagcaagcacagagtgtgcccctactacctgagcagaaacctgaagcagcaggccgacatcatcttcatgccctacaactacctgctggacgccaagagcagaagagcccacaacatcgacctgaagggcaccgtggtgatcttcgacgaggcccacaacgtggagaagatgtgcgaggagagcgccagcttcgacctgaccccccacgacctggccagcggcctggacgtgatcgaccaggtgctggaggagcagaccaaggccgcccagcagggcgagccccaccccgagttcagcgccgacagccccagccccggcctgaacatggagctggaggacatcgccaagctgaagatgatcctgctgagactggagggcgccatcgacgccgtggagctgcccggcgacgacagcggcgtgaccaagcccggcagctacatcttcgagctgttcgccgaggcccagatcaccttccagaccaagggctgcatcctggacagcctggaccagatcatccagcacctggccggcagagccggcgtgttcaccaacaccgccggcctgcagaagctggccgacatcatccagatcgtgttcagcgtggaccccagcgagggcagccccggcagccccgccggcctgggcgccctgcagagctacaaggtgcacatccaccccgacgccggccacagaagaaccgcccagagaagcgacgcctggagcaccaccgccgccagaaagagaggcaaggtgctgagctactggtgcttcagccccggccacagcatgcacgagctggtgagacagggcgtgagaagcctgatcctgaccagcggcaccctggcccccgtgagcagcttcgccctggagatgcagatccccttccccgtgtgcctggagaacccccacatcatcgacaagcaccagatctgggtgggcgtggtgcccagaggccccgacggcgcccagctgagcagcgccttcgacagaagattcagcgaggagtgcctgagcagcctgggcaaggccctgggcaacatcgccagagtggtgccctacggcctgctgatcttcttccccagctaccccgtgatggagaagagcctggagttctggagagccagagacctggccagaaagatggaggccctgaagcccctgttcgtggagcccagaagcaagggcagcttcagcgagaccatcagcgcctactacgccagagtggccgcccccggcagcaccggcgccaccttcctggccgtgtgcagaggcaaggccagcgagggcctggacttcagcgacaccaacggcagaggcgtgatcgtgaccggcctgccctacccccccagaatggaccccagagtggtgctgaagatgcagttcctggacgagatgaagggccagggcggcgccggcggccagttcctgagcggccaggagtggtacagacagcaggccagcagagccgtgaaccaggccatcggcagagtgatcagacacagacaggactacggcgccgtgttcctgtgcgaccacagattcgccttcgccgacgccagagcccagctgcccagctgggtgagaccccacgtgagagtgtacgacaacttcggccacgtgatcagagacgtggcccagttcttcagagtggccgagagaaccatgcccgcccccgcccccagagccaccgcccccagcgtgagaggcgaggacgccgtgagcgaggccaagagccccggccccttcttcagcaccagaaaggccaagagcctggacctgcacgtgcccagcctgaagcagagaagcagcggcagccccgccgccggcgaccccgagagcagcctgtgcgtggagtacgagcaggagcccgtgcccgccagacagagacccagaggcctgctggccgccctggagcacagcgagcagagagccggcagccccggcgaggagcaggcccacagctgcagcaccctgagcctgctgagcgagaagagacccgccgaggagcccagaggcggcagaaagaagatcagactggtgagccaccccgaggagcccgtggccggcgcccagaccgacagagccaagctgttcatggtggccgtgaagcaggagctgagccaggccaacttcgccaccttcacccaggccctgcaggactacaagggcagcgacgacttcgccgccctggccgcctgcctgggccccctgttcgccgaggaccccaagaagcacaacctgctgcagggcttctaccagttcgtgagaccccaccacaagcagcagttcgaggaggtgtgcatccagctgaccggcagaggctgcggctacagacccgagcacagcatccccagaagacagagagcccagcccgtgctggaccccaccggcagaaccgcccccgaccccaagctgaccgtgagcaccgccgccgcccagcagctggacccccaggagcacctgaaccagggcagaccccacctgagccccagacccccccccaccggcgaccccggcagccagccccagtggggcagcggcgtgcccagagccggcaagcagggccagcacgccgtgagcgcctacctggccgacgccagaagagccctgggcagcgccggctgcagccagctgctggccgccctgaccgcctacaagcaggacgacgacctggacaaggtgctggccgtgctggccgccctgaccaccgccaagcccgaggacttccccctgctgcacagattcagcatgttcgtgagaccccaccacaagcagagattcagccagacctgcaccgacctgaccggcagaccctaccccggcatggagccccccggcccccaggaggagagactggccgtgccccccgtgctgacccacagagccccccagcccggccccagcagaagcgagaagaccggcaagacccagagcaagatcagcagcttcctgagacagagacccgccggcaccgtgggcgccggcggcgaggacgccggccccagccagagcagcggccccccccacggccccgccgccagcgagtggggcgagccccacggcagagacatcgccggccagcaggccaccggcgcccccggcggccccctgagcgccggctgcgtgtgccagggctgcggcgccgaggacgtggtgcccttccagtgccccgcctgcgacttccagagatgccaggcctgctggcagagacacctgcaggccagcagaatgtgccccgcctgccacaccgccagcagaaagcagagcgtgatgcaggtgttctggcccgagccccacaaggaccacgagggcgccggcggcgccagacccgtggccgccgtgcccggcgtgggcgccgcctgccccgccgccggcgccggctgcaccagaagcggcagaaacacccacctgcccctggccggcagaagagacagaggcgccgccggcgtgagacccgtgccccccagacacctgtgcgccgccgccgtgccccccagacagccccacgacgtgtggcccgtgagcaccgcccccctgcacgccgtgctggagctgcccagagccctgcccctgctgcagagacccctgagaggcgcctag

SEQ ID NO: 12649 - DNA, 1638 bp, synthetic construct
  misc_feature 1..1638: note = Description of Artificial Sequence: Synthetic coding sequence
  source 1..1638: mol_type = other DNA
atgcccgcccccgcccccagagccaccgcccccagcgtgagaggcgaggacgccgtgagcgaggccaagagccccggccccttcttcagcaccagaaaggccaagagcctggacctgcacgtgcccagcctgaagcagagaagcagcggcagccccgccgccggcgaccccgagagcagcctgtgcgtggagtacgagcaggagcccgtgcccgccagacagagacccagaggcctgctggccgccctggagcacagcgagcagagagccggcagccccggcgaggagcaggcccacagctgcagcaccctgagcctgctgagcgagaagagacccgccgaggagcccagaggcggcagaaagaagatcagactggtgagccaccccgaggagcccgtggccggcgcccagaccgacagagccaagctgttcatggtggccgtgaagcaggagctgagccaggccaacttcgccaccttcacccaggccctgcaggactacaagggcagcgacgacttcgccgccctggccgcctgcctgggccccctgttcgccgaggaccccaagaagcacaacctgctgcagggcttctaccagttcgtgagaccccaccacaagcagcagttcgaggaggtgtgcatccagctgaccggcagaggctgcggctacagacccgagcacagcatccccagaagacagagagcccagcccgtgctggaccccaccggcagaaccgcccccgaccccaagctgaccgtgagcaccgccgccgcccagcagctggacccccaggagcacctgaaccagggcagaccccacctgagccccagacccccccccaccggcgaccccggcagccagccccagtggggcagcggcgtgcccagagccggcaagcagggccagcacgccgtgagcgcctacctggccgacgccagaagagccctgggcagcgccggctgcagccagctgctggccgccctgaccgcctacaagcaggacgacgacctggacaaggtgctggccgtgctggccgccctgaccaccgccaagcccgaggacttccccctgctgcacagattcagcatgttcgtgagaccccaccacaagcagagattcagccagacctgcaccgacctgaccggcagaccctaccccggcatggagccccccggcccccaggaggagagactggccgtgccccccgtgctgacccacagagccccccagcccggccccagcagaagcgagaagaccggcaagacccagagcaagatcagcagcttcctgagacagagacccgccggcaccgtgggcgccggcggcgaggacgccggccccagccagagcagcggccccccccacggccccgccgccagcgagtggggcgagccccacggcagagacatcgccggccagcaggccaccggcgcccccggcggccccctgagcgccggctgcgtgtgccagggctgcggcgccgaggacgtggtgcccttccagtgccccgcctgcgacttccagagatgccaggcctgctggcagagacacctgcaggccagcagaatgtgccccgcctgccacaccgccagcagaaagcagagcgtgatgcaggtgttctggcccgagccccagtag

SEQ ID NO: 12650 - DNA, 3660 bp, synthetic construct
  misc_feature 1..3660: note = Description of Artificial Sequence: Synthetic coding sequence
  source 1..3660: mol_type = other DNA
atgcccaagatcgtgctgaacggcgtgaccgtggacttccccttccagccctacaagtgccagcaggagtacatgaccaaggtgctggagtgcctgcagcagaaggtgaacggcatcctggagagccccaccggcaccggcaagaccctgtgcctgctgtgcaccaccctggcctggagagagcacctgagagacggcatcagcgccagaaagatcgccgagagagcccagggcgagctgttccccgacagagccctgagcagctggggcaacgccgccgccgccgccggcgaccccatcgcctgctacaccgacatccccaagatcatctacgccagcagaacccacagccagctgacccaggtgatcaacgagctgagaaacaccagctacagacccaaggtgtgcgtgctgggcagcagagagcagctgtgcatccaccccgaggtgaagaagcaggagagcaaccacctgcagatccacctgtgcagaaagaaggtggccagcagaagctgccacttctacaacaacgtggaggagaagagcctggagcaggagctggccagccccatcctggacatcgaggacctggtgaagagcggcagcaagcacagagtgtgcccctactacctgagcagaaacctgaagcagcaggccgacatcatcttcatgccctacaactacctgctggacgccaagagcagaagagcccacaacatcgacctgaagggcaccgtggtgatcttcgacgaggcccacaacgtggagaagatgtgcgaggagagcgccagcttcgacctgaccccccacgacctggccagcggcctggacgtgatcgaccaggtgctggaggagcagaccaaggccgcccagcagggcgagccccaccccgagttcagcgccgacagccccagccccggcctgaacatggagctggaggacatcgccaagctgaagatgatcctgctgagactggagggcgccatcgacgccgtggagctgcccggcgacgacagcggcgtgaccaagcccggcagctacatcttcgagctgttcgccgaggcccagatcaccttccagaccaagggctgcatcctggacagcctggaccagatcatccagcacctggccggcagagccggcgtgttcaccaacaccgccggcctgcagaagctggccgacatcatccagatcgtgttcagcgtggaccccagcgagggcagccccggcagccccgccggcctgggcgccctgcagagctacaaggtgcacatccaccccgacgccggccacagaagaaccgcccagagaagcgacgcctggagcaccaccgccgccagaaagagaggcaaggtgctgagctactggtgcttcagccccggccacagcatgcacgagctggtgagacagggcgtgagaagcctgatcctgaccagcggcaccctggcccccgtgagcagcttcgccctggagatgcagatccccttccccgtgtgcctggagaacccccacatcatcgacaagcaccagatctgggtgggcgtggtgcccagaggccccgacggcgcccagctgagcagcgccttcgacagaagattcagcgaggagtgcctgagcagcctgggcaaggccctgggcaacatcgccagagtggtgccctacggcctgctgatcttcttccccagctaccccgtgatggagaagagcctggagttctggagagccagagacctggccagaaagatggaggccctgaagcccctgttcgtggagcccagaagcaagggcagcttcagcgagaccatcagcgcctactacgccagagtggccgcccccggcagcaccggcgccaccttcctggccgtgtgcagaggcaaggccagcgagggcctggacttcagcgacaccaacggcagaggcgtgatcgtgaccggcctgccctacccccccagaatggaccccagagtggtgctgaagatgcagttcctggacgagatgaagggccagggcggcgccggcggccagttcctgagcggccaggagtggtacagacagcaggccagcagagccgtgaaccaggccatcggcagagtgatcagacacagacaggactacggcgccgtgttcctgtgcgaccacagattcgccttcgccgacgccagagcccagctgcccagctgggtgagaccccacgtgagagtgtacgacaacttcggccacgtgatcagagacgtggcccagttcttcagagtggccgagagaaccatgcccgcccccgcccccagagccaccgcccccagcgtgagaggcgaggacgccgtgagcgaggccaagagccccggccccttcttcagcaccagaaaggccaagagcctggacctgcacgtgcccagcctgaagcagagaagcagcggcagccccgccgccggcgaccccgagagcagcctgtgcgtggagtacgagcaggagcccgtgcccgccagacagagacccagaggcctgctggccgccctggagcacagcgagcagagagccggcagccccggcgaggagcaggcccacagctgcagcaccctgagcctgctgagcgagaagagacccgccgaggagcccagaggcggcagaaagaagatcagactggtgagccaccccgaggagcccgtggccggcgcccagaccgacagagccaagctgttcatggtggccgtgaagcaggagctgagccaggccaacttcgccaccttcacccaggccctgcaggactacaagggcagcgacgacttcgccgccctggccgcctgcctgggccccctgttcgccgaggaccccaagaagcacaacctgctgcagggcttctaccagttcgtgagaccccaccacaagcagcagttcgaggaggtgtgcatccagctgaccggcagaggctgcggctacagacccgagcacagcatccccagaagacagagagcccagcccgtgctggaccccaccggcagaaccgcccccgaccccaagctgaccgtgagcaccgccgccgcccagcagctggacccccaggagcacctgaaccagggcagaccccacctgagccccagacccccccccaccggcgaccccggcagccagccccagtggggcagcggcgtgcccagagccggcaagcagggccagcacgccgtgagcgcctacctggccgacgccagaagagccctgggcagcgccggctgcagccagctgctggccgccctgaccgcctacaagcaggacgacgacctggacaaggtgctggccgtgctggccgccctgaccaccgccaagcccgaggacttccccctgctgcacagattcagcatgttcgtgagaccccaccacaagcagagattcagccagacctgcaccgacctgaccggcagaccctaccccggcatggagccccccggcccccaggaggagagactggccgtgccccccgtgctgacccacagagccccccagcccggccccagcagaagcgagaagaccggcaagacccagagcaagatcagcagcttcctgagacagagacccgccggcaccgtgggcgccggcggcgaggacgccggccccagccagagcagcggccccccccacggccccgccgccagcgagtggggcctgtag

SEQ ID NO: 12651 - DNA, 3732 bp, synthetic construct
  misc_feature 1..3732: note = Description of Artificial Sequence: Synthetic coding sequence
  source 1..3732: mol_type = other DNA
atgcccaagatcgtgctgaacggcgtgaccgtggacttccccttccagccctacaagtgccagcaggagtacatgaccaaggtgctggagtgcctgcagcagaaggtgaacggcatcctggagagccccaccggcaccggcaagaccctgtgcctgctgtgcaccaccctggcctggagagagcacctgagagacggcatcagcgccagaaagatcgccgagagagcccagggcgagctgttccccgacagagccctgagcagctggggcaacgccgccgccgccgccggcgaccccatcgcctgctacaccgacatccccaagatcatctacgccagcagaacccacagccagctgacccaggtgatcaacgagctgagaaacaccagctacagaagcagatgcagagccaccctgtgggtgctggagaccgccccccccagacccaccgtgctgagccccaccagacccaaggtgtgcgtgctgggcagcagagagcagctgtgcatccaccccgaggtgaagaagcaggagagcaaccacctgcagatccacctgtgcagaaagaaggtggccagcagaagctgccacttctacaacaacgtggaggagaagagcctggagcaggagctggccagccccatcctggacatcgaggacctggtgaagagcggcagcaagcacagagtgtgcccctactacctgagcagaaacctgaagcagcaggccgacatcatcttcatgccctacaactacctgctggacgccaagagcagaagagcccacaacatcgacctgaagggcaccgtggtgatcttcgacgaggcccacaacgtggagaagatgtgcgaggagagcgccagcttcgacctgaccccccacgacctggccagcggcctggacgtgatcgaccaggtgctggaggagcagaccaaggccgcccagcagggcgagccccaccccgagttcagcgccgacagccccagccccggcctgaacatggagctggaggacatcgccaagctgaagatgatcctgctgagactggagggcgccatcgacgccgtggagctgcccggcgacgacagcggcgtgaccaagcccggcagctacatcttcgagctgttcgccgaggcccagatcaccttccagaccaagggctgcatcctggacagcctggaccagatcatccagcacctggccggcagagccggcgtgttcaccaacaccgccggcctgcagaagctggccgacatcatccagatcgtgttcagcgtggaccccagcgagggcagccccggcagccccgccggcctgggcgccctgcagagctacaaggtgcacatccaccccgacgccggccacagaagaaccgcccagagaagcgacgcctggagcaccaccgccgccagaaagagaggcaaggtgctgagctactggtgcttcagccccggccacagcatgcacgagctggtgagacagggcgtgagaagcctgatcctgaccagcggcaccctggcccccgtgagcagcttcgccctggagatgcagatccccttccccgtgtgcctggagaacccccacatcatcgacaagcaccagatctgggtgggcgtggtgcccagaggccccgacggcgcccagctgagcagcgccttcgacagaagattcagcgaggagtgcctgagcagcctgggcaaggccctgggcaacatcgccagagtggtgccctacggcctgctgatcttcttccccagctaccccgtgatggagaagagcctggagttctggagagccagagacctggccagaaagatggaggccctgaagcccctgttcgtggagcccagaagcaagggcagcttcagcgagaccatcagcgcctactacgccagagtggccgcccccggcagcaccggcgccaccttcctggccgtgtgcagaggcaaggccagcgagggcctggacttcagcgacaccaacggcagaggcgtgatcgtgaccggcctgccctacccccccagaatggaccccagagtggtgctgaagatgcagttcctggacgagatgaagggccagggcggcgccggcggccagttcctgagcggccaggagtggtacagacagcaggccagcagagccgtgaaccaggccatcggcagagtgatcagacacagacaggactacggcgccgtgttcctgtgcgaccacagattcgccttcgccgacgccagagcccagctgcccagctgggtgagaccccacgtgagagtgtacgacaacttcggccacgtgatcagagacgtggcccagttcttcagagtggccgagagaaccatgcccgcccccgcccccagagccaccgcccccagcgtgagaggcgaggacgccgtgagcgaggccaagagccccggccccttcttcagcaccagaaaggccaagagcctggacctgcacgtgcccagcctgaagcagagaagcagcggcagccccgccgccggcgaccccgagagcagcctgtgcgtggagtacgagcaggagcccgtgcccgccagacagagacccagaggcctgctggccgccctggagcacagcgagcagagagccggcagccccggcgaggagcaggcccacagctgcagcaccctgagcctgctgagcgagaagagacccgccgaggagcccagaggcggcagaaagaagatcagactggtgagccaccccgaggagcccgtggccggcgcccagaccgacagagccaagctgttcatggtggccgtgaagcaggagctgagccaggccaacttcgccaccttcacccaggccctgcaggactacaagggcagcgacgacttcgccgccctggccgcctgcctgggccccctgttcgccgaggaccccaagaagcacaacctgctgcagggcttctaccagttcgtgagaccccaccacaagcagcagttcgaggaggtgtgcatccagctgaccggcagaggctgcggctacagacccgagcacagcatccccagaagacagagagcccagcccgtgctggaccccaccggcagaaccgcccccgaccccaagctgaccgtgagcaccgccgccgcccagcagctggacccccaggagcacctgaaccagggcagaccccacctgagccccagacccccccccaccggcgaccccggcagccagccccagtggggcagcggcgtgcccagagccggcaagcagggccagcacgccgtgagcgcctacctggccgacgccagaagagccctgggcagcgccggctgcagccagctgctggccgccctgaccgcctacaagcaggacgacgacctggacaaggtgctggccgtgctggccgccctgaccaccgccaagcccgaggacttccccctgctgcacagcaacagcatgttcgtgagaccccaccacaagcagagattcagccagacctgcaccgacctgaccggcagaccctaccccggcatggagccccccggcccccaggaggagagactggccgtgccccccgtgctgacccacagagccccccagcccggccccagcagaagcgagaagaccggcaagacccagagcaagatcagcagcttcctgagacagagacccgccggcaccgtgggcgccggcggcgaggacgccggccccagccagagcagcggccccccccacggccccgccgccagcgagtggggcctgtag

SEQ ID NO: 12652 - DNA, 3444 bp, synthetic construct
  misc_feature 1..3444: note = Description of Artificial Sequence: Synthetic coding sequence
  source 1..3444: mol_type = other DNA
atggacatcagaaagttcttcggcgtgatccccagcggcaagaagctggtgagcgagaccgtgaagaagaacgagaagaccaagagcgacgaggagaccctgaaggccaagaagggcatcaaggagatcaaggtgaacagcagcagaaaggaggacgacttcaagcagaagcagcccagcaagaagaagagaatcatctacgacagcgacagcgagagcgaggagaccctgcaggtgaagaacgccaagaagccccccgagaagctgcccgtgagcagcaagcccggcaagatcagcagacaggaccccgtgacctacatcagcgagaccgacgaggaggacgacttcatgtgcaagaaggccgccagcaagagcaaggagaacggcagaagcaccaacagccacctgggcaccagcaacatgaagaagaacgaggagaacaccaagaccaagaacaagcccctgagccccatcaagctgacccccaccagcgtgctggactacttcggcaccggcagcgtgcagagaagcaacaagaagatggtggccagcaagagaaaggagctgagccagaacaccgacgagagcggcctgaacgacgaggccatcgccaagcagctgcagctggacgaggacgccgagctggagagacagctgcacgaggacgaggagttcgccagaaccctggccatgctggacgaggagcccaagaccaagaaggccagaaaggacaccgaggccggcgagaccttcagcagcgtgcaggccaacctgagcaaggccgagaagcacaagtacccccacaaggtgaagaccgcccaggtgagcgacgagagaaagagctacagccccagaaagcagagcaagtacgagagcagcaaggagagccagcagcacagcaagagcagcgccgacaagatcggcgaggtgagcagccccaaggccagcagcaagctggccatcatgaagagaaaggaggagagcagctacaaggagatcgagcccgtggccagcaagagaaaggagaacgccatcaagctgaagggcgagaccaagacccccaagaagaccaagagcagccccgccaagaaggagagcgtgagccccgaggacagcgagaagaagagaaccaactaccaggcctacagaagctacctgaacagagagggccccaaggccctgggcagcaaggagatccccaagggcgccgagaactgcctggagggcctgatcttcgtgatcaccggcgtgctggagagcatcgagagagacgaggccaagagcctgatcgagagatacggcggcaaggtgaccggcaacgtgagcaagaagaccaactacctggtgatgggcagagacagcggccagagcaagagcgacaaggccgccgccctgggcaccaagatcatcgacgaggacggcctgctgaacctgatcagaaccatgcccggcaagaagagcaagtacgagatcgccgtggagaccgagatgaagaaggagagcaagctggagagaaccccccagaagaacgtgcagggcaagagaaagatcagccccagcaagaaggagagcgagagcaagaagagcagacccaccagcaagagagacagcctggccaagaccatcaagaaggagaccgacgtgttctggaagagcctggacttcaaggagcaggtggccgaggagaccagcggcgacagcaaggccagaaacctggccgacgacagcagcgagaacaaggtggagaacctgctgtgggtggacaagtacaagcccaccagcctgaagaccatcatcggccagcagggcgaccagagctgcgccaacaagctgctgagatggctgagaaactggcagaagagcagcagcgaggacaagaagcacgccaagttcggcaagttcagcggcaaggacgacggcagcagcttcaaggccgccctgctgagcggcccccccggcgtgggcaagaccaccaccgccagcctggtgtgccaggagctgggctacagctacgtggagctgaacgccagcgacaccagaagcaagagcagcctgaaggccatcgtggccgagagcctgaacaacaccagcatcaagggcttctacagcaacggcgccgccagcagcgtgagcaccaagcacgccctgatcatggacgaggtggacggcatggccggcaacgaggacagaggcggcatccaggagctgatcggcctgatcaagcacaccaagatccccatcatctgcatgtgcaacgacagaaaccaccccaagatcagaagcctggtgcactactgcttcgacctgagattccagagacccagagtggagcagatcaagggcgccatgatgagcatcgccttcaaggagggcctgaagatccccccccccgccatgaacgagatcatcctgggcgccaaccaggacatcagacaggtgctgcacaacctgagcatgtggtgcgccagaagcaaggccctgacctacgaccaggccaaggccgacagccacagagccaagaaggacatcaagatgggccccttcgacgtggccagaaaggtgttcgccgccggcgaggagaccgcccacatgagcctggtggacaagagcgacctgttcttccacgactacagcatcgcccccctgttcgtgcaggagaactacatccacgtgaagcccgtggccgccggcggcgacatgaagaagcacctgatgctgctgagcagagccgccgacagcatctgcgacggcgacctggtggacagccagatcagaagcaagcagaactggagcctgctgcccgcccaggccatctacgccagcgtgctgcccggcgagctgatgagaggctacatgacccagttccccaccttccccagctggctgggcaagcacagcagcaccggcaagcacgacagaatcgtgcaggacctggccctgcacatgagcctgagaacctacagcagcaagagaaccgtgaacatggactacctgagcctgctgagagacgccctggtgcagcccctgaccagccagggcgtggacggcgtgcaggacgtggtggccctgatggacacctactacctgatgaaggaggacttcgagaacatcatggagatcagcagctggggcggcaagcccagccccttcagcaagctggaccccaaggtgaaggccgccttcaccagagcctacaacaaggaggcccacctgaccccctacagcctgcaggccatcaaggccagcagacacagcaccagccccagcctggacagcgagtacaacgaggagctgaacgaggacgacagccagagcgacgagaaggaccaggacgccatcgagaccgacgccatgatcaagaagaagaccaagagcagcaagcccagcaagcccgagaaggacaaggagcccagaaagggcaagggcaagagcagcaagaagtag

SEQ ID NO: 12653 - DNA, 3447 bp, synthetic construct
  misc_feature 1..3447: note = Description of Artificial Sequence: Synthetic coding sequence
  source 1..3447: mol_type = other DNA
atggacatcagaaagttcttcggcgtgatccccagcggcaagaagctggtgagcgagaccgtgaagaagaacgagaagaccaagagcgacgaggagaccctgaaggccaagaagggcatcaaggagatcaaggtgaacagcagcagaaaggaggacgacttcaagcagaagcagcccagcaagaagaagagaatcatctacgacagcgacagcgagagcgaggagaccctgcaggtgaagaacgccaagaagccccccgagaagctgcccgtgagcagcaagcccggcaagatcagcagacaggaccccgtgacctacatcagcgagaccgacgaggaggacgacttcatgtgcaagaaggccgccagcaagagcaaggagaacggcagaagcaccaacagccacctgggcaccagcaacatgaagaagaacgaggagaacaccaagaccaagaacaagcccctgagccccatcaagctgacccccaccagcgtgctggactacttcggcaccggcagcgtgcagagaagcaacaagaagatggtggccagcaagagaaaggagctgagccagaacaccgacgagagcggcctgaacgacgaggccatcgccaagcagctgcagctggacgaggacgccgagctggagagacagctgcacgaggacgaggagttcgccagaaccctggccatgctggacgaggagcccaagaccaagaaggccagaaaggacaccgaggccggcgagaccttcagcagcgtgcaggccaacctgagcaaggccgagaagcacaagtacccccacaaggtgaagaccgcccaggtgagcgacgagagaaagagctacagccccagaaagcagagcaagtacgagagcagcaaggagagccagcagcacagcaagagcagcgccgacaagatcggcgaggtgagcagccccaaggccagcagcaagctggccatcatgaagagaaaggaggagagcagctacaaggagatcgagcccgtggccagcaagagaaaggagaacgccatcaagctgaagggcgagaccaagacccccaagaagaccaagagcagccccgccaagaaggagagcgtgagccccgaggacagcgagaagaagagaaccaactaccaggcctacagaagctacctgaacagagagggccccaaggccctgggcagcaaggagatccccaagggcgccgagaactgcctggagggcctgatcttcgtgatcaccggcgtgctggagagcatcgagagagacgaggccaagagcctgatcgagagatacggcggcaaggtgaccggcaacgtgagcaagaagaccaactacctggtgatgggcagagacagcggccagagcaagagcgacaaggccgccgccctgggcaccaagatcatcgacgaggacggcctgctgaacctgatcagaaccatgcccggcaagaagagcaagtacgagatcgccgtggagaccgagatgaagaaggagagcaagctggagagaaccccccagaagaacgtgcagggcaagagaaagatcagccccagcaagaaggagagcgagagcaagaagagcagacccaccagcaagagagacagcctggccaagaccatcaagaaggagaccgacgtgttctggaagagcctggacttcaaggagcaggtggccgaggagaccagcggcgacagcaaggccagaaacctggccgacgacagcagcgagaacaaggtggagaacctgctgtgggtggacaagtacaagcccaccagcctgaagaccatcatcggccagcagggcgaccagagctgcgccaacaagctgctgagatggctgagaaactggcagaagagcagcagcgaggacaagaagcacgccgccaagttcggcaagttcagcggcaaggacgacggcagcagcttcaaggccgccctgctgagcggcccccccggcgtgggcaagaccaccaccgccagcctggtgtgccaggagctgggctacagctacgtggagctgaacgccagcgacaccagaagcaagagcagcctgaaggccatcgtggccgagagcctgaacaacaccagcatcaagggcttctacagcaacggcgccgccagcagcgtgagcaccaagcacgccctgatcatggacgaggtggacggcatggccggcaacgaggacagaggcggcatccaggagctgatcggcctgatcaagcacaccaagatccccatcatctgcatgtgcaacgacagaaaccaccccaagatcagaagcctggtgcactactgcttcgacctgagattccagagacccagagtggagcagatcaagggcgccatgatgagcatcgccttcaaggagggcctgaagatccccccccccgccatgaacgagatcatcctgggcgccaaccaggacatcagacaggtgctgcacaacctgagcatgtggtgcgccagaagcaaggccctgacctacgaccaggccaaggccgacagccacagagccaagaaggacatcaagatgggccccttcgacgtggccagaaaggtgttcgccgccggcgaggagaccgcccacatgagcctggtggacaagagcgacctgttcttccacgactacagcatcgcccccctgttcgtgcaggagaactacatccacgtgaagcccgtggccgccggcggcgacatgaagaagcacctgatgctgctgagcagagccgccgacagcatctgcgacggcgacctggtggacagccagatcagaagcaagcagaactggagcctgctgcccgcccaggccatctacgccagcgtgctgcccggcgagctgatgagaggctacatgacccagttccccaccttccccagctggctgggcaagcacagcagcaccggcaagcacgacagaatcgtgcaggacctggccctgcacatgagcctgagaacctacagcagcaagagaaccgtgaacatggactacctgagcctgctgagagacgccctggtgcagcccctgaccagccagggcgtggacggcgtgcaggacgtggtggccctgatggacacctactacctgatgaaggaggacttcgagaacatcatggagatcagcagctggggcggcaagcccagccccttcagcaagctggaccccaaggtgaaggccgccttcaccagagcctacaacaaggaggcccacctgaccccctacagcctgcaggccatcaaggccagcagacacagcaccagccccagcctggacagcgagtacaacgaggagctgaacgaggacgacagccagagcgacgagaaggaccaggacgccatcgagaccgacgccatgatcaagaagaagaccaagagcagcaagcccagcaagcccgagaaggacaaggagcccagaaagggcaagggcaagagcagcaagaagtag

SEQ ID NO: 12654 - DNA, 564 bp, synthetic construct
  misc_feature 1..564: note = Description of Artificial Sequence: Synthetic coding sequence
  source 1..564: mol_type = other DNA
cccgaggacagcgagaagaagagaaccaactaccaggcctacagaagctacctgaacagagagggccccaaggccctgggcagcaaggagatccccaagggcgccgagaactgcctggagggcctgatcttcgtgatcaccggcgtgctggagagcatcgagagagacgaggccaagagcctgatcgagagatacggcggcaaggtgaccggcaacgtgagcaagaagaccaactacctggtgatgggcagagacagcggccagagcaagagcgacaaggccgccgccctgggcaccaagatcatcgacgaggacggcctgctgaacctgatcagaaccatgcccggcaagaagagcaagtacgagatcgccgtggagaccgaggagctgggctacagctacgtggagctgaacgccagcgacaccagaagcaagagcagcctgaaggccatcgtggccgagagcctgaacaacaccagcatcaagggcttctacagcaacggcgccgccagcagcgtgagcaccaagcacgccctgatcatggacgaggtggacggcatgtag

SEQ ID NO: 12655 - DNA, 1851 bp, synthetic construct
  misc_feature 1..1851: note = Description of Artificial Sequence: Synthetic coding sequence
  source 1..1851: mol_type = other DNA
atggtgggccagctgagcgagggcgccatcgccgccatcatgcagaagggcgacaccaacatcaagcccatcctgcaggtgatcaacatcagacccatcaccaccggcaacagcccccccagatacagactgctgatgagcgacggcctgaacaccctgagcagcttcatgctggccacccagctgaaccccctggtggaggaggagcagctgagcagcaactgcgtgtgccagatccacagattcatcgtgaacaccctgaaggacggcagaagagtggtgatcctgatggagctggaggtgctgaagagcgccgaggccgtgggcgtgaagatcggcaaccccgtgccctacaacgagggcctgggccagccccaggtggccccccccgcccccgccgccagccccgccgccagcagcagaccccagccccagaacggcagcagcggcatgggcagcaccgtgagcaaggcctacggcgccagcaagaccttcggcaaggccgccggccccagcctgagccacaccagcggcggcacccagagcaaggtggtgcccatcgccagcctgaccccctaccagagcaagtggaccatctgcgccagagtgaccaacaagagccagatcagaacctggagcaacagcagaggcgagggcaagctgttcagcctggagctggtggacgagagcggcgagatcagagccaccgccttcaacgagcaggtggacaagttcttccccctgatcgaggtgaacaaggtgtactacttcagcaagggcaccctgaagatcgccaacaagcagttcaccgccgtgaagaacgactacgagatgaccttcaacaacgagaccagcgtgatgccctgcgaggacgaccaccacctgcccaccgtgcagttcgacttcaccggcatcgacgacctggagaacaagagcaaggacagcctggtggacatcatcggcatctgcaagagctacgaggacgccaccaagatcaccgtgagaagcaacaacagagaggtggccaagagaaacatctacctgatggacaccagcggcaaggtggtgaccgccaccctgtggggcgaggacgccgacaagttcgacggcagcagacagcccgtgctggccatcaagggcgccagagtgagcgacttcggcggcagaagcctgagcgtgctgagcagcagcaccatcatcgccaaccccgacatccccgaggcctacaagctgagaggctggttcgacgccgagggccaggccctggacggcgtgagcatcagcgacctgaagagcggcggcgtgggcggcagcaacaccaactggaagaccctgtacgaggtgaagagcgagaacctgggccagggcgacaagcccgactacttcagcagcgtggccaccgtggtgtacctgagaaaggagaactgcatgtaccaggcctgccccacccaggactgcaacaagaaggtgatcgaccagcagaacggcctgtacagatgcgagaagtgcgacaccgagttccccaacttcaagtacagaatgatcctgagcgtgaacatcgccgacttccaggagaaccagtgggtgacctgcttccaggagagcgccgaggccatcctgggccagaacgccgcctacctgggcgagctgaaggacaagaacgagcaggccttcgaggaggtgttccagaacgccaacttcagaagcttcatcttcagagtgagagtgaaggtggagacctacaacgacgagagcagaatcaaggccaccgtgatggacgtgaagcccgtggactacagagagtacggcagaagactggtgatgagcatcagaagaagcgccctgatgtag

SEQ ID NO: 12656 - DNA, 2217 bp, synthetic construct
  misc_feature 1..2217: note = Description of Artificial Sequence: Synthetic coding sequence
  source 1..2217: mol_type = other DNA
atgaccagcagcggccccggccccagattcctgctgctgctgcccctgctgctgccccccgccgccagcgccagcgacagacccagaggcagagaccccgtgaaccccgagaagctgctggtgatcaccgtggccaccgccgagaccgagggctacctgagattcctgagaagcgccgagttcttcaactacaccgtgagaaccctgggcctgggcgaggagtggagaggcggcgacgtggccagaaccgtgggcggcggccagaaggtgagatggctgaagaaggagatggagaagtacgccgacagagaggacatgatcatcatgttcgtggacagctacgacgtgatcctggccggcagccccaccgagctgctgaagaagttcgtgcagagcggcagcagactgctgttcagcgccgagagcttctgctggcccgagtggggcctggccgagcagtaccccgaggtgggcaccggcaagagattcctgaacagcggcggcttcatcggcttcgccaccaccatccaccagatcgtgagacagtggaagtacaaggacgacgacgacgaccagctgttctacaccagactgtacctggaccccggcctgagagagaagctgagcctgaacctggaccacaagagcagaatcttccagaacctgaacggcgccctggacgaggtggtgctgaagttcgacagaaacagagtgagaatcagaaacgtggcctacgacaccctgcccatcgtggtgcacggcaacggccccaccaagctgcagctgaactacctgggcaactacgtgcccaacggctggacccccgagggcggctgcggcttctgcaaccaggacagaagaaccctgcccggcggccagcccccccccagagtgttcctggccgtgttcgtggagcagcccacccccttcctgcccagattcctgcagagactgctgctgctggactacccccccgacagagtgaccctgttcctgcacaacaacgaggtgttccacgagccccacatcgccgacagctggccccagctgcaggaccacttcagcgccgtgaagctggtgggccccgaggaggccctgagccccggcgaggccagagacatggccatggacctgtgcagacaggaccccgagtgcgagttctacttcagcctggacgccgacgccgtgctgaccaacctgcagaccctgagaatcctgatcgaggagaacagaaaggtgatcgcccccatgctgagcagacacggcaagctgtggagcaacttctggggcgccctgagccccgacgagtactacgccagaagcgaggactacgtggagctggtgcagagaaagagagtgggcgtgtggaacgtgccctacatcagccaggcctacgtgatcagaggcgacaccctgagaatggagctgccccagagagacgtgttcagcggcagcgacaccgaccccgacatggccttctgcaagagcttcagagacaagggcatcttcctgcacctgagcaaccagcacgagttcggcagactgctggccaccagcagatacgacaccgagcacctgcaccccgacctgtggcagatcttcgacaaccccgtggactggaaggagcagtacatccacgagaactacagcagagccctggagggcgagggcatcgtggagcagccctgccccgacgtgtactggttccccctgctgagcgagcagatgtgcgacgagctggtggccgagatggagcactacggccagtggagcggcggcagacacgaggacagcagactggccggcggctacgagaacgtgcccaccgtggacatccacatgaagcaggtgggctacgaggaccagtggctgcagctgctgagaacctacgtgggccccatgaccgagagcctgttccccggctaccacaccaaggccagagccgtgatgaacttcgtggtgagatacagacccgacgagcagcccagcctgagaccccaccacgacagcagcaccttcaccctgaacgtggccctgaaccacaagggcctggactacgagggcggcggctgcagattcctgagatacgactgcgtgatcagcagccccagaaagggctgggccctgctgcaccccggcagactgacccactaccacgagggcctgcccaccacctggggcaccagatacatcatggtgagcttcgtggacccctag

SEQ ID NO: 12657 - DNA, 366 bp, synthetic construct
  misc_feature 1..366: note = Description of Artificial Sequence: Synthetic coding sequence
  source 1..366: mol_type = other DNA
atggtggacatgatggacctgcccagaagcagaatcaacgccggcatgctggcccagttcatcgacaagcccgtgtgcttcgtgggcagactggagaagatccaccccaccggcaagatgttcatcctgagcgacggcgagggcaagaacggcaccatcgagctgatggagcccctggacgaggagatcagcggcatcgtggaggtggtgggcagagtgaccgccaaggccaccatcctgtgcaccagctacgtgcagttcaaggaggacagccaccccttcgacctgggcctgtacaacgaggccgtgaagatcatccacgacttcccccagttctaccccctgggcatcgtgcagcacgactag

SEQ ID NO: 12658 - DNA, 2787 bp, synthetic construct
  misc_feature 1..2787: note = Description of Artificial Sequence: Synthetic coding sequence
  source 1..2787: mol_type = other DNA
atgccccccaagacccccagaaagaccgccgccaccgccgccgccgccgccgccgagccccccgcccccccccccccccccccccccgaggaggaccccgagcaggacagcggccccgaggacctgcccctggtgagactggagttcgaggagaccgaggagcccgacttcaccgccctgtgccagaagctgaagatccccgaccacgtgagagagagagcctggctgacctgggagaaggtgagcagcgtggacggcgtgctgggcggctacatccagaagaagaaggagctgtggggcatctgcatcttcatcgccgccgtggacctggacgagatgagcttcaccttcaccgagctgcagaagaacatcgagatcagcgtgcacaagttcttcaacctgctgaaggagatcgacaccagcaccaaggtggacaacgccatgagcagactgctgaagaagtacgacgtgctgttcgccctgttcagcaagctggagagaacctgcgagctgatctacctgacccagcccagcagcagcatcagcaccgagatcaacagcgccctggtgctgaaggtgagctggatcaccttcctgctggccaagggcgaggtgctgcagatggaggacgacctggtgatcagcttccagctgatgctgtgcgtgctggactacttcatcaagctgagcccccccatgctgctgaaggagccctacaagaccgccgtgatccccatcaacggcagccccagaacccccagaagaggccagaacagaagcgccagaatcgccaagcagctggagaacgacaccagaatcatcgaggtgctgtgcaaggagcacgagtgcaacatcgacgaggtgaagaacgtgtacttcaagaacttcatccccttcatgaacagcctgggcctggtgaccagcaacggcctgcccgaggtggagaacctgagcaagagatacgaggagatctacctgaagaacaaggacctggacgccagactgttcctggaccacgacaagaccctgcagaccgacagcatcgacagcttcgagacccagagaacccccagaaagagcaacctggacgaggaggtgaacgtgatccccccccacacccccgtgagaaccgtgatgaacaccatccagcagctgatgatgatcctgaacagcgccagcgaccagcccagcgagaacctgatcagctacttcaacaactgcaccgtgaaccccaaggagagcatcctgaagagagtgaaggacatcggctacatcttcaaggagaagttcgccaaggccgtgggccagggctgcgtggagatcggcagccagagatacaagctgggcgtgagactgtactacagagtgatggagagcatgctgaagagcgaggaggagagactgagcatccagaacttcagcaagctgctgaacgacaacatcttccacatgagcctgctggcctgcgccctggaggtggtgatggccacctacagcagaagcaccagccagaacctggacagcggcaccgacctgagcttcccctggatcctgaacgtgctgaacctgaaggccttcgacttctacaaggtgatcgagagcttcatcaaggccgagggcaacctgaccagagagatgatcaagcacctggagagatgcgagcacagaatcatggagagcctggcctggctgagcgacagccccctgttcgacctgatcaagcagagcaaggacagagagggccccaccgaccacctggagagcgcctgccccctgaacctgcccctgcagaacaaccacaccgccgccgacatgtacctgagccccgtgagaagccccaagaagaagggcagcaccaccagagtgaacagcaccgccaacgccgagacccaggccaccagcgccttccagacccagaagcccctgaagagcaccagcctgagcctgttctacaagaaggtgtacagactggcctacctgagactgaacaccctgtgcgagagactgctgagcgagcaccccgagctggagcacatcatctggaccctgttccagcacaccctgcagaacgagtacgagctgatgagagacagacacctggaccagatcatgatgtgcagcatgtacggcatctgcaaggtgaagaacatcgacctgaagttcaagatcatcgtgaccgcctacaaggacctgccccacgccgtgcaggagaccttcaagagagtgctgatcaaggaggaggagtacgacagcatcatcgtgttctacaacagcgtgttcatgcagagactgaagaccaacatcctgcagtacgccagcaccagaccccccaccctgagccccatcccccacatccccagaagcccctacaagttccccagcagccccctgagaatccccggcggcaacatctacatcagccccctgaagagcccctacaagatcagcgagggcctgcccacccccaccaagatgacccccagaagcagaatcctggtgagcatcggcgagagcttcggcaccagcgagaagttccagaagatcaaccagatggtgtgcaacagcgacagagtgctgaagagaagcgccgagggcagcaacccccccaagcccctgaagaagctgagattcgacatcgagggcagcgacgaggccgacggcagcaagcacctgcccggcgagagcaagttccagcagaagctggccgagatgaccagcaccagaaccagaatgcagaagcagaagatgaacgacagcatggacaccagcaacaaggaggagaagtag

SEQ ID NO: 12659 - DNA, 162 bp, synthetic construct
  misc_feature 1..162: note = Description of Artificial Sequence: Synthetic coding sequence
  source 1..162: mol_type = other DNA
atgccccccaagacccccagaaagaccgccgccaccgccgccgccgccgccgccgagccccccgcccccccccccccccccccccccgaggaggaccccgagcaggacagcggccccgaggacctgcccctggtgagaggcagcatcaccaacggcagatag

SEQ ID NO: 12660 - DNA, 2724 bp, synthetic construct
  misc_feature 1..2724: note = Description of Artificial Sequence: Synthetic coding sequence
  source 1..2724: mol_type = other DNA
atgccccccaagacccccccccccgaggaggaccccgagcaggacagcggccccgaggacctgcccctggtgagactggagttcgaggagaccgaggagcccgacttcaccgccctgtgccagaagctgaagatccccgaccacgtgagagagagagcctggctgacctgggagaaggtgagcagcgtggacggcgtgctgggcggctacatccagaagaagaaggagctgtggggcatctgcatcttcatcgccgccgtggacctggacgagatgagcttcaccttcaccgagctgcagaagaacatcgagatcagcgtgcacaagttcttcaacctgctgaaggagatcgacaccagcaccaaggtggacaacgccatgagcagactgctgaagaagtacgacgtgctgttcgccctgttcagcaagctggagagaacctgcgagctgatctacctgacccagcccagcagcagcatcagcaccgagatcaacagcgccctggtgctgaaggtgagctggatcaccttcctgctggccaagggcgaggtgctgcagatggaggacgacctggtgatcagcttccagctgatgctgtgcgtgctggactacttcatcaagctgagcccccccatgctgctgaaggagccctacaagaccgccgtgatccccatcaacggcagccccagaacccccagaagaggccagaacagaagcgccagaatcgccaagcagctggagaacgacaccagaatcatcgaggtgctgtgcaaggagcacgagtgcaacatcgacgaggtgaagaacgtgtacttcaagaacttcatccccttcatgaacagcctgggcctggtgaccagcaacggcctgcccgaggtggagaacctgagcaagagatacgaggagatctacctgaagaacaaggacctggacgccagactgttcctggaccacgacaagaccctgcagaccgacagcatcgacagcttcgagacccagagaacccccagaaagagcaacctggacgaggaggtgaacgtgatccccccccacacccccgtgagaaccgtgatgaacaccatccagcagctgatgatgatcctgaacagcgccagcgaccagcccagcgagaacctgatcagctacttcaacaactgcaccgtgaaccccaaggagagcatcctgaagagagtgaaggacatcggctacatcttcaaggagaagttcgccaaggccgtgggccagggctgcgtggagatcggcagccagagatacaagctgggcgtgagactgtactacagagtgatggagagcatgctgaagagcgaggaggagagactgagcatccagaacttcagcaagctgctgaacgacaacatcttccacatgagcctgctggcctgcgccctggaggtggtgatggccacctacagcagaagcaccagccagaacctggacagcggcaccgacctgagcttcccctggatcctgaacgtgctgaacctgaaggccttcgacttctacaaggtgatcgagagcttcatcaaggccgagggcaacctgaccagagagatgatcaagcacctggagagatgcgagcacagaatcatggagagcctggcctggctgagcgacagccccctgttcgacctgatcaagcagagcaaggacagagagggccccaccgaccacctggagagcgcctgccccctgaacctgcccctgcagaacaaccacaccgccgccgacatgtacctgagccccgtgagaagccccaagaagaagggcagcaccaccagagtgaacagcaccgccaacgccgagacccaggccaccagcgccttccagacccagaagcccctgaagagcaccagcctgagcctgttctacaagaaggtgtacagactggcctacctgagactgaacaccctgtgcgagagactgctgagcgagcaccccgagctggagcacatcatctggaccctgttccagcacaccctgcagaacgagtacgagctgatgagagacagacacctggaccagatcatgatgtgcagcatgtacggcatctgcaaggtgaagaacatcgacctgaagttcaagatcatcgtgaccgcctacaaggacctgccccacgccgtgcaggagaccttcaagagagtgctgatcaaggaggaggagtacgacagcatcatcgtgttctacaacagcgtgttcatgcagagactgaagaccaacatcctgcagtacgccagcaccagaccccccaccctgagccccatcccccacatccccagaagcccctacaagttccccagcagccccctgagaatccccggcggcaacatctacatcagccccctgaagagcccctacaagatcagcgagggcctgcccacccccaccaagatgacccccagaagcagaatcctggtgagcatcggcgagagcttcggcaccagcgagaagttccagaagatcaaccagatggtgtgcaacagcgacagagtgctgaagagaagcgccgagggcagcaacccccccaagcccctgaagaagctgagattcgacatcgagggcagcgacgaggccgacggcagcaagcacctgcccggcgagagcaagttccagcagaagctggccgagatgaccagcaccagaaccagaatgcagaagcagaagatgaacgacagcatggacaccagcaacaaggaggagaagtag

SEQ ID NO: 12661 - DNA, 2694 bp, synthetic construct
  misc_feature 1..2694: note = Description of Artificial Sequence: Synthetic coding sequence
  source 1..2694: mol_type = other DNA
atgaacatcagcggcagcagctgcggcagccccaacagcgccgacaccagcagcgacttcaaggacctgtggaccaagctgaaggagtgccacgacagagaggtgcagggcctgcaggtgaaggtgaccaagctgaagcaggagagaatcctggacgcccagagactggaggagttcttcaccaagaaccagcagctgagagagcagcagaaggtgctgcacgagaccatcaaggtgctggaggacagactgagagccggcctgtgcgacagatgcgccgtgaccgaggagcacatgagaaagaagcagcaggagttcgagaacatcagacagcagaacctgaagctgatcaccgagctgatgaacgagagaaacaccctgcaggaggagaacaagaagctgagcgagcagctgcagcagaagatcgagaacgaccagcagcaccaggccgccgagctggagtgcgaggaggacgtgatccccgacagccccatcaccgccttcagcttcagcggcgtgaacagactgagaagaaaggagaacccccacgtgagatacatcgagcagacccacaccaagctggagcacagcgtgtgcgccaacgagatgagaaaggtgagcaagagcagcacccacccccagcacaaccccaacgagaacgagatcctggtggccgacacctacgaccagagccagagccccatggccaaggcccacggcaccagcagctacacccccgacaagagcagcttcaacctggccaccgtggtggccgagaccctgggcctgggcgtgcaggaggagagcgagacccagggccccatgagccccctgggcgacgagctgtaccactgcctggagggcaaccacaagaagcagcccttcgaggagagcaccagaaacaccgaggacagcctgagattcagcgacagcaccagcaagacccccccccaggaggagctgcccaccagagtgagcagccccgtgttcggcgccaccagcagcatcaagagcggcctggacctgaacaccagcctgagccccagcctgctgcagcccggcaagaagaagcacctgaagaccctgcccttcagcaacacctgcatcagcagactggagaagaccagaagcaagagcgaggacagcgccctgttcacccaccacagcctgggcagcgaggtgaacaagatcatcatccagagcagcaacaagcagatcctgatcaacaagaacatcagcgagagcctgggcgagcagaacagaaccgagtacggcaaggacagcaacaccgacaagcacctggagcccctgaagagcctgggcggcagaaccagcaagagaaagaagaccgaggaggagagcgagcacgaggtgagctgcccccaggccagcttcgacaaggagaacgccttccccttccccatggacaaccagttcagcatgaacggcgactgcgtgatggacaagcccctggacctgagcgacagattcagcgccatccagagacaggagaagagccagggcagcgagaccagcaagaacaagttcagacaggtgaccctgtacgaggccctgaagaccatccccaagggcttcagcagcagcagaaaggccagcgacggcaactgcaccctgcccaaggacagccccggcgagccctgcagccaggagtgcatcatcctgcagcccctgaacaagtgcagccccgacaacaagcccagcctgcagatcaaggaggagaacgccgtgttcaagatccccctgagacccagagagagcctggagaccgagaacgtgctggacgacatcaagagcgccggcagccacgagcccatcaagatccagaccagaagcgaccacggcggctgcgagctggccagcgtgctgcagctgaacccctgcagaaccggcaagatcaagagcctgcagaacaaccaggacgtgagcttcgagaacatccagtggagcatcgaccccggcgccgacctgagccagtacaagatggacgtgaccgtgatcgacaccaaggacggcagccagagcaagctgggcggcgagaccgtggacatggactgcaccctggtgagcgagaccgtgctgctgaagatgaagaagcaggagcagaagggcgagaagagcagcaacgaggagagaaagatgaacgacagcctggaggacatgttcgacagaaccacccacgaggagtacgagagctgcctggccgacagcttcagccaggccgccgacgaggaggaggagctgagcaccgccaccaagaagctgcacacccacggcgacaagcaggacaaggtgaagcagaaggccttcgtggagccctacttcaagggcgacgagagagagaccagcctgcagaacttcccccacatcgaggtggtgagaaagaaggaggagagaagaaagctgctgggccacacctgcaaggagtgcgagatctactacgccgacatgcccgccgaggagagagagaagaagctggccagctgcagcagacacagattcagatacatcccccccaacacccccgagaacttctgggaggtgggcttccccagcacccagacctgcatggagagaggctacatcaaggaggacctggacccctgccccagacccaagagaagacagccctacaacgccatcttcagccccaagggcaaggagcagaagacctag

SEQ ID NO: 12662 - DNA, 2709 bp, synthetic construct
  misc_feature 1..2709: note = Description of Artificial Sequence: Synthetic coding sequence
  source 1..2709: mol_type = other DNA
atgaacatcagcggcagcagctgcggcagccccaacagcgccgacaccagcagcgacttcaaggacctgtggaccaagctgaaggagtgccacgacagagaggtgcagggcctgcaggtgaaggtgaccaagctgaagcaggagagaatcctggacgcccagagactggaggagttcttcaccaagaaccagcagctgagagagcagcagaaggtgctgcacgagaccatcaaggtgctggaggacagactgagagccggcctgtgcgacagatgcgccgtgaccgaggagcacatgagaaagaagcagcaggagttcgagaacatcagacagcagaacctgaagctgatcaccgagctgatgaacgagagaaacaccctgcaggaggagaacaagaagctgagcgagcagctgcagcagaagatcgagaacgaccagcagcaccaggccgccgagctggagtgcgaggaggacgtgatccccgacagccccatcaccgccttcagcttcagcggcgtgaacagactgagaagaaaggagaacccccacgtgagatacatcgagcagacccacaccaagctggagcacagcgtgtgcgccaacgagatgagaaaggtgagcaagagcagcacccacccccagcacaaccccaacgagaacgagatcctggtggccgacacctacgaccagagccagagccccatggccaaggcccacggcaccagcagctacacccccgacaagagcagcttcaacctggccaccgtggtggccgagaccctgggcctgggcgtgcaggaggagagcgagacccagggccccatgagccccctgggcgacgagctgtaccactgcctggagggcaaccacaagaagcagcccttcgaggagagcaccagaaacaccgaggacagcctgagattcagcgacagcaccagcaagacccccccccaggaggagctgcccaccagagtgagcagccccgtgttcggcgccaccagcagcatcaagagcggcctggacctgaacaccagcctgagccccagcctgctgcagcccggcaagaagaagcacctgaagaccctgcccttcagcaacacctgcatcagcagactggagaagaccagaagcaagagcgaggacagcgccctgttcacccaccacagcctgggcagcgaggtgaacaagatcatcatccagagcagcaacaagcagatcctgatcaacaagaacatcagcgagagcctgggcgagcagaacagaaccgagtacggcaaggacagcaacaccgacaagcacctggagcccctgaagagcctgggcggcagaaccagcaagagaaagaagaccgaggaggagagcgagcacgaggtgagctgcccccaggccagcttcgacaaggagaacgccttccccttccccatggacaaccagttcagcatgaacggcgactgcgtgatggacaagcccctggacctgagcgacagattcagcgccatccagagacaggagaagagccagggcagcgagaccagcaagaacaagttcagacaggtgaccctgtacgaggccctgaagaccatccccaagggcttcagcagcagcagaaaggccagcgacggcaactgcaccctgcccaaggacagccccggcgagccctgcagccaggagtgcatcatcctgcagcccctgaacaagtgcagccccgacaacaagcccagcctgcagatcaaggaggagaacgccgtgttcaagatccccctgagacccagagagagcctggagaccgagaacgtgctggacgacatcaagagcgccggcagccacgagcccatcaagatccagaccagaagcgaccacggcggctgcgagctggccagcgtgctgcagctgaacccctgcagaaccggcaagatcaagagcctgcagaacaaccaggacgtgagcttcgagaacatccagtggagcatcgaccccggcgccgacctgagccagtacaagatggacgtgaccgtgatcgacaccaaggacggcagccagagcaagctgggcggcgagaccgtggacatggactgcaccctggtgagcgagaccgtgctgctgaagatgaagaagcaggagcagaagggcgagaagagcagcatgctgttctacatcgacgaggagagaaagatgaacgacagcctggaggacatgttcgacagaaccacccacgaggagtacgagagctgcctggccgacagcttcagccaggccgccgacgaggaggaggagctgagcaccgccaccaagaagctgcacacccacggcgacaagcaggacaaggtgaagcagaaggccttcgtggagccctacttcaagggcgacgagagagagaccagcctgcagaacttcccccacatcgaggtggtgagaaagaaggaggagagaagaaagctgctgggccacacctgcaaggagtgcgagatctactacgccgacatgcccgccgaggagagagagaagaagctggccagctgcagcagacacagattcagatacatcccccccaacacccccgagaacttctgggaggtgggcttccccagcacccagacctgcatggagagaggctacatcaaggaggacctggacccctgccccagacccaagagaagacagccctacaacgccatcttcagccccaagggcaaggagcagaagacctag

SEQ ID NO: 12663 - DNA, 2598 bp, synthetic construct
  misc_feature 1..2598: note = Description of Artificial Sequence: Synthetic coding sequence
  source 1..2598: mol_type = other DNA
atgaacatcagcggcagcagctgcggcagccccaacagcgccgacaccagcagcgacttcaaggacctgtggaccaagctgaaggagtgccacgacagagaggtgcagggcctgcaggtgaaggtgaccaagctgaagcaggagagaatcctggacgcccagagactggaggagttcttcaccaagaaccagcagctgagagagcagcagaaggtgctgcacgagaccatcaaggtgctggaggacagactgagagccggcctgtgcgacagatgcgccgtgaccgaggagcacatgagaaagaagcagcaggagttcgagaacatcagacagcagaacctgaagctgatcaccgagctgatgaacgagagaaacaccctgcaggaggagaacaagaagctgagcgagcagctgcagcagaagatcgagaacgaccagcagcaccaggccgccgagctggagtgcgaggaggacgtgatccccgacagccccatcaccgccttcagcttcagcggcgtgaacagactgagaagaaaggagaacccccacgtgagatacatcgagcagacccacaccaagctggagcacagcgtgtgcgccaacgagatgagaaaggtgagcaagagcagcacccacccccagcacaaccccaacgagaacgagatcctggtggccgacacctacgaccagagccagagccccatggccaaggcccacggcaccagcagctacacccccgacaagagcagcttcaacctggccaccgtggtggccgagaccctgggcctgggcgtgcaggaggagagcgagacccagggccccatgagccccctgggcgacgagctgtaccactgcctggagggcaaccacaagaagcagcccttcgaggagagcaccagaaacaccgaggacagcctgagattcagcgacagcaccagcaagacccccccccaggaggagctgcccaccagagtgagcagccccgtgttcggcgccaccagcagcatcaagagcggcctggacctgaacaccagcctgagccccagcctgctgcagcccggcaagaagaagcacctgaagaccctgcccttcagcaacacctgcatcagcagactggagaagaccagaagcaagagcgaggacagcgccctgttcacccaccacagcctgggcagcgaggtgaacaagatcatcatccagagcagcaacaagcagatcctgatcaacaagaacatcagcgagagcctgggcgagcagaacagaaccgagtacggcaaggacagcaacaccgacaagcacctggagcccctgaagagcctgggcggcagaaccagcaagagaaagaagaccgaggaggagagcgagcacgaggtgagctgcccccaggccagcttcgacaaggagaacgccttccccttccccatggacaaccagttcagcatgaacggcgactgcgtgatggacaagcccctggacctgagcgacagattcagcgccatccagagacaggagaagagccagggcagcgagaccagcaagaacaagttcagacaggtgaccctgtacgaggccctgaagaccatccccaagggcttcagcagcagcagaaaggccagcgacggcaactgcaccctgcccaaggacagccccggcgagccctgcagccaggagtgcatcatcctgcagcccctgaacaagtgcagccccgacaacaagcccagcctgcagatcaaggaggagaacgccgtgttcaagatccccctgagacccagagagagcctggagaccgagaacgtgctggacgacatcaagagcgccggcagccacgagcccatcaagatccagaccagaagcgaccacggcggctgcgagctggccagcgtgctgcagctgaacccctgcagaaccggcaagatcaagagcctgcagaacaaccaggacgtgagcttcgagaacatccagtggagcatcgaccccggcgccgacctgagccagtacaagatggacgtgaccgtgatcgacaccaaggacggcagccagagcaagctgggcggcgagaccgtggacatggactgcaccctggtgagcgagaccgtgctgctgaagatgaagaagcaggagcagaagggcgagaagagcagcaacgaggagagaaagatgaacgacagcctggaggacatgttcgacagaaccacccacgaggagtacgagagctgcctggccgacagcttcagccaggccgccgacgaggaggaggagctgagcaccgccaccaagaagctgcacacccacggcgacaagcaggacaaggtgaagcagaaggccttcgtggagccctacttcaagggcgacgagagcatcatgcagatctgccagcagaagaaggagaagagaaactggctgcccgcccaggacaccgacagcgccaccttccaccccacccaccagagaatcttcggcaagctggtgttcctgcccctgagactggtgtggaaggaggtgatcctgagaaagatcctgatcctggtgctggtgcagaaggacgtgagcctgaccacccagtacttcctgcagaaggccagaagcagaagacactag

SEQ ID NO: 12664 - DNA, 2694 bp, synthetic construct; identical to SEQ ID NO: 12661
  misc_feature 1..2694: note = Description of Artificial Sequence: Synthetic coding sequence
  source 1..2694: mol_type = other DNA

SEQ ID NO: 12665 - DNA, 2604 bp, synthetic construct
  misc_feature 1..2604: note = Description of Artificial Sequence: Synthetic coding sequence
  source 1..2604: mol_type = other DNA
atgaacatcagcggcagcagctgcggcagccccaacagcgccgacaccagcagcgacttcaaggacctgtggaccaagctgaaggagtgccacgacagagaggtgcagggcctgcaggtgaaggtgaccaagctgaagcaggagagaatcctggacgcccagagactggaggagttcttcaccaagaaccagcagctgagagagcagcagaaggtgctgcacgagaccatcaaggtgctggaggacagactgagagccggcctgtgcgacagatgcgccgtgaccgaggagcacatgagaaagaagcagcaggagttcgagaacatcagacagcagaacctgaagctgatcaccgagctgatgaacgagagaaacaccctgcaggaggagaacaagaagctgagcgagcagctgcagcagaagatcgagaacgaccagcagcaccaggccgccgagctggagtgcgaggaggacgtgatccccgacagccccatcaccgccttcagcttcagcggcgtgaacagactgagaagaaaggagaacccccacgtgagatacatcgagcagacccacaccaagctggagcacagcgtgtgcgccaacgagatgagaaaggtgagcaagagcagcacccacccccagcacaaccccaacgagaacgagatcctggtggccgacacctacgaccagagccagagccccatggccaaggcccacggcaccagcagctacacccccgacaagagcagcttcaacctggccaccgtggtggccgagaccctgggcctgggcgtgcaggaggagagcgagacccagggccccatgagccccctgggcgacgagctgtaccactgcctggagggcaaccacaagaagcagcccttcgaggagagcaccagaaacaccgaggacagcctgagattcagcgacagcaccagcaagacccccccccaggaggagctgcccaccagagtgagcagccccgtgttcggcgccaccagcagcatcaagagcggcctggacctgaacaccagcctgagccccagcctgctgcagcccggcaagaagaagcacctgaagaccctgcccttcagcaacacctgcatcagcagactggagaagaccagaagcaagagcgaggacagcgccctgttcacccaccacagcctgggcagcgaggtgaacaagatcatcatccagagcagcaacaagcagatcctgatcaacaagaacatcagcgagagcctgggcgagcagaacagaaccgagtacggcaaggacagcaacaccgacaagcacctggagcccctgaagagcctgggcggcagaaccagcaagagaaagaagaccgaggaggagagcgagcacgaggtgagctgcccccaggccagcttcgacaaggagaacgccttccccttccccatggacaaccagttcagcatgaacggcgactgcgtgatggacaagcccctggacctgagcgacagattcagcgccatccagagacaggagaagagccagggcagcgagaccagcaagaacaagttcagacaggtgaccctgtacgaggccctgaagaccatccccaagggcttcagcagcagcagaaaggccagcgacggcaactgcaccctgcccaaggacagccccggcgagccctgcagccaggagtgcatcatcctgcagcccctgaacaagtgcagccccgacaacaagcccagcctgcagatcaaggaggagaacgccgtgttcaagatccccctgagacccagagagagcctggagaccgagaacgtgctggacgacatcaagagcgccggcagccacgagcccatcaagatccagaccagaagcgaccacggcggctgcgagctggccagcgtgctgcagctgaacccctgcagaaccggcaagatcaagagcctgcagaacaaccaggacgtgagcttcgagaacatccagtggagcatcgaccccggcgccgacctgagccagtacaagatggacgtgaccgtgatcgacaccaaggacggcagccagagcaagctgggcggcgagaccgtggacatggactgcaccctggtgagcgagaccgtgctgctgaagatgaagaagcaggagcagaagggcgagaagagcagcaacgaggagagaaagatgaacgacagcctggaggacatgttcgacagaaccacccacgaggagtacgagagctgcctggccgacagcttcagccaggccgccgacgaggaggaggagctgagcaccgccaccaagaagctgcacacccacggcgacaagcaggacaaggtgaagcagaaggccttcgtggagccctacttcaagggcgacgagagcatcatgcagatctgccagcagaagaaggagaagagaaactggctgcccgcccaggacaccgacagcgccaccttccaccccacccaccagagaatcttcggcaagctggtgttcctgcccctgagactggtgtggaaggaggtgatcctgagaaagatcctgatcctggtgctggtgcagaaggacgtgagcctgaccacccagtacttcctgcagaaggccagaagcagaagacacagaagatag

SEQ ID NO: 12666 - DNA, 3045 bp, synthetic construct
  misc_feature 1..3045: note = Description of Artificial Sequence: Synthetic coding sequence
  source 1..3045: mol_type = other DNA
atgttcgaggacaagccccacgccgagggcgccgccgtggtggccgccgccggcgaggccctgcaggccctgtgccaggagctgaacctggacgagggcagcgccgccgaggccctggacgacttcaccgccatcagaggcaactacagcctggagggcgaggtgacccactggctggcctgcagcctgtacgtggcctgcagaaagagcatcatccccaccgtgggcaagggcatcatggagggcaactgcgtgagcctgaccagaatcctgagaagcgccaagctgagcctgatccagttcttcagcaagatgaagaagtggatggacatgagcaacctgccccaggagttcagagagagaatcgagagactggagagaaacttcgaggtgagcaccgtgatcttcaagaagtacgagcccatcttcctggacatcttccagaacccctacgaggagccccccaagctgcccagaagcagaaagcagagaagaatcccctgcagcgtgaaggacctgttcaacttctgctggaccctgttcgtgtacaccaagggcaacttcagaatgatcggcgacgacctggtgaacagctaccacctgctgctgtgctgcctggacctgatcttcgccaacgccatcatgtgccccaacagacaggacctgctgaaccccagcttcaagggcctgcccagcgacttccacaccgccgacttcaccgccagcgaggagcccccctgcatcatcgccgtgctgtgcgagctgcacgacggcctgctggtggaggccaagggcatcaaggagcactacttcaagccctacatcagcaagctgttcgacagaaagatcctgaagggcgagtgcctgctggacctgagcagcttcaccgacaacagcaaggccgtgaacaaggagtacgaggagtacgtgctgaccgtgggcgacttcgacgagagaatcttcctgggcgccgacgccgaggaggagatcggcacccccagaaagttcaccagagacacccccctgggcaagctgaccgcccaggccaacgtggagtacaacctgcagcagcacttcgagaagaagagaagcttcgcccccagcacccccctgaccggcagaagatacctgagagagaaggaggccgtgatcacccccgtggccagcgccacccagagcgtgagcagactgcagagcatcgtggccggcctgaagaacgcccccagcgaccagctgatcaacatcttcgagagctgcgtgagaaaccccgtggagaacatcatgaagatcctgaagggcatcggcgagaccttctgccagcactacacccagagcaccgacgagcagcccggcagccacatcgacttcgccgtgaacagactgaagctggccgagatcctgtactacaagatcctggagaccgtgatggtgcaggagaccagaagactgcacggcatggacatgagcgtgctgctggagcaggacatcttccacagaagcctgatggcctgctgcctggagatcgtgctgttcgcctacagcagccccagaaccttcccctggatcatcgaggtgctgaacctgcagcccttctacttctacaaggtgatcgaggtggtgatcagaagcgaggagggcctgagcagagacatggtgaagcacctgaacagcatcgaggagcagatcctggagagcctggcctggagccacgacagcgccctgtgggaggccctgcaggtgagcgccaacaaggtgcccacctgcgaggaggtgatcttccccaacaacttcgagaccggcaacggcggcaacgtgcagggccacctgcccctgatgcccatgagccccctgatgcaccccagagtgaaggaggtgagaaccgacagcggcagcctgagaagagacatgcagcccctgagccccatcagcgtgcacgagagatacagcagccccaccgccggcagcgccaagagaagactgttcggcgaggacccccccaaggagatgctgatggacaagatcatcaccgagggcaccaagctgaagatcgcccccagcagcagcatcaccgccgagaacgtgagcatcctgcccggccagaccctgctgaccatggccaccgcccccgtgaccggcaccaccggccacaaggtgaccatccccctgcacggcgtggccaacgacgccggcgagatcaccctgatccccctgagcatgaacaccaaccaggagagcaaggtgaagagccccgtgagcctgaccgcccacagcctgatcggcgccagccccaagcagaccaacctgaccaaggcccaggaggtgcacagcaccggcatcaacagacccaagagaaccggcagcctggccctgttctacagaaaggtgtaccacctggccagcgtgagactgagagacctgtgcctgaagctggacgtgagcaacgagctgagaagaaagatctggacctgcttcgagttcaccctggtgcactgccccgacctgatgaaggacagacacctggaccagctgctgctgtgcgccttctacatcatggccaaggtgaccaaggaggagagaaccttccaggagatcatgaagagctacagaaaccagccccaggccaacagccacgtgtacagaagcgtgctgctgaagagcatccccagagaggtggtggcctacaacaagaacatcaacgacgacttcgagatgatcgactgcgacctggaggacgccaccaagacccccgactgcagcagcggccccgtgaaggaggagagaggcgacctgatcaagttctacaacaccatctacgtgggcagagtgaagagcttcgccctgaagtacgacctggccaaccaggaccacatgatggacgccccccccctgagccccttcccccacatcaagcagcagcccggcagccccagaagaatcagccagcagcacagcatctacatcagcccccacaagaacggcagcggcctgacccccagaagcgccctgctgtacaagttcaacggcagccccagcaaggtgagatag

SEQ ID NO: 12667 - DNA, 3207 bp, synthetic construct
  misc_feature 1..3207: note = Description of Artificial Sequence: Synthetic coding sequence
  source 1..3207: mol_type = other DNA
atgttcgaggacaagccccacgccgagggcgccgccgtggtggccgccgccggcgaggccctgcaggccctgtgccaggagctgaacctggacgagggcagcgccgccgaggccctggacgacttcaccgccatcagaggcaactacagcctggagggcgaggtgacccactggctggcctgcagcctgtacgtggcctgcagaaagagcatcatccccaccgtgggcaagggcatcatggagggcaactgcgtgagcctgaccagaatcctgagaagcgccaagctgagcctgatccagttcttcagcaagatgaagaagtggatggacatgagcaacctgccccaggagttcagagagagaatcgagagactggagagaaacttcgaggtgagcaccgtgatcttcaagaagtacgagcccatcttcctggacatcttccagaacccctacgaggagccccccaagctgcccagaagcagaaagcagagaagaatcccctgcagcgtgaaggacctgttcaacttctgctggaccctgttcgtgtacaccaagggcaacttcagaatgatcggcgacgacctggtgaacagctaccacctgctgctgtgctgcctggacctgatcttcgccaacgccatcatgtgccccaacagacaggacctgctgaaccccagcttcaagggcctgcccagcgacttccacaccgccgacttcaccgccagcgaggagcccccctgcatcatcgccgtgctgtgcgagctgcacgacggcctgctggtggaggccaagggcatcaaggagcactacttcaagccctacatcagcaagctgttcgacagaaagatcctgaagggcgagtgcctgctggacctgagcagcttcaccgacaacagcaaggccgtgaacaaggagtacgaggagtacgtgctgaccgtgggcgacttcgacgagagaatcttcctgggcgccgacgccgaggaggagatcggcacccccagaaagttcaccagagacacccccctgggcaagctgaccgcccaggccaacgtggagtacaacctgcagcagcacttcgagaagaagagaagcttcgcccccagcacccccctgaccggcagaagatacctgagagagaaggaggccgtgatcacccccgtggccagcgccacccagagcgtgagcagactgcagagcatcgtggccggcctgaagaacgcccccagcgaccagctgatcaacatcttcgagagctgcgtgagaaaccccgtggagaacatcatgaagatcctgaagggcatcggcgagaccttctgccagcactacacccagagcaccgacgagcagcccggcagccacatcgacttcgccgtgaacagactgaagctggccgagatcctgtactacaagatcctggagaccgtgatggtgcaggagaccagaagactgcacggcatggacatgagcgtgctgctggagcaggacatcttccacagaagcctgatggcctgctgcctggagatcgtgctgttcgcctacagcagccccagaaccttcccctggatcatcgaggtgctgaacctgcagcccttctacttctacaaggtgatcgaggtggtgatcagaagcgaggagggcctgagcagagacatggtgaagcacctgaacagcatcgaggagcagatcctggagagcctggcctggagccacgacagcgccctgtgggaggccctgcaggtgagcgccaacaaggtgcccacctgcgaggaggtgatcttccccaacaacttcgagaccggcaacggcggcaacgtgcagggccacctgcccctgatgcccatgagccccctgatgcaccccagagtgaaggaggtgagaaccgacagcggcagcctgagaagagacatgcagcccctgagccccatcagcgtgcacgagagatacagcagccccaccgccggcagcgccaagagaagactgttcggcgaggacccccccaaggagatgctgatggacaagatcatcaccgagggcaccaagctgaagatcgcccccagcagcagcatcaccgccgagaacgtgagcatcctgcccggccagaccctgctgaccatggccaccgcccccgtgaccggcaccaccggccacaaggtgaccatccccctgcacggcgtggccaacgacgccggcgagatcaccctgatccccctgagcatgaacaccaaccaggagagcaaggtgaagagccccgtgagcctgaccgcccacagcctgatcggcgccagccccaagcagaccaacctgaccaaggcccaggaggtgcacagcaccggcatcaacagacccaagagaaccggcagcctggccctgttctacagaaaggtgtaccacctggccagcgtgagactgagagacctgtgcctgaagctggacgtgagcaacgagctgagaagaaagatctggacctgcttcgagttcaccctggtgcactgccccgacctgatgaaggacagacacctggaccagctgctgctgtgcgccttctacatcatggccaaggtgaccaaggaggagagaaccttccaggagatcatgaagagctacagaaaccagccccaggccaacagccacgtgtacagaagcgtgctgctgaagagcatccccagagaggtggtggcctacaacaagaacatcaacgacgacttcgagatgatcgactgcgacctggaggacgccaccaagacccccgactgcagcagcggccccgtgaaggaggagagaggcgacctgatcaagttctacaacaccatctacgtgggcagagtgaagagcttcgccctgaagtacgacctggccaaccaggaccacatgatggacgccccccccctgagccccttcccccacatcaagcagcagcccggcagccccagaagaatcagccagcagcacagcatctacatcagcccccacaagaacggcagcggcctgacccccagaagcgccctgctgtacaagttcaacggcagccccagcaagagcctgaaggacatcaacaacatgatcagacagggcgagcagagaaccaagaagagagtgatcgccatcgacagcgacgccgagagccccgccaagagagtgtgccaggagaacgacgacgtgctgctgaagagactgcaggacgtggtgagcgagagagccaaccactag

SEQ ID NO: 12668 - DNA, 3420 bp, synthetic construct
  misc_feature 1..3420: note = Description of Artificial Sequence: Synthetic coding sequence
  source 1..3420: mol_type = other DNA
atgcccagcggcggcgaccagagcccccccccccccccccccccccccgccgccgccgccagcgacgaggaggaggaggacgacggcgaggccgaggacgccgccccccccgccgagagccccaccccccagatccagcagagattcgacgagctgtgcagcagactgaacatggacgaggccgccagagccgaggcctgggacagctacagaagcatgagcgagagctacaccctggagggcaacgacctgcactggctggcctgcgccctgtacgtggcctgcagaaagagcgtgcccaccgtgagcaagggcaccgtggagggcaactacgtgagcctgaccagaatcctgaagtgcagcgagcagagcctgatcgagttcttcaacaagatgaagaagtgggaggacatggccaacctgcccccccacttcagagagagaaccgagagactggagagaaacttcaccgtgagcgccgtgatcttcaagaagtacgagcccatcttccaggacatcttcaagtacccccaggaggagcagcccagacagcagagaggcagaaagcagagaagacagccctgcaccgtgagcgagatcttccacttctgctgggtgctgttcatctacgccaagggcaacttccccatgatcagcgacgacctggtgaacagctaccacctgctgctgtgcgccctggacctggtgtacggcaacgccctgcagtgcagcaacagaaaggagctggtgaaccccaacttcaagggcctgagcgaggacttccacgccaaggacagcaagcccagcagcgaccccccctgcatcatcgagaagctgtgcagcctgcacgacggcctggtgctggaggccaagggcatcaaggagcacttctggaagccctacatcagaaagctgtacgagaagaagctgctgaagggcaaggaggagaacctgaccggcttcctggagcccggcaacttcggcgagagcttcaaggccatcaacaaggcctacgaggagtacgtgctgagcgtgggcaacctggacgagagaatcttcctgggcgaggacgccgaggaggagatcggcaccctgagcagatgcctgaacgccggcagcggcaccgagaccgccgagagagtgcagatgaagaacatcctgcagcagcacttcgacaagagcaaggccctgagaatcagcacccccctgaccggcgtgagatacatcaaggagaacagcccctgcgtgacccccgtgagcaccgccacccacagcctgagcagactgcacaccatgctgaccggcctgagaaacgcccccagcgagaagctggagcagatcctgagaacctgcagcagagaccccacccaggccatcgccaacagactgaaggagatgttcgagatctacagccagcacttccagcccgacgaggacttcagcaactgcgccaaggagatcgccagcaagcacttcagattcgccgagatgctgtactacaaggtgctggagagcgtgatcgagcaggagcagaagagactgggcgacatggacctgagcggcatcctggagcaggacgccttccacagaagcctgctggcctgctgcctggaggtggtgaccttcagctacaagccccccggcaacttccccttcatcaccgagatcttcgacgtgcccctgtaccacttctacaaggtgatcgaggtgttcatcagagccgaggacggcctgtgcagagaggtggtgaagcacctgaaccagatcgaggagcagatcctggaccacctggcctggaagcccgagagccccctgtgggagaagatcagagacaacgagaacagagtgcccacctgcgaggaggtgatgcccccccagaacctggagagagccgacgagatctgcatcgccggcagccccctgacccccagaagagtgaccgaggtgagagccgacaccggcggcctgggcagaagcatcaccagccccaccaccctgtacgacagatacagcagcccccccgccagcaccaccagaagaagactgttcgtggagaacgacagccccagcgacggcggcacccccggcagaatgcccccccagcccctggtgaacgccgtgcccgtgcagaacgtgagcggcgagaccgtgagcgtgacccccgtgcccggccagaccctggtgaccatggccaccgccaccgtgaccgccaacaacggccagaccgtgaccatccccgtgcagggcatcgccaacgagaacggcggcatcaccttcttccccgtgcaggtgaacgtgggcggccaggcccaggccgtgaccggcagcatccagcccctgagcgcccaggccctggccggcagcctgagcagccagcaggtgaccggcaccaccctgcaggtgcccggccaggtggccatccagcagatcagccccggcggccagcagcagaagcagggccagagcgtgaccagcagcagcaacagacccagaaagaccagcagcctgagcctgttcttcagaaaggtgtaccacctggccgccgtgagactgagagacctgtgcgccaagctggacatcagcgacgagctgagaaagaagatctggacctgcttcgagttcagcatcatccagtgccccgagctgatgatggacagacacctggaccagctgctgatgtgcgccatctacgtgatggccaaggtgaccaaggaggacaagagcttccagaacatcatgagatgctacagaacccagccccaggccagaagccaggtgtacagaagcgtgctgatcaagggcaagagaaagagaagaaacagcggcagcagcgacagcagaagccaccagaacagccccaccgagctgaacaaggacagaaccagcagagacagcagccccgtgatgagaagcagcagcaccctgcccgtgccccagcccagcagcgccccccccacccccaccagactgaccggcgccaacagcgacatggaggaggaggagagaggcgacctgatccagttctacaacaacatctacatcaagcagatcaagaccttcgccatgaagtacagccaggccaacatggacgccccccccctgagcccctaccccttcgtgagaaccggcagccccagaagaatccagctgagccagaaccaccccgtgtacatcagcccccacaagaacgagaccatgctgagccccagagagaagatcttctactacttcagcaacagccccagcaagagactgagagagatcaacagcatgatcagaaccggcgagacccccaccaagaagagaggcatcctgctggaggacggcagcgagagccccgccaagagaatctgccccgagaaccacagcgccctgctgagaagactgcaggacgtggccaacgacagaggcagccactag

SEQ ID NO: 12669 - DNA, 2550 bp, synthetic construct
  misc_feature 1..2550: note = Description of Artificial Sequence: Synthetic coding sequence
  source 1..2550: mol_type = other DNA
atggagagcagatgcgtggcccaggccggcatgcagtggcacgacctgggcagcctgcagcccctgccccccagattcaagagattcttctgcctgagcctgctgagcagctgcgagtacagcaaggccatcaacaaggcctacgaggagtacgtgctgagcgtgggcaacctggacgagagaatcttcctgggcgaggacgccgaggaggagatcggcaccctgagcagatgcctgaacgccggcagcggcaccgagaccgccgagagagtgcagatgaagaacatcctgcagcagcacttcgacaagagcaaggccctgagaatcagcacccccctgaccggcgtgagatacatcaaggagaacagcccctgcgtgacccccgtgagcaccgccacccacagcctgagcagactgcacaccatgctgaccggcctgagaaacgcccccagcgagaagctggagcagatcctgagaacctgcagcagagaccccacccaggccatcgccaacagactgaaggagatgttcgagatctacagccagcacttccagcccgacgaggacttcagcaactgcgccaaggagatcgccagcaagcacttcagattcgccgagatgctgtactacaaggtgctggagagcgtgatcgagcaggagcagaagagactgggcgacatggacctgagcggcatcctggagcaggacgccttccacagaagcctgctggcctgctgcctggaggtggtgaccttcagctacaagccccccggcaacttccccttcatcaccgagatcttcgacgtgcccctgtaccacttctacaaggtgatcgaggtgttcatcagagccgaggacggcctgtgcagagaggtggtgaagcacctgaaccagatcgaggagcagatcctggaccacctggcctggaagcccgagagccccctgtgggagaagatcagagacaacgagaacagagtgcccacctgcgaggaggtgatgcccccccagaacctggagagagccgacgagatctgcatcgccggcagccccctgacccccagaagagtgaccgaggtgagagccgacaccggcggcctgggcagaagcatcaccagccccaccaccctgtacgacagatacagcagcccccccgccagcaccaccagaagaagactgttcgtggagaacgacagccccagcgacggcggcacccccggcagaatgcccccccagcccctggtgaacgccgtgcccgtgcagaacgtgagcggcgagaccgtgagcgtgacccccgtgcccggccagaccctggtgaccatggccaccgccaccgtgaccgccaacaacggccagaccgtgaccatccccgtgcagggcatcgccaacgagaacggcggcatcaccttcttccccgtgcaggtgaacgtgggcggccaggcccaggccgtgaccggcagcatccagcccctgagcgcccaggccctggccggcagcctgagcagccagcaggtgaccggcaccaccctgcaggtgcccggccaggtggccatccagcagatcagccccggcggccagcagcagaagcagggccagagcgtgaccagcagcagcaacagacccagaaagaccagcagcctgagcctgttcttcagaaaggtgtaccacctggccgccgtgagactgagagacctgtgcgccaagctggacatcagcgacgagctgagaaagaagatctggacctgcttcgagttcagcatcatccagtgccccgagctgatgatggacagacacctggaccagctgctgatgtgcgccatctacgtgatggccaaggtgaccaaggaggacaagagcttccagaacatcatgagatgctacagaacccagccccaggccagaagccaggtgtacagaagcgtgctgatcaagggcaagagaaagagaagaaacagcggcagcagcgacagcagaagccaccagaacagccccaccgagctgaacaaggacagaaccagcagagacagcagccccgtgatgagaagcagcagcaccctgcccgtgccccagcccagcagcgccccccccacccccaccagactgaccggcgccaacagcgacatggaggaggaggagagaggcgacctgatccagttctacaacaacatctacatcaagcagatcaagaccttcgccatgaagtacagccaggccaacatggacgccccccccctgagcccctaccccttcgtgagaaccggcagccccagaagaatccagctgagccagaaccaccccgtgtacatcagcccccacaagaacgagaccatgctgagccccagagagaagatcttctactacttcagcaacagccccagcaagagactgagagagatcaacagcatgatcagaaccggcgagacccccaccaagaagagaggcatcctgctggaggacggcagcgagagccccgccaagagaatctgccccgagaaccacagcgccctgctgagaagactgcaggacgtggccaacgacagaggcagccactag

SEQ ID NO: 12670 - DNA, 1668 bp, synthetic construct
  misc_feature 1..1668: note = Description of Artificial Sequence: Synthetic coding sequence
  source 1..1668: mol_type = other DNA
atgcagagcctgaccaagggcaacgacctgcactggctggcctgcgccctgtacgtggcctgcagaaagagcgtgcccaccgtgagcaagggcaccgtggagggcaactacgtgagcctgaccagaatcctgaagtgcagcgagcagagcctgatcgagttcttcaacaagatgaagaagtgggaggacatggccaacctgcccccccacttcagagagagaaccgagagactggagagaaacttcaccgtgagcgccgtgatcttcaagaagtacgagcccatcttccaggacatcttcaagtacccccaggaggagcagcccagacagcagagaggcagaaagcagagaagacagccctgcaccgtgagcgagatcttccacttctgctgggtgctgttcatctacgccaagggcaacttccccatgatcagcgacgacctggtgaacagctaccacctgctgctgtgcgccctggacctggtgtacggcaacgccctgcagtgcagcaacagaaaggagctggtgaaccccaacttcaagggcctgagcgaggacttccacgccaaggacagcaagcccagcagcgaccccccctgcatcatcgagaagctgtgcagcctgcacgacggcctggtgctggaggccaagggcatcaaggagcacttctggaagccctacatcagaaagctgtacgagaagaagctgctgaagggcaaggaggagaacctgaccggcttcctggagcccggcaacttcggcgagagcttcaaggccatcaacaaggcctacgaggagtacgtgctgagcgtgggcaacctggacgagagaatcttcctgggcgaggacgccgaggaggagatcggcaccctgagcagatgcctgaacgccggcagcggcaccgagaccgccgagagagtgcagatgaagaacatcctgcagcagcacttcgacaagagcaaggccctgagaatcagcacccccctgaccggcgtgagatacatcaaggagaacagcccctgcgtgacccccgtgagcaccgccacccacagcctgagcagactgcacaccatgctgaccggcctgagaaacgcccccagcgagaagctggagcagatcctgagaacctgcagcagagaccccacccaggccatcgccaacagactgaaggagatgttcgagatctacagccagcacttccagcccgacgaggacttcagcaactgcgccaaggagatcgccagcaagcacttcagattcgccgagatgctgtactacaaggtgctggagagcgtgatcgagcaggagcagaagagactgggcgacatggacctgagcggcatcctggagcaggacgccttccacagaagcctgctggcctgctgcctggaggtggtgaccttcagctacaagccccccggcaacttccccttcatcaccgagatcttcgacgtgcccctgtaccacttctacaaggtgatcgaggtgttcatcagagccgaggacggcctgtgcagagaggtggtgaagcacctgaaccagatcgaggagcagatcctggaccacctggcctggaagcccgagagccccctgtgggagaagatcagagacaacgagaacagagtgcccacctgcgaggaggtgatgcccccccagaacctggagtag

SEQ ID NO: 12671 - DNA, 1557 bp, synthetic construct
  misc_feature 1..1557: note = Description of Artificial Sequence: Synthetic coding sequence
  source 1..1557: mol_type = other DNA
atgatcagcgacgacctggtgaacagctaccacctgctgctgtgcgccctggacctggtgtacggcaacgccctgcagtgcagcaacagaaaggagctggtgaaccccaacttcaagggcctgagcgaggacttccacgccaaggacagcaagcccagcagcgaccccccctgcatcatcgagaagctgtgcagcctgcacgacggcctggtgctggaggccaagggcatcaaggagcacttctggaagccctacatcagaaagctgtacgagaagaagctgctgaagggcaaggaggagaacctgaccggcttcctggagcccggcaacttcggcgagagcttcaaggccatcaacaaggcctacgaggagtacgtgctgagcgtgggcaacctggacgagagaatcttcctgggcgaggacgccgaggaggagatcggcaccctgagcagatgcctgaacgccggcagcggcaccgagaccgccgagagagtgcagatgaagaacatcctgcagcagcacttcgacaagagcaaggccctgagaatcagcacccccctgaccggcgtgagatacatcaaggagaacagcccctgcgtgacccccgtgagcaccgccacccacagcctgagcagactgcacaccatgctgaccggcctgagaaacgcccccagcgagaagctggagcagatcctgagaacctgcagcagagaccccacccaggccatcgccaacagactgaaggagatgttcgagatctacagccagcacttccagcccgacgaggacttcagcaactgcgccaaggagatcgccagcaagcacttcagattcgccgagatgctgtactacaaggtgctggagagcgtgatcgagcaggagcagaagagactgggcgacatggacctgagcggcatcctggagcaggacgccttccacagaagcctgctggcctgctgcctggaggtggtgaccttcagctacaagccccccggcaacttccccttcatcaccgagatcttcgacgtgcccctgtaccacttctacaaggtgatcgaggtgttcatcagagccgaggacggcctgtgcagagaggtggtgaagcacctgaaccagatcgaggagcagatcctggaccacctggcctggaagcccgagagccccctgtgggagaagatcagagacaacgagaacagagtgcccacctgcgaggaggtgatgcccccccagaacctggagagagccgacgagatctgcatcgccggcagccccagaagaatccagctgagccagaaccaccccgtgtacatcagcccccacaagaacgagaccatgctgagccccagagagaagatcttctactacttcagcaacagccccagcaagagactgagagagatcaacagcatgatcagaaccggcgagacccccaccaagaagagaggcatcctgctggaggacggcagcgagagccccgccaagagaatctgccccgagaaccacagcgccctgctgagaagactgcaggacgtggccaacgacagaggcagccactag

SEQ ID NO: 12672 - DNA, 1347 bp, synthetic construct
  misc_feature 1..1347: note = Description of Artificial Sequence: Synthetic coding sequence
  source 1..1347: mol_type = other DNA
atgttcgactgcatggacgtgctgagcgtgagccccggccagatcctggacttctacaccgccagccccagcagctgcatgctgcaggagaaggccctgaaggcctgcttcagcggcctgacccagaccgagtggcagcacagacacaccgcccagagcatcgagacccagagcaccagcagcgaggagctggtgcccagcccccccagccccctgcccccccccagagtgtacaagccctgcttcgtgtgccaggacaagagcagcggctaccactacggcgtgagcgcctgcgagggctgcaagggcttcttcagaagaagcatccagaagaacatgatctacacctgccacagagacaagaactgcgtgatcaacaaggtgaccagaaacagatgccagtactgcagactgcagaagtgcttcgaggtgggcatgagcaaggagagcgtgagaaacgacagaaacaagaagaagaaggagaccagcaagcaggagtgcaccgagagctacgagatgaccgccgagctggacgacctgaccgagaagatcagaaaggcccaccaggagaccttccccagcctgtgccagctgggcaagtacaccaccaacagcagcgccgaccacagagtgagactggacctgggcctgtgggacaagttcagcgagctggccaccaagtgcatcatcaagatcgtggagttcgccaagagactgcccggcttcaccggcctgaccatcgccgaccagatcaccctgctgaaggccgcctgcctggacatcctgatcctgagaatctgcaccagatacacccccgagcaggacaccatgaccttcagcgacggcctgaccctgaacagaacccagatgcacaacgccggcttcggccccctgaccgacctggtgttcaccttcgccaaccagctgctgcccctggagatggacgacaccgagaccggcctgctgagcgccatctgcctgatctgcggcgacagacaggacctggaggagcccaccaaggtggacaagctgcaggagcccctgctggaggccctgaagatctacatcagaaagagaagacccagcaagccccacatgttccccaagatcctgatgaagatcaccgacctgagaagcatcagcgccaagggcgccgagagagtgatcaccctgaagatggagatccccggcagcatgccccccctgatccaggagatgctggagaacagcgagggccacgagcccctgacccccagcagcagcggcaacaccgccgagcacagccccagcatcagccccagcagcgtggagaacagcggcgtgagccagagccccctggtgcagtag

SEQ ID NO: 12673 - DNA, 1368 bp, synthetic construct
  misc_feature 1..1368: note = Description of Artificial Sequence: Synthetic coding sequence
  source 1..1368: mol_type = other DNA
atgaccaccagcggccacgcctgccccgtgcccgccgtgaacggccacatgacccactaccccgccaccccctaccccctgctgttcccccccgtgatcggcggcctgagcctgccccccctgcacggcctgcacggccaccccccccccagcggctgcagcacccccagccccgccaccatcgagacccagagcaccagcagcgaggagctggtgcccagcccccccagccccctgcccccccccagagtgtacaagccctgcttcgtgtgccaggacaagagcagcggctaccactacggcgtgagcgcctgcgagggctgcaagggcttcttcagaagaagcatccagaagaacatgatctacacctgccacagagacaagaactgcgtgatcaacaaggtgaccagaaacagatgccagtactgcagactgcagaagtgcttcgaggtgggcatgagcaaggagagcgtgagaaacgacagaaacaagaagaagaaggagaccagcaagcaggagtgcaccgagagctacgagatgaccgccgagctggacgacctgaccgagaagatcagaaaggcccaccaggagaccttccccagcctgtgccagctgggcaagtacaccaccaacagcagcgccgaccacagagtgagactggacctgggcctgtgggacaagttcagcgagctggccaccaagtgcatcatcaagatcgtggagttcgccaagagactgcccggcttcaccggcctgaccatcgccgaccagatcaccctgctgaaggccgcctgcctggacatcctgatcctgagaatctgcaccagatacacccccgagcaggacaccatgaccttcagcgacggcctgaccctgaacagaacccagatgcacaacgccggcttcggccccctgaccgacctggtgttcaccttcgccaaccagctgctgcccctggagatggacgacaccgagaccggcctgctgagcgccatctgcctgatctgcggcgacagacaggacctggaggagcccaccaaggtggacaagctgcaggagcccctgctggaggccctgaagatctacatcagaaagagaagacccagcaagccccacatgttccccaagatcctgatgaagatcaccgacctgagaagcatcagcgccaagggcgccgagagagtgatcaccctgaagatggagatccccggcagcatgccccccctgatccaggagatgctggagaacagcgagggccacgagcccctgacccccagcagcagcggcaacaccgccgagcacagccccagcatcagccccagcagcgtggagaacagcggcgtgagccagagccccctggtgcagtag

SEQ ID NO: 12674 - DNA, 1011 bp, synthetic construct
  misc_feature 1..1011: note = Description of Artificial Sequence: Synthetic coding sequence
  source 1..1011: mol_type = other DNA
atgatctacacctgccacagagacaagaactgcgtgatcaacaaggtgaccagaaacagatgccagtactgcagactgcagaagtgcttcgaggtgggcatgagcaaggagagcgtgagaaacgacagaaacaagaagaagaaggagaccagcaagcaggagtgcaccgagagctacgagatgaccgccgagctggacgacctgaccgagaagatcagaaaggcccaccaggagaccttccccagcctgtgccagctgggcaagtacaccaccaacagcagcgccgaccacagagtgagactggacctgggcctgtgggacaagttcagcgagctggccaccaagtgcatcatcaagatcgtggagttcgccaagagactgcccggcttcaccggcctgaccatcgccgaccagatcaccctgctgaaggccgcctgcctggacatcctgatcctgagaatctgcaccagatacacccccgagcaggacaccatgaccttcagcgacggcctgaccctgaacagaacccagatgcacaacgccggcttcggccccctgaccgacctggtgttcaccttcgccaaccagctgctgcccctggagatggacgacaccgagaccggcctgctgagcgccatctgcctgatctgcggcgacagacaggacctggaggagcccaccaaggtggacaagctgcaggagcccctgctggaggccctgaagatctacatcagaaagagaagacccagcaagccccacatgttccccaagatcctgatgaagatcaccgacctgagaagcatcagcgccaagggcgccgagagagtgatcaccctgaagatggagatccccggcagcatgccccccctgatccaggagatgctggagaacagcgagggccacgagcccctgacccccagcagcagcggcaacaccgccgagcacagccccagcatcagccccagcagcgtggagaacagcggcgtgagccagagccccctggtgcagtag

SEQ ID NO: 12675 - DNA, 1011 bp, synthetic construct; identical to SEQ ID NO: 12674
  misc_feature 1..1011: note = Description of Artificial Sequence: Synthetic coding sequence
  source 1..1011: mol_type = other DNA

SEQ ID NO: 12676 - DNA, 1326 bp, synthetic construct
  misc_feature 1..1326: note = Description of Artificial Sequence: Synthetic coding sequence
  source 1..1326: mol_type = other DNA
atgaccaccagcggccacgcctgccccgtgcccgccgtgaacggccacatgacccactaccccgccaccccctaccccctgctgttcccccccgtgatcggcggcctgagcctgccccccctgcacggcctgcacggccaccccccccccagcggctgcagcacccccagccccgccaccatcgagacccagagcaccagcagcgaggagctggtgcccagcccccccagccccctgcccccccccagagtgtacaagccctgcttcgtgtgccaggacaagagcagcggctaccactacggcgtgagcgcctgcgagggctgcaagggcttcttcagaagaagcatccagaagaacatgatctacacctgccacagagacaagaactgcgtgatcaacaaggtgaccagaaacagatgccagtactgcagactgcagaagtgcttcgaggtgggcatgagcaaggagagcgtgagaaacgacagaaacaagaagaagaaggagaccagcaagcaggagtgcaccgagagctacgagatgaccgccgagctggacgacctgaccgagaagatcagaaaggcccaccaggagaccttccccagcctgtgccagctgggcaagtacaccaccaacagcagcgccgaccacagagtgagactggacctgggcctgtgggacaagttcagcgagctggccaccaagtgcatcatcaagatcgtggagttcgccaagagactgcccggcttcaccggcctgaccatcgccgaccagatcaccctgctgaaggccgcctgcctggacatcctgatcctgagaatctgcaccagatacacccccgagcaggacaccatgaccttcagcgacggcctgaccctgaacagaacccagatgcacaacgccggcttcggccccctgaccgacctggtgttcaccttcgccaaccagctgctgcccctggagatggacgacaccgagaccggcctgctgagcgccatctgcctgatctgcggcgacagacaggacctggaggagcccaccaaggtggacaagctgcaggagcccctgctggaggccctgaagatctacatcagaaagagaagacccagcaagccccacatgttccccaagatcctgatgaagatcaccgacctgagaagcatcagcgccaagggcgccgagagagtgatcaccctgaagatggagatccccgagggccacgagcccctgacccccagcagcagcggcaacaccgccgagcacagccccagcatcagccccagcagcgtggagaacagcggcgtgagccagagccccctggtgcagtag

SEQ ID NO: 12677 - DNA, 462 bp, synthetic construct
  misc_feature 1..462: note = Description of Artificial Sequence: Synthetic coding sequence
  source 1..462: mol_type = other DNA
atggacccccccgccggcttcgtgagagccggcaaccccgccgtggccgccccccagagccccctgagccccgagggcgcccacttcagagccgcccaccaccccagaagcaccggcagcagatgccccggcagcctgcagcccagcagacccctggtggccaactggctgcagagcctgcccgagatgcccgtggacttcaccggctactggaagatgctggtgaacgagaacttcgaggagtacctgagagccctggacgtgaacgtggccctgagaaagatcgccaacctgctgaagcccgacaaggagatcgtgcaggacggcgaccacatgatcatcagaaccctgagcaccttcagaaactacatcatggacttccaggtgggcaaggagttcgaggaggacctgaccggcatcgacgacagaaagtgcatgagcgagaccggcttcagcagctag

SEQ ID NO: 12678 - DNA, 405 bp, synthetic construct
  misc_feature 1..405: note = Description of Artificial Sequence: Synthetic coding sequence
  source 1..405: mol_type = other DNA
atgaccagagaccagaacggcacctgggagatggagagcaacgagaacttcgagggctacatgaaggccctggacatcgacttcgccaccagaaagatcgccgtgagactgacccagaccaaggtgatcgaccaggacggcgacaacttcaagaccaagaccaccagcaccttcagaaactacgacgtggacttcaccgtgggcgtggagttcgacgagtacaccaagagcctggacaacagacacgtgaaggccctggtgacctgggagggcgacgtgctggtgtgcgtgcagaagggcgagaaggagaacagaggctggaagcagtggatcgagggcgacaagctgtacctggagctgacctgcggcgaccaggtgtgcagacaggtgttcaagaagaagtag

SEQ ID NO: 12679 - DNA, 474 bp, synthetic construct
  misc_feature 1..474: note = Description of Artificial Sequence: Synthetic coding sequence
  source 1..474: mol_type = other DNA
atggacccccccgccggcttcgtgagagccggcaaccccgccgtggccgccccccagagccccctgagccccgagggcgcccacttcagagccgcccaccaccccagaagcaccggcagcagatgccccggcagcctgcagcccagcagacccctggtggccaactggctgcagagcctgcccgagatgcccgtggacttcaccggctactggaagatgctggtgaacgagaacttcgaggagtacctgagagccctggacgtgaacgtggccctgagaaagatcgccaacctgctgaagcccgacaaggagatcgtgcaggacggcgaccacatgatcatcagaaccctgagcaccttcagaaactacatcatggacttccaggtgggcaaggagttcgaggaggacctgaccggcatcgacgacagaaagtgcatggccggcgtgcagagcagagacctgagcagcctgtag

SEQ ID NO: 12680 - DNA, 3756 bp, synthetic construct
  misc_feature 1..3756: note = Description of Artificial Sequence: Synthetic coding sequence
  source 1..3756: mol_type = other DNA
atgagaagaggcggctggagaaagagagccgagaacgacggctgggagacctggggcggctacatggccgccaaggtgcagaagctggaggagcagttcagaagcgacgccgccatgcagaaggacggcaccagcagcaccatcttcagcggcgtggccatctacgtgaacggctacaccgaccccagcgccgaggagctgagaaagctgatgatgctgcacggcggccagtaccacgtgtactacagcagaagcaagaccacccacatcatcgccaccaacctgcccaacgccaagatcaaggagctgaagggcgagaaggtgatcagacccgagtggatcgtggagagcatcaaggccggcagactgctgagctacatcccctaccagctgtacaccaagcagagcagcgtgcagaagggcctgagcttcaaccccgtgtgcagacccgaggaccccctgcccggccccagcaacatcgccaagcagctgaacaacagagtgaaccacatcgtgaagaagatcgagaccgagaacgaggtgaaggtgaacggcatgaacagctggaacgaggaggacgagaacaacgacttcagcttcgtggacctggagcagaccagccccggcagaaagcagaacggcatcccccaccccagaggcagcaccgccatcttcaacggccacacccccagcagcaacggcgccctgaagacccaggactgcctggtgcccatggtgaacagcgtggccagcagactgagccccgccttcagccaggaggaggacaaggccgagaagagcagcaccgacttcagagactgcaccctgcagcagctgcagcagagcaccagaaacaccgacgccctgagaaacccccacagaaccaacagcttcagcctgagccccctgcacagcaacaccaagatcaacggcgcccaccacagcaccgtgcagggccccagcagcaccaagagcaccagcagcgtgagcaccttcagcaaggccgcccccagcgtgcccagcaagcccagcgactgcaacttcatcagcaacttctacagccacagcagactgcaccacatcagcatgtggaagtgcgagctgaccgagttcgtgaacaccctgcagagacagagcaacggcatcttccccggcagagagaagctgaagaagatgaagaccggcagaagcgccctggtggtgaccgacaccggcgacatgagcgtgctgaacagccccagacaccagagctgcatcatgcacgtggacatggactgcttcttcgtgagcgtgggcatcagaaacagacccgacctgaagggcaagcccgtggccgtgaccagcaacagaggcaccggcagagcccccctgagacccggcgccaacccccagctggagtggcagtactaccagaacaagatcctgaagggcaaggccgccgacatccccgacagcagcctgtgggagaaccccgacagcgcccaggccaacggcatcgacagcgtgctgagcagagccgagatcgccagctgcagctacgaggccagacagctgggcatcaagaacggcatgttcttcggccacgccaagcagctgtgccccaacctgcaggccgtgccctacgacttccacgcctacaaggaggtggcccagaccctgtacgagaccctggccagctacacccacaacatcgaggccgtgagctgcgacgaggccctggtggacatcaccgagatcctggccgagaccaagctgacccccgacgagttcgccaacgccgtgagaatggagatcaaggaccagaccaagtgcgccgccagcgtgggcatcggcagcaacatcctgctggccagaatggccaccagaaaggccaagcccgacggccagtaccacctgaagcccgaggaggtggacgacttcatcagaggccagctggtgaccaacctgcccggcgtgggccacagcatggagagcaagctggccagcctgggcatcaagacctgcggcgacctgcagtacatgaccatggccaagctgcagaaggagttcggccccaagaccggccagatgctgtacagattctgcagaggcctggacgacagacccgtgagaaccgagaaggagagaaagagcgtgagcgccgagatcaactacggcatcagattcacccagcccaaggaggccgaggccttcctgctgagcctgagcgaggagatccagagaagactggaggccaccggcatgaagggcaagagactgaccctgaagatcatggtgagaaagcccggcgcccccgtggagaccgccaagttcggcggccacggcatctgcgacaacatcgccagaaccgtgaccctggaccaggccaccgacaacgccaagatcatcggcaaggccatgctgaacatgttccacaccatgaagctgaacatcagcgacatgagaggcgtgggcatccacgtgaaccagctggtgcccaccaacctgaaccccagcacctgccccagcagacccagcgtgcagagcagccacttccccagcggcagctacagcgtgagagacgtgttccaggtgcagaaggccaagaagagcaccgaggaggagcacaaggaggtgttcagagccgccgtggacctggagatcagcagcgccagcagaacctgcaccttcctgccccccttccccgcccacctgcccaccagccccgacaccaacaaggccgagagcagcggcaagtggaacggcctgcacacccccgtgagcgtgcagagcagactgaacctgagcatcgaggtgcccagccccagccagctggaccagagcgtgctggaggccctgccccccgacctgagagagcaggtggagcaggtgtgcgccgtgcagcaggccgagagccacggcgacaagaagaaggagcccgtgaacggctgcaacaccggcatcctgccccagcccgtgggcaccgtgctgctgcagatccccgagccccaggagagcaacagcgacgccggcatcaacctgatcgccctgcccgccttcagccaggtggaccccgaggtgttcgccgccctgcccgccgagctgcagagagagctgaaggccgcctacgaccagagacagagacagggcgagaacagcacccaccagcagagcgccagcgccagcgtgcccaagaaccccctgctgcacctgaaggccgccgtgaaggagaagaagagaaacaagaagaagaagaccatcggcagccccaagagaatccagagccccctgaacaacaagctgctgaacagccccgccaagaccctgcccggcgcctgcggcagcccccagaagctgatcgacggcttcctgaagcacgagggcccccccgccgagaagcccctggaggagctgagcgccagcaccagcggcgtgcccggcctgagcagcctgcagagcgaccccgccggctgcgtgagaccccccgcccccaacctggccggcgccgtggagttcaacgacgtgaagaccctgctgagagagtggatcaccaccatcagcgaccccatggaggaggacatcctgcaggtggtgaagtactgcaccgacctgatcgaggagaaggacctggagaagctggacctggtgatcaagtacatgaagagactgatgcagcagagcgtggagagcgtgtggaacatggccttcgacttcatcctggacaacgtgcaggtggtgctgcagcagacctacggcagcaccctgaaggtgacctag

SEQ ID NO: 12681 - DNA, 3753 bp, synthetic construct
  misc_feature 1..3753: note = Description of Artificial Sequence: Synthetic coding sequence
  source 1..3753: mol_type = other DNA
atgagaagaggcggctggagaaagagagccgagaacgacggctgggagacctggggcggctacatggccgccaaggtgcagaagctggaggagcagttcagaagcgacgccgccatgcagaaggacggcaccagcagcaccatcttcagcggcgtggccatctacgtgaacggctacaccgaccccagcgccgaggagctgagaaagctgatgatgctgcacggcggccagtaccacgtgtactacagcagaagcaagaccacccacatcatcgccaccaacctgcccaacgccaagatcaaggagctgaagggcgagaaggtgatcagacccgagtggatcgtggagagcatcaaggccggcagactgctgagctacatcccctaccagctgtacaccaagcagagcagcgtgcagaagggcctgagcttcaaccccgtgtgcagacccgaggaccccctgcccggccccagcaacatcgccaagcagctgaacaacagagtgaaccacatcgtgaagaagatcgagaccgagaacgaggtgaaggtgaacggcatgaacagctggaacgaggaggacgagaacaacgacttcagcttcgtggacctggagcagaccagccccggcagaaagcagaacggcatcccccaccccagaggcagcaccgccatcttcaacggccacacccccagcagcaacggcgccctgaagacccaggactgcctggtgcccatggtgaacagcgtggccagcagactgagccccgccttcagccaggaggaggacaaggccgagaagagcagcaccgacttcagagactgcaccctgcagcagctgcagcagagcaccagaaacaccgacgccctgagaaacccccacagaaccaacagcttcagcctgagccccctgcacagcaacaccaagatcaacggcgcccaccacagcaccgtgcagggccccagcagcaccaagagcaccagcagcgtgagcaccttcagcaaggccgcccccagcgtgcccagcaagcccagcgactgcaacttcatcagcaacttctacagccacagcagactgcaccacatcagcatgtggaagtgcgagctgaccgagttcgtgaacaccctgcagagacagagcaacggcatcttccccggcagagagaagctgaagaagatgaagaccggcagaagcgccctggtggtgaccgacaccggcgacatgagcgtgctgaacagccccagacaccagagctgcatcatgcacgtggacatggactgcttcttcgtgagcgtgggcatcagaaacagacccgacctgaagggcaagcccgtggccgtgaccagcaacagaggcaccggcagagcccccctgagacccggcgccaacccccagctggagtggcagtactaccagaacaagatcctgaagggcaaggccgacatccccgacagcagcctgtgggagaaccccgacagcgcccaggccaacggcatcgacagcgtgctgagcagagccgagatcgccagctgcagctacgaggccagacagctgggcatcaagaacggcatgttcttcggccacgccaagcagctgtgccccaacctgcaggccgtgccctacgacttccacgcctacaaggaggtggcccagaccctgtacgagaccctggccagctacacccacaacatcgaggccgtgagctgcgacgaggccctggtggacatcaccgagatcctggccgagaccaagctgacccccgacgagttcgccaacgccgtgagaatggagatcaaggaccagaccaagtgcgccgccagcgtgggcatcggcagcaacatcctgctggccagaatggccaccagaaaggccaagcccgacggccagtaccacctgaagcccgaggaggtggacgacttcatcagaggccagctggtgaccaacctgcccggcgtgggccacagcatggagagcaagctggccagcctgggcatcaagacctgcggcgacctgcagtacatgaccatggccaagctgcagaaggagttcggccccaagaccggccagatgctgtacagattctgcagaggcctggacgacagacccgtgagaaccgagaaggagagaaagagcgtgagcgccgagatcaactacggcatcagattcacccagcccaaggaggccgaggccttcctgctgagcctgagcgaggagatccagagaagactggaggccaccggcatgaagggcaagagactgaccctgaagatcatggtgagaaagcccggcgcccccgtggagaccgccaagttcggcggccacggcatctgcgacaacatcgccagaaccgtgaccctggaccaggccaccgacaacgccaagatcatcggcaaggccatgctgaacatgttccacaccatgaagctgaacatcagcgacatgagaggcgtgggcatccacgtgaaccagctggtgcccaccaacctgaaccccagcacctgccccagcagacccagcgtgcagagcagccacttccccagcggcagctacagcgtgagagacgtgttccaggtgcagaaggccaagaagagcaccgaggaggagcacaaggaggtgttcagagccgccgtggacctggagatcagcagcgccagcagaacctgcaccttcctgccccccttccccgcccacctgcccaccagccccgacaccaacaaggccgagagcagcggcaagtggaacggcctgcacacccccgtgagcgtgcagagcagactgaacctgagcatcgaggtgcccagccccagccagctggaccagagcgtgctggaggccctgccccccgacctgagagagcaggtggagcaggtgtgcgccgtgcagcaggccgagagccacggcgacaagaagaaggagcccgtgaacggctgcaacaccggcatcctgccccagcccgtgggcaccgtgctgctgcagatccccgagccccaggagagcaacagcgacgccggcatcaacctgatcgccctgcccgccttcagccaggtggaccccgaggtgttcgccgccctgcccgccgagctgcagagagagctgaaggccgcctacgaccagagacagagacagggcgagaacagcacccaccagcagagcgccagcgccagcgtgcccaagaaccccctgctgcacctgaaggccgccgtgaaggagaagaagagaaacaagaagaagaagaccatcggcagccccaagagaatccagagccccctgaacaacaagctgctgaacagccccgccaagaccctgcccggcgcctgcggcagcccccagaagctgatcgacggcttcctgaagcacgagggcccccccgccgagaagcccctggaggagctgagcgccagcaccagcggcgtgcccggcctgagcagcctgcagagcgaccccgccggctgcgtgagaccccccgcccccaacctggccggcgccgtggagttcaacgacgtgaagaccctgctgagagagtggatcaccaccatcagcgaccccatggaggaggacatcctgcaggtggtgaagtactgcaccgacctgatcgaggagaaggacctggagaagctggacctggtgatcaagtacatgaagagactgatgcagcagagcgtggagagcgtgtggaacatggccttcgacttcatcctggacaacgtgcaggtggtgctgcagcagacctacggcagcaccctgaaggtgacctag

SEQ ID NO: 12682 - DNA, 2916 bp, synthetic construct
  misc_feature 1..2916: note = Description of Artificial Sequence: Synthetic coding sequence
  source 1..2916: mol_type = other DNA
atggccaccgtgagagccagcctgagaggcgccctgctgctgctgctggccgtggccggcgtggccgaggtggccggcggcctggcccccggcagcgccggcgccctgtgctgcaaccacagcaaggacaaccagatgtgcagagacgtgtgcgagcagatcttcagcagcaagagcgagagcagactgaagcacctgctgcagagagcccccgactactgccccgagaccatggtggagatctggaactgcatgaacagcagcctgcccggcgtgttcaagaagagcgacggctgggtgggcctgggctgctgcgagctggccatcgccctggagtgcagacaggcctgcaagcaggccagcagcaagaacgacatcagcaaggtgtgcagaaaggagtacgagaacgccctgttcagctgcatcagcagaaacgagatgggcagcgtgtgctgcagctacgccggccaccacaccaactgcagagagtactgccaggccatcttcagaaccgacagcagccccggccccagccagatcaaggccgtggagaactactgcgccagcatcagcccccagctgatccactgcgtgaacaactacacccagagctaccccatgagaaaccccaccgacagcctgtactgctgcgacagagccgaggaccacgcctgccagaacgcctgcaagagaatcctgatgagcaagaagaccgagatggagatcgtggacggcctgatcgagggctgcaagacccagcccctgccccaggaccccctgtggcagtgcttcctggagagcagccagagcgtgcaccccggcgtgaccgtgcaccccccccccagcaccggcctggacggcgccaagctgcactgctgcagcaaggccaacaccagcacctgcagagagctgtgcaccaagctgtacagcatgagctggggcaacacccagagctggcaggagttcgacagattctgcgagtacaaccccgtggaggtgagcatgctgacctgcctggccgacgtgagagagccctgccagctgggctgcagaaacctgacctactgcaccaacttcaacaacagacccaccgagctgttcagaagctgcaacgcccagagcgaccagggcgccatgaacgacatgaagctgtgggagaagggcagcatcaagatgcccttcatcaacatccccgtgctggacatcaagaagtgccagcccgagatgtggaaggccatcgcctgcagcctgcagatcaagccctgccacagcaagagcagaggcagcatcatctgcaagagcgactgcgtggagatcctgaagaagtgcggcgaccagaacaagttccccgaggaccacaccgccgagagcatctgcgagctgctgagccccaccgacgacctgaagaactgcatccccctggacacctacctgagacccagcaccctgggcaacatcgtggaggaggtgacccacccctgcaaccccaacccctgccccgccaacgagctgtgcgaggtgaacagaaagggctgccccagcggcgacccctgcctgccctacttctgcgtgcagggctgcaagctgggcgaggccagcgacttcatcgtgagacagggcaccctgatccaggtgcccagcagcgccggcgaggtgggctgctacaagatctgcagctgcggccagagcggcctgctggagaactgcatggagatgcactgcatcgacctgcagaagagctgcatcgtgggcggcaagagaaagagccacggcaccagcttcagcatcgactgcaacgtgtgcagctgcttcgccggcaacctggtgtgcagcaccagactgtgcctgagcgagcacagcagcgaggacgacagaagaaccttcaccggcctgccctgcaactgcgccgaccagttcgtgcccgtgtgcggccagaacggcagaacctaccccagcgcctgcatcgccagatgcgtgggcctgcaggaccaccagttcgagttcggcagctgcatgagcaaggacccctgcaaccccaacccctgccagaagaaccagagatgcatccccaagccccaggtgtgcctgaccaccttcgacaagttcggctgcagccagtacgagtgcgtgcccagacagctggcctgcgaccaggtgcaggaccccgtgtgcgacaccgaccacatggagcacaacaacctgtgcaccctgtaccagagaggcaagagcctgagctacaagggcccctgccagcccttctgcagagccaccgagcccgtgtgcggccacaacggcgagacctacagcagcgtgtgcgccgcctacagcgacagagtggccgtggactactacggcgactgccaggccgtgggcgtgctgagcgagcacagcagcgtggccgagtgcgccagcgtgaagtgccccagcctgctggccgccggctgcaagcccatcatcccccccggcgcctgctgccccctgtgcgccggcatgctgagagtgctgttcgacaaggagaagctggacaccatcgccaaggtgaccaacaagaagcccatcaccgtgctggagatcctgcagaagatcagaatgcacgtgagcgtgccccagtgcgacgtgttcggctacttcagcatcgagagcgagatcgtgatcctgatcatccccgtggaccactaccccaaggccctgcagatcgaggcctgcaacaaggaggccgagaagatcgagagcctgatcaacagcgacagccccaccctggccagccacgtgcccctgagcgccctgatcatcagccaggtgcaggtgagcagcagcgtgcccagcgccggcgtgagagccagacccagctgccacagcctgctgctgcccctgagcctgggcctggccctgcacctgctgtggacctacaactag

SEQ ID NO: 12683 - DNA, 735 bp, synthetic construct
  misc_feature 1..735: note = Description of Artificial Sequence: Synthetic coding sequence
  source 1..735: mol_type = other DNA
atgaaggagagaagagccagccagaagctgagcagcaagagcatcatggaccccaaccagaacgtgaagtgcaagatcgtggtggtgggcgacagccagtgcggcaagaccgccctgctgcacgtgttcgccaaggactgcttccccgagaactacgtgcccaccgtgttcgagaactacaccgccagcttcgagatcgacacccagagaatcgagctgagcctgtgggacaccagcggcagcccctactacgacaacgtgagacccctgagctaccccgacagcgacgccgtgctgatctgcttcgacatcagcagacccgagaccctggacagcgtgctgaagaagtggaagggcgagatccaggagttctgccccaacaccaagatgctgctggtgggctgcaagagcgacctgagaaccgacgtgagcaccctggtggagctgagcaaccacagacagacccccgtgagctacgaccagggcgccaacatggccaagcagatcggcgccgccacctacatcgagtgcagcgccctgcagagcgagaacagcgtgagagacatcttccacgtggccaccctggcctgcgtgaacaagaccaacaagaacgtgaagagaaacaagagccagagagccaccaagagaatcagccacatgcccagcagacccgagctgagcgccgtggccaccgacctgagaaaggacaaggccaagagctgcaccgtgatgtag

SEQ ID NO: 12684 - DNA, 735 bp, synthetic construct; identical to SEQ ID NO: 12683
  misc_feature 1..735: note = Description of Artificial Sequence: Synthetic coding sequence
  source 1..735: mol_type = other DNA

SEQ ID NO: 12685 - DNA, 348 bp, synthetic construct
  misc_feature 1..348: note = Description of Artificial Sequence: Synthetic coding sequence
  source 1..348: mol_type = other DNA
atgctgctggtgggctgcaagagcgacctgagaaccgacgtgagcaccctggtggagctgagcaaccacagacagacccccgtgagctacgaccagggcgccaacatggccaagcagatcggcgccgccacctacatcgagtgcagcgccctgcagagcgagaacagcgtgagagacatcttccacgtggccaccctggcctgcgtgaacaagaccaacaagaacgtgaagagaaacaagagccagagagccaccaagagaatcagccacatgcccagcagacccgagctgagcgccgtggccaccgacctgagaaaggacaaggccaagagctgcaccgtgatgtag

SEQ ID NO: 12686 - DNA, 351 bp, synthetic construct
  misc_feature 1..351: note = Description of Artificial Sequence: Synthetic coding sequence
  source 1..351: mol_type = other DNA
atgaaggagagaagagccagccagaagctgagcagcaagagcatcatggaccccaaccagaacgtgaagtgcaagatcgtggtggtgggcgacagccagtgcggcaagaccgccctgctgcacgtgttcgccaaggactgcttccccgagaactacgtgcccaccgtgttcgagaactacaccgccagcttcgagatcgacacccagagaatcgagctgagcctgtgggacaccagcggcagcccctactacgacaacgtgagacccctgagctaccccgacagcgacgccgtgctgatctgcttcgacatcagcagacccgagaccctggacagcgtgctgaagaagtag

SEQ ID NO: 12687 - DNA, 351 bp, synthetic construct; identical to SEQ ID NO: 12686
  misc_feature 1..351: note = Description of Artificial Sequence: Synthetic coding sequence
  source 1..351: mol_type = other DNA

SEQ ID NO: 12688 - DNA, 615 bp, synthetic construct
  misc_feature 1..615: note = Description of Artificial Sequence: Synthetic coding sequence
  source 1..615: mol_type = other DNA
atggccgagcaggagcccaccgccgagcagctggcccagatcgccgccgagaacgaggaggacgagcacagcgtgaactacaagccccccgcccagaagagcatccaggagatccaggagctggacaaggacgacgagagcctgagaaagtacaaggaggccctgctgggcagagtggccgtgagcgccgaccccaacgtgcccaacgtggtggtgaccggcctgaccctggtgtgcagcagcgcccccggccccctggagctggacctgaccggcgacctggagagcttcaagaagcagagcttcgtgctgaaggagggcgtggagtacagaatcaagatcagcttcagagtgaacagagagatcgtgagcggcatgaagtacatccagcacacctacagaaagggcgtgaagatcgacaagaccgactacatggtgggcagctacggccccagagccgaggagtacgagttcctgacccccgtggaggaggcccccaagggcatgctggccagaggcagctacagcatcaagagcagattcaccgacgacgacaagaccgaccacctgagctgggagtggaacctgaccatcaagaaggactggaaggactag

SEQ ID NO: 12689 - DNA, 537 bp, synthetic construct
  misc_feature 1..537: note = Description of Artificial Sequence: Synthetic coding sequence
  source 1..537: mol_type = other DNA
atggccgagcaggagcccaccgccgagcagctggcccagatcgccgccgagaacgaggaggacgagcacagcgtgaactacaagccccccgcccagaagagcatccaggagatccaggagctggacaaggacgacgagagcctgagaaagtacaaggaggccctgctgggcagagtggccgtgagcgccgaccccaacgtgcccaacgtggtggtgaccggcctgaccctggtgtgcagcagcgcccccggccccctggagctggacctgaccggcgacctggagagcttcaagaagcagagcttcgtgctgaaggagggcgtggagtacagaatcaagatcagcttcagagtgaacagagagatcgtgagcggcatgaagtacatccagcacacctacagaaagggcgtgaagatcgacaagaccgactacatggtgggcagctacagcatcaagagcagattcaccgacgacgacaagaccgaccacctgagctgggagtggaacctgaccatcaagaaggactggaaggactag

SEQ ID NO: 12690 - DNA, 615 bp, synthetic construct; identical to SEQ ID NO: 12688
  misc_feature 1..615: note = Description of Artificial Sequence: Synthetic coding sequence
  source 1..615: mol_type = other DNA

SEQ ID NO: 12691 - DNA, 3576 bp, synthetic construct
  misc_feature 1..3576: note = Description of Artificial Sequence: Synthetic coding sequence
  source 1..3576: mol_type = other DNA
atggaggccatgagcccccagcaggagaccctgggcggccagcccggcagaagcagcagcctgaccggcgtgagcagactggccggcggcagctgcaccaagaagaagatgaagaccctggccgagagaagaagaagcgcccccagcctgatcctggacaaggccctgcagaagagacccaccaccagagacagccccagcgccagcgtggacacctgcaccttcctgagcagcctggtgtgcagcaacagaaccctgctgatcgacggcagagccgagctgaagagaggcctgcagagacaggagagacacctgttcctgttcaacgacctgttcgtggtggccaagatcaagtacaacaacaacttcaagatcaagaacaagatcaagctgaccgacatgtggaccgccagctgcgtggacgaggtgggcgagggcaacaccaacgccatgaagagcttcgtgctgggctggcccaccgtgaacttcgtggccaccttcagcagccccgagcagaaggacaagtggctgagcctgctgcagagatacatcaacctggagaaggagaaggactaccccaagagcatccccctgaagatcttcgccaaggacatcggcaactgcgcctacagcaagaccatcaccgtgatgaacagcgacaccgccaacgaggtgatcaacatgagcctgcccatgctgggcatcaccggcagcgagagagactaccagctgtgggtgaacagcggcaaggaggaggccccctaccccctgatcggccacgagtacccctacggcatcaagatgagccacctgagagacagcgccctgctgacccccggcagcaaggacagcaccacccccttcaacctgcaggagcccttcctgatggagcagctgcccagagagatgcagtgccagttcatcctgaagcccagcagactggccgccgcccagcagctgagcgacagcggccacaagaccttcaagagaagaagaagcatcatcaactgggccttctggagaggcagcagcacccacctggacaacctgcccagcagccccaccagccccatgcccggccagctgttcggcatcagcctgcccaacatctgcgagaacgacaacctgcccaagcccgtgctggacatgctgttcttcctgaaccagaagggccccctgaccaagggcatcttcagacagagcgccaacgtgaagagctgcagagagctgaaggagaagctgaacagcggcgtggaggtgcacctggactgcgagagcatcttcgtgatcgccagcgtgctgaaggacttcctgagaaacatccccggcagcatcttcagcagcgacctgtacgaccactgggtgagcgtgatggaccagggcaacgacgaggagaagatcaacaccgtgcagagactgctggaccagctgcccagagccaacgtggtgctgctgagatacctgttcggcgtgctgcacaacatcgagcagcacagcagcagcaaccagatgaccgccttcaacctggccgtgtgcgtggcccccagcatcctgtggccccccgccagcagcagccccgagctggagaacgagttcaccaagaaggtgagcctgctgatccagttcctgatcgagaactgcctgagaatcttcggcgaggagatcaccagcctgttcagagaggtgagcgtgagatgcgacaccagagagaacgccagcgacatcagctgcttccagctgaacgacagcagctacgacagcctggagaacgagctgaacgaggacgtggacgccccctgcagcgacctggtgaagaagctgggccagggcagcagaagcatggacagcgtgctgaccctgagcgactacgacctggaccagcccgaggtggagggcctgctgaccctgagcgacttcgacctggcccacagcaaggacgaggacgtgcagatgaagagacccctggagagcaagcccgtgaacatcctggtgtacaccaagatccccctgagagaccacgccagagcccccagcgccatgtgcacccccagctacctgagcaccgccgccgccaacgccgccaagagcctgagaagacacagaagatgcagcgagcccagcatcgactacctggacagcaagctgagctacctgagagagttctaccagaagaagctgagaaagagcagctgcgacgccatcctgagccagaaggacgaggactacctgaagcagaaccagcccctgcaggaggagggcaagacctgcttcaagcagagcctggtgaccggcaccgacgtgagcaagaagaacgccaccacccagaacaccaagaagaagagcctgagcggcagcgagggcaaccacgtgaagctgttccccaagagcaagcccgtggccatcagcgtggccagctacagccccatgagcagccaggaccacagcaagaaccagcccttcgacgtgaacaccagcggctacagccccccccacaccgccgacgccctgaagggccccagaacccacagaagatgcagcgagcccaacatcgaggaccagaacagaaagctgacctacctgagaggcatctacagcaagaagcagcacaagaccagctgcgaggccggcctgctgcacggcgaggaggactacctgaagagacacaagagcctgcagatggagggccagaagctgatcaaccagagcctggtgatgggcatcgaggtgggcaagagcagcgccaccaaccagaacaccgagaaggtgctgccccccagactgaacctgtgccccagaaccagctacagcagcctgagcagccccggcaccagccccagcggcagcagcgtgagcagccaggacagcgccttcagccagatcagcgagcacagcgtgttcacccccaccgagaccagcagccccatcgactgcaccttccaggcccagagaaagagagaggacctgagccccgacttcagcaacgccagccacgtgagcggcatgcccggccccagcagcggccaggcctgcagcagacccgcctacaccaagaaggacaccatggagtggcacagccagatgcacagcgtgaccctgcaccccagcacctggctgagaaacggcgtggccagcctgaagaactggagcctgaagaagaaggccaaggccgccagacccgaggaggagaagatcgccagccccaagggccccctggagccccccccccacgccagcggcgtgcccgaggccaacagcctgcaggaggagcagaaggacctgcccctgagagccgccgagggcctgagccccgtgcagagcgcccagagatgcagcagcagccccttccaggacagcgagagacactgcagcagccccttcagcctggtggagagcagactgaagctgtgcatgaagagccacgaggagatcgagcccggcagccagagcagcagcggcagcctgccctgggagagagccagcgccagcagctggaccctggaggacgccaccagccccgacagcggccccaccgtggtgtgcgacatcgaggacagatacctgaccaaggacatctag

SEQ ID NO: 12692 - DNA, 3498 bp, synthetic construct
  misc_feature 1..3498: note = Description of Artificial Sequence: Synthetic coding sequence
  source 1..3498: mol_type = other DNA
atgaccttctggatcatcatcaacaagaagatgaagaccctggccgagagaagaagaagcgcccccagcctgatcctggacaaggccctgcagaagagacccaccaccagagacagccccagcgccagcgtggacacctgcaccttcctgagcagcctggtgtgcagcaacagaaccctgctgatcgacggcagagccgagctgaagagaggcctgcagagacaggagagacacctgttcctgttcaacgacctgttcgtggtggccaagatcaagtacaacaacaacttcaagatcaagaacaagatcaagctgaccgacatgtggaccgccagctgcgtggacgaggtgggcgagggcaacaccaacgccatgaagagcttcgtgctgggctggcccaccgtgaacttcgtggccaccttcagcagccccgagcagaaggacaagtggctgagcctgctgcagagatacatcaacctggagaaggagaaggactaccccaagagcatccccctgaagatcttcgccaaggacatcggcaactgcgcctacagcaagaccatcaccgtgatgaacagcgacaccgccaacgaggtgatcaacatgagcctgcccatgctgggcatcaccggcagcgagagagactaccagctgtgggtgaacagcggcaaggaggaggccccctaccccctgatcggccacgagtacccctacggcatcaagatgagccacctgagagacagcgccctgctgacccccggcagcaaggacagcaccacccccttcaacctgcaggagcccttcctgatggagcagctgcccagagagatgcagtgccagttcatcctgaagcccagcagactggccgccgcccagcagctgagcgacagcggccacaagaccttcaagagaagaagaagcatcatcaactgggccttctggagaggcagcagcacccacctggacaacctgcccagcagccccaccagccccatgcccggccagctgttcggcatcagcctgcccaacatctgcgagaacgacaacctgcccaagcccgtgctggacatgctgttcttcctgaaccagaagggccccctgaccaagggcatcttcagacagagcgccaacgtgaagagctgcagagagctgaaggagaagctgaacagcggcgtggaggtgcacctggactgcgagagcatcttcgtgatcgccagcgtgctgaaggacttcctgagaaacatccccggcagcatcttcagcagcgacctgtacgaccactgggtgagcgtgatggaccagggcaacgacgaggagaagatcaacaccgtgcagagactgctggaccagctgcccagagccaacgtggtgctgctgagatacctgttcggcgtgctgcacaacatcgagcagcacagcagcagcaaccagatgaccgccttcaacctggccgtgtgcgtggcccccagcatcctgtggccccccgccagcagcagccccgagctggagaacgagttcaccaagaaggtgagcctgctgatccagttcctgatcgagaactgcctgagaatcttcggcgaggagatcaccagcctgttcagagaggtgagcgtgagatgcgacaccagagagaacgccagcgacatcagctgcttccagctgaacgacagcagctacgacagcctggagaacgagctgaacgaggacgtggacgccccctgcagcgacctggtgaagaagctgggccagggcagcagaagcatggacagcgtgctgaccctgagcgactacgacctggaccagcccgaggtggagggcctgctgaccctgagcgacttcgacctggcccacagcaaggacgaggacgtgcagatgaagagacccctggagagcaagcccgtgaacatcctggtgtacaccaagatccccctgagagaccacgccagagcccccagcgccatgtgcacccccagctacctgagcaccgccgccgccaacgccgccaagagcctgagaagacacagaagatgcagcgagcccagcatcgactacctggacagcaagctgagctacctgagagagttctaccagaagaagctgagaaagagcagctgcgacgccatcctgagccagaaggacgaggactacctgaagcagaaccagcccctgcaggaggagggcaagacctgcttcaagcagagcctggtgaccggcaccgacgtgagcaagaagaacgccaccacccagaacaccaagaagaagagcctgagcggcagcgagggcaaccacgtgaagctgttccccaagagcaagcccgtggccatcagcgtggccagctacagccccatgagcagccaggaccacagcaagaaccagcccttcgacgtgaacaccagcggctacagccccccccacaccgccgacgccctgaagggccccagaacccacagaagatgcagcgagcccaacatcgaggaccagaacagaaagctgacctacctgagaggcatctacagcaagaagcagcacaagaccagctgcgaggccggcctgctgcacggcgaggaggactacctgaagagacacaagagcctgcagatggagggccagaagctgatcaaccagagcctggtgatgggcatcgaggtgggcaagagcagcgccaccaaccagaacaccgagaaggtgctgccccccagactgaacctgtgccccagaaccagctacagcagcctgagcagccccggcaccagccccagcggcagcagcgtgagcagccaggacagcgccttcagccagatcagcgagcacagcgtgttcacccccaccgagaccagcagccccatcgactgcaccttccaggcccagagaaagagagaggacctgagccccgacttcagcaacgccagccacgtgagcggcatgcccggccccagcagcggccaggcctgcagcagacccgcctacaccaagaaggacaccatggagtggcacagccagatgcacagcgtgaccctgcaccccagcacctggctgagaaacggcgtggccagcctgaagaactggagcctgaagaagaaggccaaggccgccagacccgaggaggagaagatcgccagccccaagggccccctggagccccccccccacgccagcggcgtgcccgaggccaacagcctgcaggaggagcagaaggacctgcccctgagagccgccgagggcctgagccccgtgcagagcgcccagagatgcagcagcagccccttccaggacagcgagagacactgcagcagccccttcagcctggtggagagcagactgaagctgtgcatgaagagccacgaggagatcgagcccggcagccagagcagcagcggcagcctgccctgggagagagccagcgccagcagctggaccctggaggacgccaccagccccgacagcggccccaccgtggtgtgcgacatcgaggacagatacctgaccaaggacatctag

SEQ ID NO: 12693 - DNA, 3507 bp, synthetic construct
  misc_feature 1..3507: note = Description of Artificial Sequence: Synthetic coding sequence
  source 1..3507: mol_type = other DNA
atgagcgccagagagagacagcccgccctgaagaagaagatgaagaccctggccgagagaagaagaagcgcccccagcctgatcctggacaaggccctgcagaagagacccaccaccagagacagccccagcgccagcgtggacacctgcaccttcctgagcagcctggtgtgcagcaacagaaccctgctgatcgacggcagagccgagctgaagagaggcctgcagagacaggagagacacctgttcctgttcaacgacctgttcgtggtggccaagatcaagtacaacaacaacttcaagatcaagaacaagatcaagctgaccgacatgtggaccgccagctgcgtggacgaggtgggcgagggcaacaccaacgccatgaagagcttcgtgctgggctggcccaccgtgaacttcgtggccaccttcagcagccccgagcagaaggacaagtggctgagcctgctgcagagatacatcaacctggagaaggagaaggactaccccaagagcatccccctgaagatcttcgccaaggacatcggcaactgcgcctacagcaagaccatcaccgtgatgaacagcgacaccgccaacgaggtgatcaacatgagcctgcccatgctgggcatcaccggcagcgagagagactaccagctgtgggtgaacagcggcaaggaggaggccccctaccccctgatcggccacgagtacccctacggcatcaagatgagccacctgagagacagcgccctgctgacccccggcagcaaggacagcaccacccccttcaacctgcaggagcccttcctgatggagcagctgcccagagagatgcagtgccagttcatcctgaagcccagcagactggccgccgcccagcagctgagcgacagcggccacaagaccttcaagagaagaagaagcatcatcaactgggccttctggagaggcagcagcacccacctggacaacctgcccagcagccccaccagccccatgcccggccagctgttcggcatcagcctgcccaacatctgcgagaacgacaacctgcccaagcccgtgctggacatgctgttcttcctgaaccagaagggccccctgaccaagggcatcttcagacagagcgccaacgtgaagagctgcagagagctgaaggagaagctgaacagcggcgtggaggtgcacctggactgcgagagcatcttcgtgatcgccagcgtgctgaaggacttcctgagaaacatccccggcagcatcttcagcagcgacctgtacgaccactgggtgagcgtgatggaccagggcaacgacgaggagaagatcaacaccgtgcagagactgctggaccagctgcccagagccaacgtggtgctgctgagatacctgttcggcgtgctgcacaacatcgagcagcacagcagcagcaaccagatgaccgccttcaacctggccgtgtgcgtggcccccagcatcctgtggccccccgccagcagcagccccgagctggagaacgagttcaccaagaaggtgagcctgctgatccagttcctgatcgagaactgcctgagaatcttcggcgaggagatcaccagcctgttcagagaggtgagcgtgagatgcgacaccagagagaacgccagcgacatcagctgcttccagctgaacgacagcagctacgacagcctggagaacgagctgaacgaggacgtggacgccccctgcagcgacctggtgaagaagctgggccagggcagcagaagcatggacagcgtgctgaccctgagcgactacgacctggaccagcccgaggtggagggcctgctgaccctgagcgacttcgacctggcccacagcaaggacgaggacgtgcagatgaagagacccctggagagcaagcccgtgaacatcctggtgtacaccaagatccccctgagagaccacgccagagcccccagcgccatgtgcacccccagctacctgagcaccgccgccgccaacgccgccaagagcctgagaagacacagaagatgcagcgagcccagcatcgactacctggacagcaagctgagctacctgagagagttctaccagaagaagctgagaaagagcagctgcgacgccatcctgagccagaaggacgaggactacctgaagcagaaccagcccctgcaggaggagggcaagacctgcttcaagcagagcctggtgaccggcaccgacgtgagcaagaagaacgccaccacccagaacaccaagaagaagagcctgagcggcagcgagggcaaccacgtgaagctgttccccaagagcaagcccgtggccatcagcgtggccagctacagccccatgagcagccaggaccacagcaagaaccagcccttcgacgtgaacaccagcggctacagccccccccacaccgccgacgccctgaagggccccagaacccacagaagatgcagcgagcccaacatcgaggaccagaacagaaagctgacctacctgagaggcatctacagcaagaagcagcacaagaccagctgcgaggccggcctgctgcacggcgaggaggactacctgaagagacacaagagcctgcagatggagggccagaagctgatcaaccagagcctggtgatgggcatcgaggtgggcaagagcagcgccaccaaccagaacaccgagaaggtgctgccccccagactgaacctgtgccccagaaccagctacagcagcctgagcagccccggcaccagccccagcggcagcagcgtgagcagccaggacagcgccttcagccagatcagcgagcacagcgtgttcacccccaccgagaccagcagccccatcgactgcaccttccaggcccagagaaagagagaggacctgagccccgacttcagcaacgccagccacgtgagcggcatgcccggccccagcagcggccaggcctgcagcagacccgcctacaccaagaaggacaccatggagtggcacagccagatgcacagcgtgaccctgcaccccagcacctggctgagaaacggcgtggccagcctgaagaactggagcctgaagaagaaggccaaggccgccagacccgaggaggagaagatcgccagccccaagggccccctggagccccccccccacgccagcggcgtgcccgaggccaacagcctgcaggaggagcagaaggacctgcccctgagagccgccgagggcctgagccccgtgcagagcgcccagagatgcagcagcagccccttccaggacagcgagagacactgcagcagccccttcagcctggtggagagcagactgaagctgtgcatgaagagccacgaggagatcgagcccggcagccagagcagcagcggcagcctgccctgggagagagccagcgccagcagctggaccctggaggacgccaccagccccgacagcggccccaccgtggtgtgcgacatcgaggacagatacctgaccaaggacatctag

SEQ ID NO: 12694 - DNA, 3468 bp, synthetic construct
  misc_feature 1..3468: note = Description of Artificial Sequence: Synthetic coding sequence
  source 1..3468: mol_type = other DNA
atgaagaccctggccgagagaagaagaagcgcccccagcctgatcctggacaaggccctgcagaagagacccaccaccagagacagccccagcgccagcgtggacacctgcaccttcctgagcagcctggtgtgcagcaacagaaccctgctgatcgacggcagagccgagctgaagagaggcctgcagagacaggagagacacctgttcctgttcaacgacctgttcgtggtggccaagatcaagtacaacaacaacttcaagatcaagaacaagatcaagctgaccgacatgtggaccgccagctgcgtggacgaggtgggcgagggcaacaccaacgccatgaagagcttcgtgctgggctggcccaccgtgaacttcgtggccaccttcagcagccccgagcagaaggacaagtggctgagcctgctgcagagatacatcaacctggagaaggagaaggactaccccaagagcatccccctgaagatcttcgccaaggacatcggcaactgcgcctacagcaagaccatcaccgtgatgaacagcgacaccgccaacgaggtgatcaacatgagcctgcccatgctgggcatcaccggcagcgagagagactaccagctgtgggtgaacagcggcaaggaggaggccccctaccccctgatcggccacgagtacccctacggcatcaagatgagccacctgagagacagcgccctgctgacccccggcagcaaggacagcaccacccccttcaacctgcaggagcccttcctgatggagcagctgcccagagagatgcagtgccagttcatcctgaagcccagcagactggccgccgcccagcagctgagcgacagcggccacaagaccttcaagagaagaagaagcatcatcaactgggccttctggagaggcagcagcacccacctggacaacctgcccagcagccccaccagccccatgcccggccagctgttcggcatcagcctgcccaacatctgcgagaacgacaacctgcccaagcccgtgctggacatgctgttcttcctgaaccagaagggccccctgaccaagggcatcttcagacagagcgccaacgtgaagagctgcagagagctgaaggagaagctgaacagcggcgtggaggtgcacctggactgcgagagcatcttcgtgatcgccagcgtgctgaaggacttcctgagaaacatccccggcagcatcttcagcagcgacctgtacgaccactgggtgagcgtgatggaccagggcaacgacgaggagaagatcaacaccgtgcagagactgctggaccagctgcccagagccaacgtggtgctgctgagatacctgttcggcgtgctgcacaacatcgagcagcacagcagcagcaaccagatgaccgccttcaacctggccgtgtgcgtggcccccagcatcctgtggccccccgccagcagcagccccgagctggagaacgagttcaccaagaaggtgagcctgctgatccagttcctgatcgagaactgcctgagaatcttcggcgaggagatcaccagcctgttcagagaggtgagcgtgagatgcgacaccagagagaacgccagcgacatcagctgcttccagctgaacgacagcagctacgacagcctggagaacgagctgaacgaggacgtggacgccccctgcagcgacctggtgaagaagctgggccagggcagcagaagcatggacagcgtgctgaccctgagcgactacgacctggaccagcccgaggtggagggcctgctgaccctgagcgacttcgacctggcccacagcaaggacgaggacgtgcagatgaagagacccctggagagcaagcccgtgaacatcctggtgtacaccaagatccccctgagagaccacgccagagcccccagcgccatgtgcacccccagctacctgagcaccgccgccgccaacgccgccaagagcctgagaagacacagaagatgcagcgagcccagcatcgactacctggacagcaagctgagctacctgagagagttctaccagaagaagctgagaaagagcagctgcgacgccatcctgagccagaaggacgaggactacctgaagcagaaccagcccctgcaggaggagggcaagacctgcttcaagcagagcctggtgaccggcaccgacgtgagcaagaagaacgccaccacccagaacaccaagaagaagagcctgagcggcagcgagggcaaccacgtgaagctgttccccaagagcaagcccgtggccatcagcgtggccagctacagccccatgagcagccaggaccacagcaagaaccagcccttcgacgtgaacaccagcggctacagccccccccacaccgccgacgccctgaagggccccagaacccacagaagatgcagcgagcccaacatcgaggaccagaacagaaagctgacctacctgagaggcatctacagcaagaagcagcacaagaccagctgcgaggccggcctgctgcacggcgaggaggactacctgaagagacacaagagcctgcagatggagggccagaagctgatcaaccagagcctggtgatgggcatcgaggtgggcaagagcagcgccaccaaccagaacaccgagaaggtgctgccccccagactgaacctgtgccccagaaccagctacagcagcctgagcagccccggcaccagccccagcggcagcagcgtgagcagccaggacagcgccttcagccagatcagcgagcacagcgtgttcacccccaccgagaccagcagccccatcgactgcaccttccaggcccagagaaagagagaggacctgagccccgacttcagcaacgccagccacgtgagcggcatgcccggccccagcagcggccaggcctgcagcagacccgcctacaccaagaaggacaccatggagtggcacagccagatgcacagcgtgaccctgcaccccagcacctggctgagaaacggcgtggccagcctgaagaactggagcctgaagaagaaggccaaggccgccagacccgaggaggagaagatcgccagccccaagggccccctggagccccccccccacgccagcggcgtgcccgaggccaacagcctgcaggaggagcagaaggacctgcccctgagagccgccgagggcctgagccccgtgcagagcgcccagagatgcagcagcagccccttccaggacagcgagagacactgcagcagccccttcagcctggtggagagcagactgaagctgtgcatgaagagccacgaggagatcgagcccggcagccagagcagcagcggcagcctgccctgggagagagccagcgccagcagctggaccctggaggacgccaccagccccgacagcggccccaccgtggtgtgcgacatcgaggacagatacctgaccaaggacatctag

SEQ ID NO: 12695 - DNA, 3468 bp, synthetic construct; identical to SEQ ID NO: 12694
  misc_feature 1..3468: note = Description of Artificial Sequence: Synthetic coding sequence
  source 1..3468: mol_type = other DNA

SEQ ID NO: 12696 - DNA, 2196 bp, synthetic construct
  misc_feature 1..2196: note = Description of Artificial Sequence: Synthetic coding sequence
  source 1..2196: mol_type = other DNA
atggaccagggcaacgacgaggagaagatcaacaccgtgcagagactgctggaccagctgcccagagccaacgtggtgctgctgagatacctgttcggcgtgctgcacaacatcgagcagcacagcagcagcaaccagatgaccgccttcaacctggccgtgtgcgtggcccccagcatcctgtggccccccgccagcagcagccccgagctggagaacgagttcaccaagaaggtgagcctgctgatccagttcctgatcgagaactgcctgagaatcttcggcgaggagatcaccagcctgttcagagaggtgagcgtgagatgcgacaccagagagaacgccagcgacatcagctgcttccagctgaacgacagcagctacgacagcctggagaacgagctgaacgaggacgtggacgccccctgcagcgacctggtgaagaagctgggccagggcagcagaagcatggacagcgtgctgaccctgagcgactacgacctggaccagcccgaggtggagggcctgctgaccctgagcgacttcgacctggcccacagcaaggacgaggacgtgcagatgaagagacccctggagagcaagcccgtgaacatcctggtgtacaccaagatccccctgagagaccacgccagagcccccagcgccatgtgcacccccagctacctgagcaccgccgccgccaacgccgccaagagcctgagaagacacagaagatgcagcgagcccagcatcgactacctggacagcaagctgagctacctgagagagttctaccagaagaagctgagaaagagcagctgcgacgccatcctgagccagaaggacgaggactacctgaagcagaaccagcccctgcaggaggagggcaagacctgcttcaagcagagcctggtgaccggcaccgacgtgagcaagaagaacgccaccacccagaacaccaagaagaagagcctgagcggcagcgagggcaaccacgtgaagctgttccccaagagcaagcccgtggccatcagcgtggccagctacagccccatgagcagccaggaccacagcaagaaccagcccttcgacgtgaacaccagcggctacagccccccccacaccgccgacgccctgaagggccccagaacccacagaagatgcagcgagcccaacatcgaggaccagaacagaaagctgacctacctgagaggcatctacagcaagaagcagcacaagaccagctgcgaggccggcctgctgcacggcgaggaggactacctgaagagacacaagagcctgcagatggagggccagaagctgatcaaccagagcctggtgatgggcatcgaggtgggcaagagcagcgccaccaaccagaacaccgagaaggtgctgccccccagactgaacctgtgccccagaaccagctacagcagcctgagcagccccggcaccagccccagcggcagcagcgtgagcagccaggacagcgccttcagccagatcagcgagcacagcgtgttcacccccaccgagaccagcagccccatcgactgcaccttccaggcccagagaaagagagaggacctgagccccgacttcagcaacgccagccacgtgagcggcatgcccggccccagcagcggccaggcctgcagcagacccgcctacaccaagaaggacaccatggagtggcacagccagatgcacagcgtgaccctgcaccccagcacctggctgagaaacggcgtggccagcctgaagaactggagcctgaagaagaaggccaaggccgccagacccgaggaggagaagatcgccagccccaagggccccctggagccccccccccacgccagcggcgtgcccgaggccaacagcctgcaggaggagcagaaggacctgcccctgagagccgccgagggcctgagccccgtgcagagcgcccagagatgcagcagcagccccttccaggacagcgagagacactgcagcagccccttcagcctggtggagagcagactgaagctgtgcatgaagagccacgaggagatcgagcccggcagccagagcagcagcggcagcctgccctgggagagagccagcgccagcagctggaccctggaggacgccaccagccccgacagcggccccaccgtggtgtgcgacatcgaggacagaaactgctgctag

SEQ ID NO: 12697 - DNA, 3498 bp, synthetic construct; identical to SEQ ID NO: 12692
  misc_feature 1..3498: note = Description of Artificial Sequence: Synthetic coding sequence
  source 1..3498: mol_type = other DNA

SEQ ID NO: 12698 - DNA, 4542 bp, synthetic construct
  misc_feature 1..4542: note = Description of Artificial Sequence: Synthetic coding sequence
  source 1..4542: mol_type = other DNA
atgatgatggccagaaagcaggacgtgagaatccccacctacaacatcagcgtggtgggcctgagcggcaccgagaaggagaagggccagtgcggcatcggcaagagctgcctgtgcaacagattcgtgagacccagcgccgacgagttccacctggaccacaccagcgtgctgagcaccagcgacttcggcggcagagtggtgaacaacgaccacttcctgtactggggcgaggtgagcagaagcctggaggactgcgtggagtgcaagatgcacatcgtggagcagaccgagttcatcgacgaccagaccttccagccccacagaagcaccgccctgcagccctacatcaagagagccgccgccaccaagctggccagcgccgagaagctgatgtacttctgcaccgaccagctgggcctggagcaggacttcgagcagaagcagatgcccgacggcaagctgctggtggacggcttcctgctgggcatcgacgtgagcagaggcatgaacagaaacttcgacgaccagctgaagttcgtgagcaacctgtacaaccagctggccaagaccaagaagcccatcgtggtggtgctgaccaagtgcgacgagggcgtggagagatacatcagagacgcccacaccttcgccctgagcaagaagaacctgcaggtggtggagaccagcgccagaagcaacgtgaacgtggacctggccttcagcaccctggtgcagctgatcgacaagagcagaggcaagaccaagatcatcccctacttcgaggccctgaagcagcagagccagcagatcgccaccgccaaggacaagtacgagtggctggtgagcagaatcgtgaagaaccacaacgagaactggctgagcgtgagcagaaagatgcaggccagccccgagtaccaggactacgtgtacctggagggcacccagaaggccaagaagctgttcctgcagcacatccacagactgaagcacgagcacatcgagagaagaagaaagctgtacctggccgccctgcccctggccttcgaggccctgatccccaacctggacgagatcgaccacctgagctgcatcaaggccaagaagctgctggagaccaagcccgagttcctgaagtggttcgtggtgctggaggagaccccctgggacgccaccagccacatcgacaacatggagaacgagagaatccccttcgacctgatggacaccgtgcccgccgagcagctgtacgaggcccacctggagaagctgagaaacgagagaaagagagtggagatgagaagagccttcaaggagaacctggagaccagccccttcatcacccccggcaagccctgggaggaggccagaagcttcatcatgaacgaggacttctaccagtggctggaggagagcgtgtacatggacatctacggcaagcaccagaagcagatcatcgacaaggccaaggaggagttccaggagctgctgctggagtacagcgagctgttctacgagctggagctggacgccaagcccagcaaggagaagatgggcgtgatccaggacgtgctgggcgaggagcagagattcaaggccctgcagaagctgcaggccgagagagacgccctgatcctgaagcacatccacttcgtgtaccaccccaccaaggagacctgccccagctgccccgcctgcgtggacgccaagatcgagcacctgatcagcagcagattcatcagacccagcgacagaaaccagaagaacagcctgagcgaccccaacatcgacagaatcaacctggtgatcctgggcaaggacggcctggccagagagctggccaacgagatcagagccctgtgcaccaacgacgacaagtacgtgatcgacggcaagatgtacgagctgagcctgagacccatcgagggcaacgtgagactgcccgtgaacagcttccagacccccaccttccagccccacggctgcctgtgcctgtacaacagcaaggagagcctgagctacgtggtggagagcatcgagaagagcagagagagcaccctgggcagaagagacaaccacctggtgcacctgcccctgaccctgatcctggtgaacaagagaggcgacaccagcggcgagaccctgcacagcctgatccagcagggccagcagatcgccagcaagctgcagtgcgtgttcctggaccccgccagcgccggcatcggctacggcagaaacatcaacgagaagcagatcagccaggtgctgaagggcctgctggacagcaagagaaacctgaacctggtgagcagcaccgccagcatcaaggacctggccgacgtggacctgagaatcgtgatgtgcctgatgtgcggcgaccccttcagcgccgacgacatcctgttccccgtgctgcagagccagacctgcaagagcagccactgcggcagcaacaacagcgtgctgctggagctgcccatcggcctgcacaagaagagaatcgagctgagcgtgctgagctaccacagcagcttcagcatcagaaagagcagactggtgcacggctacatcgtgttctacagcgccaagagaaaggccagcctggccatgctgagagccttcctgtgcgaggtgcaggacatcatccccatccagctggtggccctgaccgacggcgccgtggacgtgctggacaacgacctgagcagagagcagctgaccgagggcgaggagatcgcccaggagatcgacggcagattcaccagcatcccctgcagccagccccagcacaagctggagatcttccaccccttcttcaaggacgtggtggagaagaagaacatcatcgaggccacccacatgtacgacaacgccgccgaggcctgcagcaccaccgaggaggtgttcaacagccccagagccggcagccccctgtgcaacagcaacctgcaggacagcgaggaggacatcgagcccagctacagcctgttcagagaggacaccagcctgcccagcctgagcaaggaccacagcaagctgagcatggagctggagggcaacgacggcctgagcttcatcatgagcaacttcgagagcaagctgaacaacaaggtgcccccccccgtgaagcccaagccccccgtgcacttcgagatcaccaagggcgacctgagctacctggaccagggccacagagacggccagagaaagagcgtgagcagcagcccctggctgccccaggacggcttcgaccccagcgactacgccgagcccatggacgccgtggtgaagcccagaaacgaggaggagaacatctacagcgtgccccacgacagcacccagggcaagatcatcaccatcagaaacatcaacaaggcccagagcaacggcagcggcaacggcagcgacagcgagatggacaccagcagcctggagagaggcagaaaggtgagcatcgtgagcaagcccgtgctgtacagaaccagatgcaccagactgggcagattcgccagctacagaaccagcttcagcgtgggcagcgacgacgagctgggccccatcagaaagaaggaggaggaccaggccagccagggctacaagggcgacaacgccgtgatcccctacgagaccgacgaggaccccagaagaagaaacatcctgagaagcctgagaagaaacaccaagaagcccaagcccaagcccagacccagcatcaccaaggccacctgggagagcaactacttcggcgtgcccctgaccaccgtggtgacccccgagaagcccatccccatcttcatcgagagatgcatcgagtacatcgaggccaccggcctgagcaccgagggcatctacagagtgagcggcaacaagagcgagatggagagcctgcagagacagttcgaccaggaccacaacctggacctggccgagaaggacttcaccgtgaacaccgtggccggcgccatgaagagcttcttcagcgagctgcccgaccccctggtgccctacaacatgcagatcgacctggtggaggcccacaagatcaacgacagagagcagaagctgcacgccctgaaggaggtgctgaagaagttccccaaggagaaccacgaggtgttcaagtacgtgatcagccacctgaacaaggtgagccacaacaacaaggtgaacctgatgaccagcgagaacctgagcatctgcttctggcccaccctgatgagacccgacttcagcaccatggacgccctgaccgccaccagaacctaccagaccatcatcgagctgttcatccagcagtgccccttcttcttctacaacagacccatcaccgagccccccggcgccagacccagcagccccagcgccgtggccagcaccgtgcccttcctgaccagcacccccgtgaccagccagcccagccccccccagagccccccccccaccccccagagccccatgcagcccctgctgcccagccccctgcacccccacagacccaccccccagcccagcagaaacatcccctggcagaccaaggagcactag

SEQ ID NO: 12699 - DNA, 4500 bp, synthetic construct
  misc_feature 1..4500: note = Description of Artificial Sequence: Synthetic coding sequence
  source 1..4500: mol_type = other DNA
atgatgatggccagaaagcaggacgtgagaatccccacctacaacatcagcgtggtgggcctgagcggcaccgagaaggagaagggccagtgcggcatcggcaagagctgcctgtgcaacagattcgtgagacccagcgccgacgagttccacctggaccacaccagcgtgctgagcaccagcgacttcggcggcagagtggtgaacaacgaccacttcctgtactggggcgaggtgagcagaagcctggaggactgcgtggagtgcaagatgcacatcgtggagcagaccgagttcatcgacgaccagaccttccagccccacagaagcaccgccctgcagccctacatcaagagagccgccgccaccaagctggccagcgccgagaagctgatgtacttctgcaccgaccagctgggcctggagcaggacttcgagcagaagcagatgcccgacggcaagctgctggtggacggcttcctgctgggcatcgacgtgagcagaggcatgaacagaaacttcgacgaccagctgaagttcgtgagcaacctgtacaaccagctggccaagaccaagaagcccatcgtggtggtgctgaccaagtgcgacgagggcgtggagagatacatcagagacgcccacaccttcgccctgagcaagaagaacctgcaggtggtggagaccagcgccagaagcaacgtgaacgtggacctggccttcagcaccctggtgcagctgatcgacaagagcagaggcaagaccaagatcatcccctacttcgaggccctgaagcagcagagccagcagatcgccaccgccaaggacaagtacgagtggctggtgagcagaatcgtgaagaaccacaacgagaactggctgagcgtgagcagaaagatgcaggccagccccgagtaccaggactacgtgtacctggagggcacccagaaggccaagaagctgttcctgcagcacatccacagactgaagcacgagcacatcgagagaagaagaaagctgtacctggccgccctgcccctggccttcgaggccctgatccccaacctggacgagatcgaccacctgagctgcatcaaggccaagaagctgctggagaccaagcccgagttcctgaagtggttcgtggtgctggaggagaccccctgggacgccaccagccacatcgacaacatggagaacgagagaatccccttcgacctgatggacaccgtgcccgccgagcagctgtacgaggcccacctggagaagctgagaaacgagagaaagagagtggagatgagaagagccttcaaggagaacctggagaccagccccttcatcacccccggcaagccctgggaggaggccagaagcttcatcatgaacgaggacttctaccagtggctggaggagagcgtgtacatggacatctacggcaagcaccagaagcagatcatcgacaaggccaaggaggagttccaggagctgctgctggagtacagcgagctgttctacgagctggagctggacgccaagcccagcaaggagaagatgggcgtgatccaggacgtgctgggcgaggagcagagattcaaggccctgcagaagctgcaggccgagagagacgccctgatcctgaagcacatccacttcgtgtaccaccccaccaaggagacctgccccagctgccccgcctgcgtggacgccaagatcgagcacctgatcagcagcagattcatcagacccagcgacagaaaccagaagaacagcctgagcgaccccaacatcgacagaatcaacctggtgatcctgggcaaggacggcctggccagagagctggccaacgagatcagagccctgtgcaccaacgacgacaagtacgtgatcgacggcaagatgtacgagctgagcctgagacccatcgagggcaacgtgagactgcccgtgaacagcttccagacccccaccttccagccccacggctgcctgtgcctgtacaacagcaaggagagcctgagctacgtggtggagagcatcgagaagagcagagagagcaccctgggcagaagagacaaccacctggtgcacctgcccctgaccctgatcctggtgaacaagagaggcgacaccagcggcgagaccctgcacagcctgatccagcagggccagcagatcgccagcaagctgcagtgcgtgttcctggaccccgccagcgccggcatcggctacggcagaaacatcaacgagaagcagatcagccaggtgctgaagggcctgctggacagcaagagaaacctgaacctggtgagcagcaccgccagcatcaaggacctggccgacgtggacctgagaatcgtgatgtgcctgatgtgcggcgaccccttcagcgccgacgacatcctgttccccgtgctgcagagccagacctgcaagagcagccactgcggcagcaacaacagcgtgctgctggagctgcccatcggcctgcacaagaagagaatcgagctgagcgtgctgagctaccacagcagcttcagcatcagaaagagcagactggtgcacggctacatcgtgttctacagcgccaagagaaaggccagcctggccatgctgagagccttcctgtgcgaggtgcaggacatcatccccatccagctggtggccctgaccgacggcgccgtggacgtgctggacaacgacctgagcagagagcagctgaccgagggcgaggagatcgcccaggagatcgacggcagattcaccagcatcccctgcagccagccccagcacaagctggagatcttccaccccttcttcaaggacgtggtggagaagaagaacatcatcgaggccacccacatgtacgacaacgccgccgaggcctgcagcaccaccgaggaggtgttcaacagccccagagccggcagccccctgtgcaacagcaacctgcaggacagcgaggaggacatcgagcccagctacagcctgttcagagaggacaccagcctgcccagcctgagcaaggaccacagcaagctgagcatggagctggagggcaacgacggcctgagcttcatcatgagcaacttcgagagcaagctgaacaacaaggtgcccccccccgtgaagcccaagccccccgtgcacttcgagatcaccaagggcgacctgagctacctggaccagggccacagagacggccagagaaagagcgtgagcagcagcccctggctgccccaggacggcttcgaccccagcgactacgccgagcccatggacgccgtggtgaagcccagaaacgaggaggagaacatctacagcgtgccccacgacagcacccagggcaagatcatcaccatcagaaacatcaacaaggcccagagcaacggcagcggcaacggcagcgacagcgagatggacaccagcagcctggagagaggcagaaaggtgagcatcgtgagcaagcccgtgctgtacagaaccagatgcaccagactgggcagattcgccagctacagaaccagcttcagcgtgggcagcgacgacgagctgggccccatcagaaagaaggaggaggaccaggccagccagggctacaagggcgacaacgccgtgatcccctacgagaccgacgaggaccccagaagaagaaacatcctgagaagcctgagaagaaacaccaagaagcccaagcccaagcccagacccagcatcaccaaggccacctgggagagcaactacttcggcgtgcccctgaccaccgtggtgacccccgagaagcccatccccatcttcatcgagagatgcatcgagtacatcgaggccaccggcctgagcaccgagggcatctacagagtgagcggcaacaagagcgagatggagagcctgcagagacagttcgaccaggaccacaacctggacctggccgagaaggacttcaccgtgaacaccgtggccggcgccatgaagagcttcttcagcgagctgcccgaccccctggtgccctacaacatgcagatcgacctggtggaggcccacaagatcaacgacagagagcagaagctgcacgccctgaaggaggtgctgaagaagttccccaaggagaaccacgaggtgttcaagtacgtgatcagccacctgaacaaggtgagccacaacaacaaggtgaacctgatgaccagcgagaacctgagcatctgcttctggcccaccctgatgagacccgacttcagcaccatggacgccctgaccgccaccagaacctaccagaccatcatcgagctgttcatccagcagtgccccttcttcttctacaacagacccatcaccgagccccccggcgccagacccagcagccccagcgccgtggccagcaccgtgcccttcctgaccagcacccccgtgaccagccagcccagccccccccagagccccccccccaccccccagagccccatgcagcccctgctgcccagccagctgcaggccgagcacaccctgtag

SEQ ID NO: 12700 - DNA, 2250 bp, synthetic construct
  misc_feature 1..2250: note = Description of Artificial Sequence: Synthetic coding sequence
  source 1..2250: mol_type = other DNA
atgatgatggccagaaagcaggacgtgagaatccccacctacaacatcagcgtggtgggcctgagcggcaccgagaaggagaagggccagtgcggcatcggcaagagctgcctgtgcaacagattcgtgagacccagcgccgacgagttccacctggaccacaccagcgtgctgagcaccagcgacttcggcggcagagtggtgaacaacgaccacttcctgtactggggcgaggtgagcagaagcctggaggactgcgtggagtgcaagatgcacatcgtggagcagaccgagttcatcgacgaccagaccttccagccccacagaagcaccgccctgcagccctacatcaagagagccgccgccaccaagctggccagcgccgagaagctgatgtacttctgcaccgaccagctgggcctggagcaggacttcgagcagaagcagatgcccgacggcaagctgctggtggacggcttcctgctgggcatcgacgtgagcagaggcatgaacagaaacttcgacgaccagctgaagttcgtgagcaacctgtacaaccagctggccaagaccaagaagcccatcgtggtggtgctgaccaagtgcgacgagggcgtggagagatacatcagagacgcccacaccttcgccctgagcaagaagaacctgcaggtggtggagaccagcgccagaagcaacgtgaacgtggacctggccttcagcaccctggtgcagctgatcgacaagagcagaggcaagaccaagatcatcccctacttcgaggccctgaagcagcagagccagcagatcgccaccgccaaggacaagtacgagtggctggtgagcagaatcgtgaagaaccacaacgagaactggctgagcgtgagcagaaagatgcaggccagccccgagtaccaggactacgtgtacctggagggcacccagaaggccaagaagctgttcctgcagcacatccacagactgaagcacgagcacatcgagagaagaagaaagctgtacctggccgccctgcccctggccttcgaggccctgatccccaacctggacgagatcgaccacctgagctgcatcaaggccaagaagctgctggagaccaagcccgagttcctgaagtggttcgtggtgctggaggagaccccctgggacgccaccagccacatcgacaacatggagaacgagagaatccccttcgacctgatggacaccgtgcccgccgagcagctgtacgaggcccacctggagaagctgagaaacgagagaaagagagtggagatgagaagagccttcaaggagaacctggagaccagccccttcatcacccccggcaagccctgggaggaggccagaagcttcatcatgaacgaggacttctaccagtggctggaggagagcgtgtacatggacatctacggcaagcaccagaagcagatcatcgacaaggccaaggaggagttccaggagctgctgctggagtacagcgagctgttctacgagctggagctggacgccaagcccagcaaggagaagatgggcgtgatccaggacgtgctgggcgaggagcagagattcaaggccctgcagaagctgcaggccgagagagacgccctgatcctgaagcacatccacttcgtgtaccaccccaccaaggagacctgccccagctgccccgcctgcgtggacgccaagatcgagcacctgatcagcagcagattcatcagacccagcgacagaaaccagaagaacagcctgagcgaccccaacatcgacagaatcaacctggtgatcctgggcaaggacggcctggccagagagctggccaacgagatcagagccctgtgcaccaacgacgacaagtacgtgatcgacggcaagatgtacgagctgagcctgagacccatcgagggcaacgtgagactgcccgtgaacagcttccagacccccaccttccagccccacggctgcctgtgcctgtacaacagcaaggagagcctgagctacgtggtggagagcatcgagaagagcagagagagcaccctgggcagaagagacaaccacctggtgcacctgcccctgaccctgatcctggtgaacaagagaggcgacaccagcggcgagaccctgcacagcctgatccagcagggccagcagatcgccagcaagctgcagtgcgtgttcctggaccccgccagcgccggcgccgccgacctgagctggctgggccccatctag

SEQ ID NO: 12701 - DNA, 978 bp, synthetic construct
  misc_feature 1..978: note = Description of Artificial Sequence: Synthetic coding sequence
  source 1..978: mol_type = other DNA
atggacatgtggaccgccctgctgatcctgcaggccctgctgctgcccagcctggccgacggcgccacccccgccctgagattcgtggccgtgggcgactggggcggcgtgcccaacgcccccttccacaccgccagagagatggccaacgccaaggagatcgccagaaccgtgcagatcctgggcgccgacttcatcctgagcctgggcgacaacttctacttcaccggcgtgcaggacatcaacgacaagagattccaggagaccttcgaggacgtgttcagcgacagaagcctgagaaaggtgccctggtacgtgctggccggcaaccacgaccacctgggcaacgtgagcgcccagatcgcctacagcaagatcagcaagagatggaacttccccagccccttctacagactgcacttcaagatcccccagaccaacgtgagcgtggccatcttcatgctggacaccgtgaccctgtgcggcaacagcgacgacttcctgagccagcagcccgagagacccagagacgtgaagctggccagaacccagctgagctggctgaagaagcagctggccgccgccagagaggactacgtgctggtggccggccactaccccgtgtggagcatcgccgagcacggccccacccactgcctggtgaagcagctgagacccctgctggccacctacggcgtgaccgcctacctgtgcggccacgaccacaacctgcagtacctgcaggacgagaacggcgtgggctacgtgctgagcggcgccggcaacttcatggaccccagcaagagacaccagagaaaggtgcccaacggctacctgagattccactacggcaccgaggacagcctgggcggcttcgcctacgtggagatcagcagcaaggagatgaccgtgacctacatcgaggccagcggcaagagcctgttcaagaccagactgcccagaagagccagaccctag

SEQ ID NO: 12702 - DNA, 2349 bp, synthetic construct
  misc_feature 1..2349: note = Description of Artificial Sequence: Synthetic coding sequence
  source 1..2349: mol_type = other DNA
atgaacagcgccgagcagaccgtgacctggctgatcaccctgggcgtgctggagagccccaagaagaccatcagcgaccccgagggcttcctgcaggccagcctgaaggacggcgtggtgctgtgcagactgctggagagactgctgcccggcaccatcgagaaggtgtaccccgagcccagaagcgagagcgagtgcctgagcaacatcagagagttcctgagaggctgcggcgccagcctgagactggagaccttcgacgccaacgacctgtaccagggccagaacttcaacaaggtgctgagcagcctggtgaccctgaacaaggtgaccgccgacatcggcctgggcagcgacagcgtgtgcgccagacccagcagccacagaatcaagagcttcgacagcctgggcagccagagcctgcacaccagaaccagcaagctgttccagggccagtacagaagcctggacatgaccgacaacagcaacaaccagctggtggtgagagccaagttcaacttccagcagaccaacgaggacgagctgagcttcagcaagggcgacgtgatccacgtgaccagagtggaggagggcggctggtgggagggcaccctgaacggcagaaccggctggttccccagcaactacgtgagagaggtgaaggccagcgagaagcccgtgagccccaagagcggcaccctgaagagcccccccaagggcttcgacaccaccgccatcaacaagagctactacaacgtggtgctgcagaacatcctggagaccgagaacgagtacagcaaggagctgcagaccgtgctgagcacctacctgagacccctgcagaccagcgagaagctgagcagcgccaacatcagctacctgatgggcaacctggaggagatctgcagcttccagcagatgctggtgcagagcctggaggagtgcaccaagctgcccgaggcccagcagagagtgggcggctgcttcctgaacctgatgccccagatgaagaccctgtacctgacctactgcgccaaccaccccagcgccgtgaacgtgctgaccgagcacagcgaggagctgggcgagttcatggagaccaagggcgccagcagccccggcatcctggtgctgaccaccggcctgagcaagcccttcatgagactggacaagtaccccaccctgctgaaggagctggagagacacatggaggactaccacaccgacagacaggacatccagaagagcatggccgccttcaagaacctgagcgcccagtgccaggaggtgagaaagagaaaggagctggagctgcagatcctgaccgaggccatcagaaactgggagggcgacgacatcaagaccctgggcaacgtgacctacatgagccaggtgctgatccagtgcgccggcagcgaggagaagaacgagagatacctgctgctgttccccaacgtgctgctgatgctgagcgccagccccagaatgagcggcttcatctaccagggcaagctgcccaccaccggcatgaccatcaccaagctggaggacagcgagaaccacagaaacgccttcgagatcagcggcagcatgatcgagagaatcctggtgagctgcaacaaccagcaggacctgcaggagtgggtggagcacctgcagaagcagaccaaggtgaccagcgtgggcaaccccaccatcaagccccacagcgtgcccagccacaccctgcccagccaccccgtgacccccagcagcaagcacgccgacagcaagcccgcccccctgacccccgcctaccacaccctgccccaccccagccaccacggcaccccccacaccaccatcaactggggccccctggagccccccaagacccccaagccctggagcctgagctgcctgagacccgccccccccctgagacccagcgccgccctgtgctacaaggaggacctgagcaagagccccaagaccatgaagaagctgctgcccaagagaaagcccgagagaaagcccagcgacgaggagttcgccagcagaaagagcaccgccgccctggaggaggacgcccagatcctgaaggtgatcgaggcctactgcaccagcgccaagaccagacagaccctgaacagcacctggcagggcaccgacctgatgcacaaccacgtgctggccgacgacgaccagcccagcctggacagcctgggcagaagaagcagcctgagcagactggagcccagcgacctgagcgaggacagcgactacgacagcatctggaccgcccacagctacagaatgggcagcaccagcagaaagagctgctgcagctacatcagccaccagaactag

SEQ ID NO: 12703 - DNA, 2196 bp, synthetic construct
  misc_feature 1..2196: note = Description of Artificial Sequence: Synthetic coding sequence
  source 1..2196: mol_type = other DNA
atgaacagcgccgagcagaccgtgacctggctgatcaccctgggcgtgctggagagccccaagaagaccatcagcgaccccgagggcttcctgcaggccagcctgaaggacggcgtggtgctgtgcagactgctggagagactgctgcccggcaccatcgagaaggtgtaccccgagcccagaagcgagagcgagtgcctgagcaacatcagagagttcctgagaggctgcggcgccagcctgagactggaggacatgaccgacaacagcaacaaccagctggtggtgagagccaagttcaacttccagcagaccaacgaggacgagctgagcttcagcaagggcgacgtgatccacgtgaccagagtggaggagggcggctggtgggagggcaccctgaacggcagaaccggctggttccccagcaactacgtgagagaggtgaaggccagcgagaagcccgtgagccccaagagcggcaccctgaagagcccccccaagggcttcgacaccaccgccatcaacaagagctactacaacgtggtgctgcagaacatcctggagaccgagaacgagtacagcaaggagctgcagaccgtgctgagcacctacctgagacccctgcagaccagcgagaagctgagcagcgccaacatcagctacctgatgggcaacctggaggagatctgcagcttccagcagatgctggtgcagagcctggaggagtgcaccaagctgcccgaggcccagcagagagtgggcggctgcttcctgaacctgatgccccagatgaagaccctgtacctgacctactgcgccaaccaccccagcgccgtgaacgtgctgaccgagcacagcgaggagctgggcgagttcatggagaccaagggcgccagcagccccggcatcctggtgctgaccaccggcctgagcaagcccttcatgagactggacaagtaccccaccctgctgaaggagctggagagacacatggaggactaccacaccgacagacaggacatccagaagagcatggccgccttcaagaacctgagcgcccagtgccaggaggtgagaaagagaaaggagctggagctgcagatcctgaccgaggccatcagaaactgggagggcgacgacatcaagaccctgggcaacgtgacctacatgagccaggtgctgatccagtgcgccggcagcgaggagaagaacgagagatacctgctgctgttccccaacgtgctgctgatgctgagcgccagccccagaatgagcggcttcatctaccagggcaagctgcccaccaccggcatgaccatcaccaagctggaggacagcgagaaccacagaaacgccttcgagatcagcggcagcatgatcgagagaatcctggtgagctgcaacaaccagcaggacctgcaggagtgggtggagcacctgcagaagcagaccaaggtgaccagcgtgggcaaccccaccatcaagccccacagcgtgcccagccacaccctgcccagccaccccgtgacccccagcagcaagcacgccgacagcaagcccgcccccctgacccccgcctaccacaccctgccccaccccagccaccacggcaccccccacaccaccatcaactggggccccctggagccccccaagacccccaagccctggagcctgagctgcctgagacccgccccccccctgagacccagcgccgccctgtgctacaaggaggacctgagcaagagccccaagaccatgaagaagctgctgcccaagagaaagcccgagagaaagcccagcgacgaggagttcgccagcagaaagagcaccgccgccctggaggaggacgcccagatcctgaaggtgatcgaggcctactgcaccagcgccaagaccagacagaccctgaacagcagcagcagaaaggagagcgccccccaggtgctgctgcccgaggaggagaagatcatcgtggaggagaccaagagcaacggccagaccgtgatcgaggagaagagcctggtggacaccgtgtacgccctgaaggacgaggtgcaggagctgagacaggacaacaagaagatgaagaagagcctggaggaggagcagagagccagaaaggacctggagaagctggtgagaaaggtgctgaagaacatgaacgaccccgcctgggacgagaccaacctgtag

SEQ ID NO: 12704 - DNA, 1878 bp, synthetic construct
  misc_feature 1..1878: note = Description of Artificial Sequence: Synthetic coding sequence
  source 1..1878: mol_type = other DNA
atgaccgacaacagcaacaaccagctggtggtgagagccaagttcaacttccagcagaccaacgaggacgagctgagcttcagcaagggcgacgtgatccacgtgaccagagtggaggagggcggctggtgggagggcaccctgaacggcagaaccggctggttccccagcaactacgtgagagaggtgaaggccagcgagaagcccgtgagccccaagagcggcaccctgaagagcccccccaagggcttcgacaccaccgccatcaacaagagctactacaacgtggtgctgcagaacatcctggagaccgagaacgagtacagcaaggagctgcagaccgtgctgagcacctacctgagacccctgcagaccagcgagaagctgagcagcgccaacatcagctacctgatgggcaacctggaggagatctgcagcttccagcagatgctggtgcagagcctggaggagtgcaccaagctgcccgaggcccagcagagagtgggcggctgcttcctgaacctgatgccccagatgaagaccctgtacctgacctactgcgccaaccaccccagcgccgtgaacgtgctgaccgagcacagcgaggagctgggcgagttcatggagaccaagggcgccagcagccccggcatcctggtgctgaccaccggcctgagcaagcccttcatgagactggacaagtaccccaccctgctgaaggagctggagagacacatggaggactaccacaccgacagacaggacatccagaagagcatggccgccttcaagaacctgagcgcccagtgccaggaggtgagaaagagaaaggagctggagctgcagatcctgaccgaggccatcagaaactgggagggcgacgacatcaagaccctgggcaacgtgacctacatgagccaggtgctgatccagtgcgccggcagcgaggagaagaacgagagatacctgctgctgttccccaacgtgctgctgatgctgagcgccagccccagaatgagcggcttcatctaccagggcaagctgcccaccaccggcatgaccatcaccaagctggaggacagcgagaaccacagaaacgccttcgagatcagcggcagcatgatcgagagaatcctggtgagctgcaacaaccagcaggacctgcaggagtgggtggagcacctgcagaagcagaccaaggtgaccagcgtgggcaaccccaccatcaagccccacagcgtgcccagccacaccctgcccagccaccccgtgacccccagcagcaagcacgccgacagcaagcccgcccccctgacccccgcctaccacaccctgccccaccccagccaccacggcaccccccacaccaccatcaactggggccccctggagccccccaagacccccaagccctggagcctgagctgcctgagacccgccccccccctgagacccagcgccgccctgtgctacaaggaggacctgagcaagagccccaagaccatgaagaagctgctgcccaagagaaagcccgagagaaagcccagcgacgaggagttcgccagcagaaagagcaccgccgccctggaggaggacgcccagatcctgaaggtgatcgaggcctactgcaccagcgccaagaccagacagaccctgaacagcacctggcagggcaccgacctgatgcacaaccacgtgctggccgacgacgaccagcccagcctggacagcctgggcagaagaagcagcctgagcagactggagcccagcgacctgagcgaggacagcgactacgacagcatctggaccgcccacagctacagaatgggcagcaccagcagaaagagctgctgcagctacatcagccaccagaactag

SEQ ID NO: 12705 - DNA, 1941 bp, synthetic construct
  misc_feature 1..1941: note = Description of Artificial Sequence: Synthetic coding sequence
  source 1..1941: mol_type = other DNA
atgaccgacaacagcaacaaccagctggtggtgagagccaagttcaacttccagcagaccaacgaggacgagctgagcttcagcaagggcgacgtgatccacgtgaccagagtggaggagggcggctggtgggagggcaccctgaacggcagaaccggctggttccccagcaactacgtgagagaggtgaaggccagcgagaagcccgtgagccccaagagcggcaccctgaagagcccccccaagggcttcgacaccaccgccatcaacaagagctactacaacgtggtgctgcagaacatcctggagaccgagaacgagtacagcaaggagctgcagaccgtgctgagcacctacctgagacccctgcagaccagcgagaagctgagcagcgccaacatcagctacctgatgggcaacctggaggagatctgcagcttccagcagatgctggtgcagagcctggaggagtgcaccaagctgcccgaggcccagcagagagtgggcggctgcttcctgaacctgatgccccagatgaagaccctgtacctgacctactgcgccaaccaccccagcgccgtgaacgtgctgaccgagcacagcgaggagctgggcgagttcatggagaccaagggcgccagcagccccggcatcctggtgctgaccaccggcctgagcaagcccttcatgagactggacaagtaccccaccctgctgaaggagctggagagacacatggaggactaccacaccgacagacaggacatccagaagagcatggccgccttcaagaacctgagcgcccagtgccaggaggtgagaaagagaaaggagctggagctgcagatcctgaccgaggccatcagaaactgggagggcgacgacatcaagaccctgggcaacgtgacctacatgagccaggtgctgatccagtgcgccggcagcgaggagaagaacgagagatacctgctgctgttccccaacgtgctgctgatgctgagcgccagccccagaatgagcggcttcatctaccagggcaagctgcccaccaccggcatgaccatcaccaagctggaggacagcgagaaccacagaaacgccttcgagatcagcggcagcatgatcgagagaatcctggtgagctgcaacaaccagcaggacctgcaggagtgggtggagcacctgcagaagcagaccaaggtgaccagcgtgggcaaccccaccatcaagccccacagcgtgcccagccacaccctgcccagccaccccgtgacccccagcagcaagcacgccgacagcaagcccgcccccctgacccccgcctaccacaccctgccccaccccagccaccacggcaccccccacaccaccatcaactggggccccctggagccccccaagacccccaagccctggagcctgagctgcctgagacccgccccccccctgagacccagcgccgccctgtgctacaaggaggacctgagcaagagccccaagaccatgaagaagctgctgcccaagagaaagcccgagagaaagcccagcgacgaggagttcgccagcagaaagagcaccgccgccctggaggaggacgcccagatcctgaaggtgatcgaggcctactgcaccagcgccaagaccagacagaccctgaacagcagcagcagaaaggagagcgccccccaggtgctgctgcccgaggaggagaagatcatcgtggaggagaccaagagcaacggccagaccgtgatcgaggagaagagcctggtggacaccgtgtacgccctgaaggacgaggtgcaggagctgagacaggacaacaagaagatgaagaagagcctggaggaggagcagagagccagaaaggacctggagaagctggtgagaaaggtgctgaagaacatgaacgaccccgcctgggacgagaccaacctgtag

SEQ ID NO: 12706 - DNA, 2166 bp, synthetic construct
  misc_feature 1..2166: note = Description of Artificial Sequence: Synthetic coding sequence
  source 1..2166: mol_type = other DNA
atgaagaccttcgacgccaacgacctgtaccagggccagaacttcaacaaggtgctgagcagcctggtgaccctgaacaaggtgaccgccgacatcggcctgggcagcgacagcgtgtgcgccagacccagcagccacagaatcaagagcttcgacagcctgggcagccagagcctgcacaccagaaccagcaagctgttccagggccagtacagaagcctggacatgaccgacaacagcaacaaccagctggtggtgagagccaagttcaacttccagcagaccaacgaggacgagctgagcttcagcaagggcgacgtgatccacgtgaccagagtggaggagggcggctggtgggagggcaccctgaacggcagaaccggctggttccccagcaactacgtgagagaggtgaaggccagcgagaagcccgtgagccccaagagcggcaccctgaagagcccccccaagggcttcgacaccaccgccatcaacaagagctactacaacgtggtgctgcagaacatcctggagaccgagaacgagtacagcaaggagctgcagaccgtgctgagcacctacctgagacccctgcagaccagcgagaagctgagcagcgccaacatcagctacctgatgggcaacctggaggagatctgcagcttccagcagatgctggtgcagagcctggaggagtgcaccaagctgcccgaggcccagcagagagtgggcggctgcttcctgaacctgatgccccagatgaagaccctgtacctgacctactgcgccaaccaccccagcgccgtgaacgtgctgaccgagcacagcgaggagctgggcgagttcatggagaccaagggcgccagcagccccggcatcctggtgctgaccaccggcctgagcaagcccttcatgagactggacaagtaccccaccctgctgaaggagctggagagacacatggaggactaccacaccgacagacaggacatccagaagagcatggccgccttcaagaacctgagcgcccagtgccaggaggtgagaaagagaaaggagctggagctgcagatcctgaccgaggccatcagaaactgggagggcgacgacatcaagaccctgggcaacgtgacctacatgagccaggtgctgatccagtgcgccggcagcgaggagaagaacgagagatacctgctgctgttccccaacgtgctgctgatgctgagcgccagccccagaatgagcggcttcatctaccagggcaagctgcccaccaccggcatgaccatcaccaagctggaggacagcgagaaccacagaaacgccttcgagatcagcggcagcatgatcgagagaatcctggtgagctgcaacaaccagcaggacctgcaggagtgggtggagcacctgcagaagcagaccaaggtgaccagcgtgggcaaccccaccatcaagccccacagcgtgcccagccacaccctgcccagccaccccgtgacccccagcagcaagcacgccgacagcaagcccgcccccctgacccccgcctaccacaccctgccccaccccagccaccacggcaccccccacaccaccatcaactggggccccctggagccccccaagacccccaagccctggagcctgagctgcctgagacccgccccccccctgagacccagcgccgccctgtgctacaaggaggacctgagcaagagccccaagaccatgaagaagctgctgcccaagagaaagcccgagagaaagcccagcgacgaggagttcgccagcagaaagagcaccgccgccctggaggaggacgcccagatcctgaaggtgatcgaggcctactgcaccagcgccaagaccagacagaccctgaacagcagcagcagaaaggagagcgccccccaggtgctgctgcccgaggaggagaagatcatcgtggaggagaccaagagcaacggccagaccgtgatcgaggagaagagcctggtggacaccgtgtacgccctgaaggacgaggtgcaggagctgagacaggacaacaagaagatgaagaagagcctggaggaggagcagagagccagaaaggacctggagaagctggtgagaaaggtgctgaagaacatgaacgaccccgcctgggacgagaccaacctgtag

SEQ ID NO: 12707 - DNA, 2262 bp, synthetic construct
  misc_feature 1..2262: note = Description of Artificial Sequence: Synthetic coding sequence
  source 1..2262: mol_type = other DNA
atgaacagcgccgagcagaccgtgacctggctgatcaccctgggcgtgctggagagccccaagaagaccatcagcgaccccgagggcttcctgcaggccagcctgaaggacggcgtggtgctgtgcagactgctggagagactgctgcccggcaccatcgagaagaccttcgacgccaacgacctgtaccagggccagaacttcaacaaggtgctgagcagcctggtgaccctgaacaaggtgaccgccgacatcggcctgggcagcgacagcgtgtgcgccagacccagcagccacagaatcaagagcttcgacagcctgggcagccagagcctgcacaccagaaccagcaagctgttccagggccagtacagaagcctggacatgaccgacaacagcaacaaccagctggtggtgagagccaagttcaacttccagcagaccaacgaggacgagctgagcttcagcaagggcgacgtgatccacgtgaccagagtggaggagggcggctggtgggagggcaccctgaacggcagaaccggctggttccccagcaactacgtgagagaggtgaaggccagcgagaagcccgtgagccccaagagcggcaccctgaagagcccccccaagggcttcgacaccaccgccatcaacaagagctactacaacgtggtgctgcagaacatcctggagaccgagaacgagtacagcaaggagctgcagaccgtgctgagcacctacctgagacccctgcagaccagcgagaagctgagcagcgccaacatcagctacctgatgggcaacctggaggagatctgcagcttccagcagatgctggtgcagagcctggaggagtgcaccaagctgcccgaggcccagcagagagtgggcggctgcttcctgaacctgatgccccagatgaagaccctgtacctgacctactgcgccaaccaccccagcgccgtgaacgtgctgaccgagcacagcgaggagctgggcgagttcatggagaccaagggcgccagcagccccggcatcctggtgctgaccaccggcctgagcaagcccttcatgagactggacaagtaccccaccctgctgaaggagctggagagacacatggaggactaccacaccgacagacaggacatccagaagagcatggccgccttcaagaacctgagcgcccagtgccaggaggtgagaaagagaaaggagctggagctgcagatcctgaccgaggccatcagaaactgggagggcgacgacatcaagaccctgggcaacgtgacctacatgagccaggtgctgatccagtgcgccggcagcgaggagaagaacgagagatacctgctgctgttccccaacgtgctgctgatgctgagcgccagccccagaatgagcggcttcatctaccagggcaagctgcccaccaccggcatgaccatcaccaagctggaggacagcgagaaccacagaaacgccttcgagatcagcggcagcatgatcgagagaatcctggtgagctgcaacaaccagcaggacctgcaggagtgggtggagcacctgcagaagcagaccaaggtgaccagcgtgggcaaccccaccatcaagccccacagcgtgcccagccacaccctgcccagccaccccgtgacccccagcagcaagcacgccgacagcaagcccgcccccctgacccccgcctaccacaccctgccccaccccagccaccacggcaccccccacaccaccatcaactggggccccctggagccccccaagacccccaagccctggagcctgagctgcctgagacccgccccccccctgagacccagcgccgccctgtgctacaaggaggacctgagcaagagccccaagaccatgaagaagctgctgcccaagagaaagcccgagagaaagcccagcgacgaggagttcgccagcagaaagagcaccgccgccctggaggaggacgcccagatcctgaaggtgatcgaggcctactgcaccagcgccaagaccagacagaccctgaacagcacctggcagggcaccgacctgatgcacaaccacgtgctggccgacgacgaccagcccagcctggacagcctgggcagaagaagcagcctgagcagactggagcccagcgacctgagcgaggacagcgactacgacagcatctggaccgcccacagctacagaatgggcagcaccagcagaaagagctgctgcagctacatcagccaccagaactag

SEQ ID NO: 12708 - DNA, 2412 bp, synthetic construct
  misc_feature 1..2412: note = Description of Artificial Sequence: Synthetic coding sequence
  source 1..2412: mol_type = other DNA
atgaacagcgccgagcagaccgtgacctggctgatcaccctgggcgtgctggagagccccaagaagaccatcagcgaccccgagggcttcctgcaggccagcctgaaggacggcgtggtgctgtgcagactgctggagagactgctgcccggcaccatcgagaaggtgtaccccgagcccagaagcgagagcgagtgcctgagcaacatcagagagttcctgagaggctgcggcgccagcctgagactggagctgctgttcccccccagccagcccccccagcacctggtgaccaccatcctgctgagcgccagcaccttcgacgccaacgacctgtaccagggccagaacttcaacaaggtgctgagcagcctggtgaccctgaacaaggtgaccgccgacatcggcctgggcagcgacagcgtgtgcgccagacccagcagccacagaatcaagagcttcgacagcctgggcagccagagcctgcacaccagaaccagcaagctgttccagggccagtacagaagcctggacatgaccgacaacagcaacaaccagctggtggtgagagccaagttcaacttccagcagaccaacgaggacgagctgagcttcagcaagggcgacgtgatccacgtgaccagagtggaggagggcggctggtgggagggcaccctgaacggcagaaccggctggttccccagcaactacgtgagagaggtgaaggccagcgagaagcccgtgagccccaagagcggcaccctgaagagcccccccaagggcttcgacaccaccgccatcaacaagagctactacaacgtggtgctgcagaacatcctggagaccgagaacgagtacagcaaggagctgcagaccgtgctgagcacctacctgagacccctgcagaccagcgagaagctgagcagcgccaacatcagctacctgatgggcaacctggaggagatctgcagcttccagcagatgctggtgcagagcctggaggagtgcaccaagctgcccgaggcccagcagagagtgggcggctgcttcctgaacctgatgccccagatgaagaccctgtacctgacctactgcgccaaccaccccagcgccgtgaacgtgctgaccgagcacagcgaggagctgggcgagttcatggagaccaagggcgccagcagccccggcatcctggtgctgaccaccggcctgagcaagcccttcatgagactggacaagtaccccaccctgctgaaggagctggagagacacatggaggactaccacaccgacagacaggacatccagaagagcatggccgccttcaagaacctgagcgcccagtgccaggaggtgagaaagagaaaggagctggagctgcagatcctgaccgaggccatcagaaactgggagggcgacgacatcaagaccctgggcaacgtgacctacatgagccaggtgctgatccagtgcgccggcagcgaggagaagaacgagagatacctgctgctgttccccaacgtgctgctgatgctgagcgccagccccagaatgagcggcttcatctaccagggcaagctgcccaccaccggcatgaccatcaccaagctggaggacagcgagaaccacagaaacgccttcgagatcagcggcagcatgatcgagagaatcctggtgagctgcaacaaccagcaggacctgcaggagtgggtggagcacctgcagaagcagaccaaggtgaccagcgtgggcaaccccaccatcaagccccacagcgtgcccagccacaccctgcccagccaccccgtgacccccagcagcaagcacgccgacagcaagcccgcccccctgacccccgcctaccacaccctgccccaccccagccaccacggcaccccccacaccaccatcaactggggccccctggagccccccaagacccccaagccctggagcctgagctgcctgagacccgccccccccctgagacccagcgccgccctgtgctacaaggaggacctgagcaagagccccaagaccatgaagaagctgctgcccaagagaaagcccgagagaaagcccagcgacgaggagttcgccagcagaaagagcaccgccgccctggaggaggacgcccagatcctgaaggtgatcgaggcctactgcaccagcgccaagaccagacagaccctgaacagcacctggcagggcaccgacctgatgcacaaccacgtgctggccgacgacgaccagcccagcctggacagcctgggcagaagaagcagcctgagcagactggagcccagcgacctgagcgaggacagcgactacgacagcatctggaccgcccacagctacagaatgggcagcaccagcagaaagagctgctgcagctacatcagccaccagaactag

SEQ ID NO: 12709 - DNA, 1941 bp, synthetic construct; identical to SEQ ID NO: 12705
  misc_feature 1..1941: note = Description of Artificial Sequence: Synthetic coding sequence
  source 1..1941: mol_type = other DNA

SEQ ID NO: 12710 - DNA, 201 bp, synthetic construct
  misc_feature 1..201: note = Description of Artificial Sequence: Synthetic coding sequence
  source 1..201: mol_type = other DNA
atgaccgacaacagcaacaaccagctggtggtgagagccaagttcaacttccagcagaccaacgaggacgagctgagcttcagcaagggcgacgtgatccacgtgaccagagtggaggagggcggctggtgggagggcaccctgaacggcagaaccggctggttccccagcaactacgtgagagaggtgaaggccagctag

SEQ ID NO: 12711 - DNA, 1344 bp, synthetic construct
  misc_feature 1..1344: note = Description of Artificial Sequence: Synthetic coding sequence
  source 1..1344: mol_type = other DNA
atgaccgacaacagcaacaaccagctggtggtgagagccaagttcaacttccagcagaccaacgaggacgagctgagcttcagcaagggcgacgtgatccacgtgaccagagtggaggagggcggctggtgggagggcaccctgaacggcagaaccggctggttccccagcaactacgtgagagaggtgaaggccagcgagaagcccgtgagccccaagagcggcaccctgaagagcccccccaagggcttcgacaccaccgccatcaacaagagctactacaacgtggtgctgcagaacatcctggagaccgagaacgagtacagcaaggagctgcagaccgtgctgagcacctacctgagacccctgcagaccagcgagaagctgagcagcgccaacatcagctacctgatgggcaacctggaggagatctgcagcttccagcagatgctggtgcagagcctggaggagtgcaccaagctgcccgaggcccagcagagagtgggcggctgcttcctgaacctgatgccccagatgaagaccctgtacctgacctactgcgccaaccaccccagcgccgtgaacgtgctgaccgagcacagcgaggagctgggcgagttcatggagaccaagggcgccagcagccccggcatcctggtgctgaccaccggcctgagcaagcccttcatgagactggacaagtaccccaccctgctgaaggagctggagagacacatggaggactaccacaccgacagacaggacatccagaagagcatggccgccttcaagaacctgagcgcccagtgccaggaggtgagaaagagaaaggagctggagctgcagatcctgaccgaggccatcagaaactgggagggcgacgacatcaagaccctgggcaacgtgacctacatgagccaggtgctgatccagtgcgccggcagcgaggagaagaacgagagatacctgctgctgttccccaacgtgctgctgatgctgagcgccagccccagaatgagcggcttcatctaccagggcaagctgcccaccaccggcatgaccatcaccaagctggaggacagcgagaaccacagaaacgccttcgagatcagcggcagcatgatcgagagaatcctggtgagctgcaacaaccagcaggacctgcaggagtgggtggagcacctgcagaagcagaccaaggtgaccagcgtgggcaaccccaccatcaagccccacagcgtgcccagccacaccctgcccagccaccccgtgacccccagcagcaagcacgccgacagcaagcccgcccccctgacccccgcctaccacaccctgccccactag

SEQ ID NO: 12712 - DNA, 186 bp, synthetic construct
  misc_feature 1..186: note = Description of Artificial Sequence: Synthetic coding sequence
  source 1..186: mol_type = other DNA
atgaccgacaacagcaacaaccagctggtggtgagagccaagttcaacttccagcagaccaacgaggacgagctgagcttcagcaagggcgacgtgatccacgtgaccagagtggaggagggcggctggtgggagggcaccctgaacggcagaaccggctggttccccagcaactacgtgagatag

SEQ ID NO: 12713 - DNA, 120 bp, synthetic construct
  misc_feature 1..120: note = Description of Artificial Sequence: Synthetic coding sequence
  source 1..120: mol_type = other DNA
atgaccgacaacagcaacaaccagctggtggtgagagccaagttcaacttccagcagaccaacgaggacgagctgagcttcagcaagggcgacgtgatccacgtgaccagagtggagtag

SEQ ID NO: 12714 - DNA, 546 bp, synthetic construct
  misc_feature 1..546: note = Description of Artificial Sequence: Synthetic coding sequence
  source 1..546: mol_type = other DNA
atgtgcttccccagaagcagcgtgaccaccgacgaccaccagctggacggcatcaagagcaccagagcccccgcccccggctgctgctgctgccccagcgagaccctgagaagcggcgaggtggccagaagcagcgccgagagcagaagactgctgttcaagcccgacgccaccgacgagaaccccgtgccccacgtgctgtgccagagccccttctgcagcgagtgcccccacggcacccaggactaccacaccgacagacaggacatccagaagagcatggccgccttcaagaacctgagcgcccagtgccaggaggtgagaaagagaaaggagctggagctgcagatcctgaccgaggccatcagaaactgggagggcgacgacatcaagaccctgggcaacgtgacctacatgagccaggtgctgatccagtgcgccggcagcgaggagaagaacgagagatacctgctgctgttccccaacgtgctgctgatgctgagcgccagccccagaatgagcggcttcatctaccagggcgcctag

SEQ ID NO: 12715 - DNA, 2070 bp, synthetic construct
  misc_feature 1..2070: note = Description of Artificial Sequence: Synthetic coding sequence
  source 1..2070: mol_type = other DNA
atcccccccagcaagcccctgagaggcagcagcctgtggggctgctggagcagacccaagaccatcagcgaccccgagggcttcctgcaggccagcctgaaggacggcgtggtgctgtgcagactgctggagagactgctgcccggcaccatcgagaaggtgtaccccgagcccagaagcgagagcgagtgcctgagcaacatcagagagttcctgagaggctgcggcgccagcctgagactggagaccttcgacgccaacgacctgtaccagggccagaacttcaacaaggtgctgagcagcctggtgaccctgaacaaggtgaccgccgacatcggcctgggcagcgacagcgtgtgcgccagacccagcagccacagaatcaagagcttcgacagcctgggcagccagagcctgcacaccagaaccagcaagctgttccagggccagtacagaagcctggacatgaccgacaacagcaacaaccagctggtggtgagagccaagttcaacttccagcagaccaacgaggacgagctgagcttcagcaagggcgacgtgatccacgtgaccagagtggaggagggcggctggtgggagggcaccctgaacggcagaaccggctggttccccagcaactacgtgagagaggtgaaggccagcgagaagcccgtgagccccaagagcggcaccctgaagagcccccccaagggcttcgacaccaccgccatcaacaagagctactacaacgtggtgctgcagaacatcctggagaccgagaacgagtacagcaaggagctgcagaccgtgctgagcacctacctgagacccctgcagaccagcgagaagctgagcagcgccaacatcagctacctgatgggcaacctggaggagatctgcagcttccagcagatgctggtgcagagcctggaggagtgcaccaagctgcccgaggcccagcagagagtgggcggctgcttcctgaacctgatgccccagatgaagaccctgtacctgacctactgcgccaaccaccccagcgccgtgaacgtgctgaccgagcacagcgaggagctgggcgagttcatggagaccaagggcgccagcagccccggcatcctggtgctgaccaccggcctgagcaagcccttcatgagactggacaagtaccccaccctgctgaaggagctggagagacacatggaggactaccacaccgacagacaggacatccagaagagcatggccgccttcaagaacctgagcgcccagtgccaggaggtgagaaagagaaaggagctggagctgcagatcctgaccgaggccatcagaaactgggagggcgacgacatcaagaccctgggcaacgtgacctacatgagccaggtgctgatccagtgcgccggcagcgaggagaagaacgagagatacctgctgctgttccccaacgtgctgctgatgctgagcgccagccccagaatgagcggcttcatctaccagggcaagctgcccaccaccggcatgaccatcaccaagctggaggacagcgagaaccacagaaacgccttcgagatcagcggcagcatgatcgagagaatcctggtgagctgcaacaaccagcaggacctgcaggagtgggtggagcacctgcagaagcagaccaaggtgaccagcgtgggcaaccccaccatcaagccccacagcgtgcccagccacaccctgcccagccaccccgtgacccccagcagcaagcacgccgacagcaagcccgcccccctgacccccgcctaccacaccctgccccaccccagccaccacggcaccccccacaccaccatcaactggggccccctggagccccccaagacccccaagccctggagcctgagctgcctgagacccgccccccccctgagacccagcgccgccctgtgctacaaggaggacctgagcaagagccccaagaccatgaagaagctgctgcccaagagaaagcccgagagaaagcccatgagaagcagcagacccggcaaggcccagctgctgtggaagaagatgctgagattctag

SEQ ID NO: 12716 - DNA, 4065 bp, synthetic construct
  misc_feature 1..4065: note = Description of Artificial Sequence: Synthetic coding sequence
  source 1..4065: mol_type = other DNA
atgagcaccggcgacagcttcgagaccagattcgagaagatggacaacctgctgagagaccccaagagcgaggtgaacagcgactgcctgctggacggcctggacgccctggtgtacgacctggacttccccgccctgagaaagaacaagaacatcgacaacttcctgagcagatacaaggacaccatcaacaagatcagagacctgagaatgaaggccgaggactacgaggtggtgaaggtgatcggcagaggcgccttcggcgaggtgcagctggtgagacacaagagcaccagaaaggtgtacgccatgaagctgctgagcaagttcgagatgatcaagagaagcgacagcgccttcttctgggaggagagagacatcatggccttcgccaacagcccctgggtggtgcagctgttctacgccttccaggacgacagatacctgtacatggtgatggagtacatgcccggcggcgacctggtgaacctgatgagcaactacgacgtgcccgagaagtgggccagattctacaccgccgaggtggtgctggccctggacgccatccacagcatgggcttcatccacagagacgtgaagcccgacaacatgctgctggacaagagcggccacctgaagctggccgacttcggcacctgcatgaagatgaacaaggagggcatggtgagatgcgacaccgccgtgggcacccccgactacatcagccccgaggtgctgaagagccagggcggcgacggctactacggcagagagtgcgactggtggagcgtgggcgtgttcctgtacgagatgctggtgggcgacacccccttctacgccgacagcctggtgggcacctacagcaagatcatgaaccacaagaacagcctgaccttccccgacgacaacgacatcagcaaggaggccaagaacctgatctgcgccttcctgaccgacagagaggtgagactgggcagaaacggcgtggaggagatcaagagacacctgttcttcaagaacgaccagtgggcctgggagaccctgagagacaccgtggcccccgtggtgcccgacctgagcagcgacatcgacaccagcaacttcgacgacctggaggaggacaagggcgaggaggagaccttccccatccccaaggccttcgtgggcaaccagctgcccttcgtgggcttcacctactacagcaacagaagatacctgagcagcgccaaccccaacgacaacagaaccagcagcaacgccgacaagagcctgcaggagagcctgcagaagaccatctacaagctggaggagcagctgcacaacgagatgcagctgaaggacgagatggagcagaagtgcagaaccagcaacatcaagctggacaagatcatgaaggagctggacgaggagggcaaccagagaagaaacctggagagcaccgtgagccagatcgagaaggagaagatgctgctgcagcacagaatcaacgagtaccagagaaaggccgagcaggagaacgagaagagaagaaacgtggagaacgaggtgagcaccctgaaggaccagctggaggacctgaagaaggtgagccagaacagccagctggccaacgagaagctgagccagctgcagaagcagctggaggaggccaacgacctgctgagaaccgagagcgacaccgccgtgagactgagaaagagccacaccgagatgagcaagagcatcagccagctggagagcctgaacagagagctgcaggagagaaacagaatcctggagaacagcaagagccagaccgacaaggactactaccagctgcaggccatcctggaggccgagagaagagacagaggccacgacagcgagatgatcggcgacctgcaggccagaatcaccagcctgcaggaggaggtgaagcacctgaagcacaacctggagaaggtggagggcgagagaaaggaggcccaggacatgctgaaccacagcgagaaggagaagaacaacctggagatcgacctgaactacaagctgaagagcctgcagcagagactggagcaggaggtgaacgagcacaaggtgaccaaggccagactgaccgacaagcaccagagcatcgaggaggccaagagcgtggccatgtgcgagatggagaagaagctgaaggaggagagagaggccagagagaaggccgagaacagagtggtgcagatcgagaagcagtgcagcatgctggacgtggacctgaagcagagccagcagaagctggagcacctgaccggcaacaaggagagaatggaggacgaggtgaagaacctgaccctgcagctggagcaggagagcaacaagagactgctgctgcagaacgagctgaagacccaggccttcgaggccgacaacctgaagggcctggagaagcagatgaagcaggagatcaacaccctgctggaggccaagagactgctggagttcgagctggcccagctgaccaagcagtacagaggcaacgagggccagatgagagagctgcaggaccagctggaggccgagcagtacttcagcaccctgtacaagacccaggtgaaggagctgaaggaggagatcgaggagaagaacagagagaacctgaagaagatccaggagctgcagaacgagaaggagaccctggccacccagctggacctggccgagaccaaggccgagagcgagcagctggccagaggcctgctggaggagcagtacttcgagctgacccaggagagcaagaaggccgccagcagaaacagacaggagatcaccgacaaggaccacaccgtgagcagactggaggaggccaacagcatgctgaccaaggacatcgagatcctgagaagagagaacgaggagctgaccgagaagatgaagaaggccgaggaggagtacaagctggagaaggaggaggagatcagcaacctgaaggccgccttcgagaagaacatcaacaccgagagaaccctgaagacccaggccgtgaacaagctggccgagatcatgaacagaaaggacttcaagatcgacagaaagaaggccaacacccaggacctgagaaagaaggagaaggagaacagaaagctgcagctggagctgaaccaggagagagagaagttcaaccagatggtggtgaagcaccagaaggagctgaacgacatgcaggcccagctggtggaggagtgcgcccacagaaacgagctgcagatgcagctggccagcaaggagagcgacatcgagcagctgagagccaagctgctggacctgagcgacagcaccagcgtggccagcttccccagcgccgacgagaccgacggcaacctgcccgagagcagaatcgagggctggctgagcgtgcccaacagaggcaacatcaagagatacggctggaagaagcagtacgtggtggtgagcagcaagaagatcctgttctacaacgacgagcaggacaaggagcagagcaaccccagcatggtgctggacatcgacaagctgttccacgtgagacccgtgacccagggcgacgtgtacagagccgagaccgaggagatccccaagatcttccagatcctgtacgccaacgagggcgagtgcagaaaggacgtggagatggagcccgtgcagcaggccgagaagaccaacttccagaaccacaagggccacgagttcatccccaccctgtaccacttccccgccaactgcgacgcctgcgccaagcccctgtggcacgtgttcaagcccccccccgccctggagtgcagaagatgccacgtgaagtgccacagagaccacctggacaagaaggaggacctgatctgcccctgcaaggtgagctacgacgtgaccagcgccagagacatgctgctgctggcctgcagccaggacgagcagaagaagtgggtgacccacctggtgaagaagatccccaagaacccccccagcggcttcgtgagagccagccccagaaccctgagcaccagaagcaccgccaaccagagcttcagaaaggtggtgaagaacaccagcggcaagaccagctag

SEQ ID NO: 12717 - DNA, 471 bp, synthetic construct
  misc_feature 1..471: note = Description of Artificial Sequence: Synthetic coding sequence
  source 1..471: mol_type = other DNA
atggcccccgccagagccggcttctgccccctgctgctgctgctgctgctgggcctgtgggtggccgagatccccgtgagcgccaagcccaagggcatgaccagcagccagtggttcaagatccagcacatgcagcccagcccccaggcctgcaacagcgccatgaagaacatcaacaagcacaccaagagatgcaaggacctgaacaccttcctgcacgagcccttcagcagcgtggccgccacctgccagacccccaagatcgcctgcaagaacggcgacaagaactgccaccagagccacggcgccgtgagcctgaccatgtgcaagctgaccagcggcaagcaccccaactgcagatacaaggagaagagacagaacaagagctacgtggtggcctgcaagcccccccagaagaaggacagccagcagttccacctggtgcccgtgcacctggacagagtgctgtag

SEQ ID NO: 12718 - DNA, 471 bp, synthetic construct; identical to SEQ ID NO: 12717
  misc_feature 1..471: note = Description of Artificial Sequence: Synthetic coding sequence
  source 1..471: mol_type = other DNA

SEQ ID NO: 12719 - DNA, 831 bp, synthetic construct
  misc_feature 1..831: note = Description of Artificial Sequence: Synthetic coding sequence
  source 1..831: mol_type = other DNA
atgctgcagcaggacagcaacgacgacaccgaggacgtgagcctgttcgacgccgaggaggagaccaccaacagacccagaaaggccaagatcagacaccccgtggccagcttcttccacctgttcttcagagtgagcgccatcatcgtgtgcctgctgtgcgagctgctgagcagcagcttcatcacctgcatggtgaccatcatcctgctgctgagctgcgacttctgggccgtgaagaacgtgaccggcagactgatggtgggcctgagatggtggaaccacatcgacgaggacggcaagagccactgggtgttcgagagcagaaaggagagcagccaggagaacaagaccgtgagcgaggccgagagcagaatcttctggctgggcctgatcgcctgcagcgtgctgtgggtgatcttcgccttcagcgccctgttcagcttcaccgtgaagtggctgagaagaagcagacacatcgcccagaccggcctgaaggtgctgggcagcagagacccccccgccagcgccttccagagcgccggcatcaccggcgtgagcagatgccccggccaccccagcagaaagttccaccaggtggacatcaacagcttcaccagaatcaccgacagagccctgtactggaagcccgcccccagactgagcagcccccccctgagagccgcccccggcaactgccagcagatggcccccgccagactgttcctgagcctgagactgtgggcctggagaggcggcggcgagagccccaacagcagaggcaccggcgagcccggccccaagttccacctggccagcggcatgcactag

SEQ ID NO: 12720 - DNA, 1419 bp, synthetic construct
  misc_feature 1..1419: note = Description of Artificial Sequence: Synthetic coding sequence
  source 1..1419: mol_type = other DNA
atggaccacggcggcgtgggcccctacgagctgggcatggagcactgcgagaagttcgagatcagcgagaccagcgtgaacagaggccccgagaagatcagacccgagtgcttcgagctgctgagagtgctgggcaagggcggctacggcaaggtgttccaggtgagaaaggtgaccggcgccaacaccggcaagatcttcgccatgaaggtgctgaagaaggccatgatcgtgagaaacgccaaggacaccgcccacaccaaggccgagagaaacatcctggaggaggtgaagcaccccttcatcgtggacctgatctacgccttccagaccggcggcaagctgtacctgatcctggagtacctgagcggcggcgagctgttcatgcagctggagagagagggcatcttcatggaggacaccgcctgcttctacctggccgagatcagcatggccctgggccacctgcaccagaagggcatcatctacagagacctgaagcccgagaacatcatgctgaaccaccagggccacgtgaagctgaccgacttcggcctgtgcaaggagagcatccacgacggcaccgtgacccacaccttctgcggcaccatcgagtacatggcccccgagatcctgatgagaagcggccacaacagagccgtggactggtggagcctgggcgccctgatgtacgacatgctgaccggcgccccccccttcaccggcgagaacagaaagaagaccatcgacaagatcctgaagtgcaagctgaacctgcccccctacctgacccaggaggccagagacctgctgaagaagctgctgaagagaaacgccgccagcagactgggcgccggccccggcgacgccggcgaggtgcaggcccaccccttcttcagacacatcaactgggaggagctgctggccagaaaggtggagccccccttcaagcccctgctgcagagcgaggaggacgtgagccagttcgacagcaagttcaccagacagacccccgtggacagccccgacgacagcaccctgagcgagagcgccaaccaggtgttcctgggcttcacctacgtggcccccagcgtgctggagagcgtgaaggagaagttcagcttcgagcccaagatcagaagccccagaagattcatcggcagccccagaacccccgtgagccccgtgaagttcagccccggcgacttctggggcagaggcgccagcgccagcaccgccaacccccagacccccgtggagtaccccatggagaccagcggcatcgagcagatggacgtgaccatgagcggcgaggccagcgcccccctgcccatcagacagcccaacagcggcccctacaagaagcaggccttccccatgatcagcaagagacccgagcacctgagaatgaacctgtag

SEQ ID NO: 12721 - DNA, 1356 bp, synthetic construct
  misc_feature 1..1356: note = Description of Artificial Sequence: Synthetic coding sequence
  source 1..1356: mol_type = other DNA
atgagaagaagaagaagaagagacggcttctaccccgcccccgacttcagagacagagaggccgaggacatggccggcgtgttcgacatcgacctggaccagcccgaggacgccggcagcgaggacgagctggaggagggcggccagctgaacgagagcatggaccacggcggcgtgggcccctacgagctgggcatggagcactgcgagaagttcgagatcagcgagaccagcgtgaacagaggccccgagaagatcagacccgagtgcttcgagctgctgagagtgctgggcaagggcggctacggcaaggtgttccaggtgagaaaggtgaccggcgccaacaccggcaagatcttcgccatgaaggtgctgaagaaggccatgatcgtgagaaacgccaaggacaccgcccacaccaaggccgagagaaacatcctggaggaggtgaagcaccccttcatcgtggacctgatctacgccttccagaccggcggcaagctgtacctgatcctggagtacctgagcggcggcgagctgttcatgcagctggagagagagggcatcttcatggaggacaccgcctgcttctacctggccgagatcagcatggccctgggccacctgcaccagaagggcatcatctacagagacctgaagcccgagaacatcatgctgaaccaccagggccacgtgaagctgaccgacttcggcctgtgcaaggagagcatccacgacggcaccgtgacccacaccttctgcggcaccatcgagtacatggcccccgagatcctgatgagaagcggccacaacagagccgtggactggtggagcctgggcgccctgatgtacgacatgctgaccggcgccccccccttcaccggcgagaacagaaagaagaccatcgacaagatcctgaagtgcaagctgaacctgcccccctacctgacccaggaggccagagacctgctgaagaagctgctgaagagaaacgccgccagcagactgggcgccggccccggcgacgccggcgaggtgcaggcccaccccttcttcagacacatcaactgggaggagctgctggccagaaaggtggagccccccttcaagcccctgctgcagagcgaggaggacgtgagccagttcgacagcaagttcaccagacagacccccgtggacagccccgacgacagcaccctgagcgagagcgccaaccaggtgttcctgggcttcacctacgtggcccccagcgtgctggagagcgtgaaggagaagttcagcttcgagcccaagatcagaagccccagaagattcatcggcagccccagaacccccgtgagcaccgccatgtgctag

SEQ ID NO: 12722 - DNA, 1509 bp, synthetic construct
  misc_feature 1..1509: note = Description of Artificial Sequence: Synthetic coding sequence
  source 1..1509: mol_type = other DNA
atgagaagaagaagaagaagagacggcttctaccccgcccccgacttcagagacagagaggccgaggacatggccggcgtgttcgacatcgacctggaccagcccgaggacgccggcagcgaggacgagctggaggagggcggccagctgaacgagagcatggaccacggcggcgtgggcccctacgagctgggcatggagcactgcgagaagttcgagatcagcgagaccagcgtgaacagaggccccgagaagatcagacccgagtgcttcgagctgctgagagtgctgggcaagggcggctacggcaaggccatgatcgtgagaaacgccaaggacaccgcccacaccaaggccgagagaaacatcctggaggaggtgaagcaccccttcatcgtggacctgatctacgccttccagaccggcggcaagctgtacctgatcctggagtacctgagcggcggcgagctgttcatgcagctggagagagagggcatcttcatggaggacaccgcctgcttctacctggccgagatcagcatggccctgggccacctgcaccagaagggcatcatctacagagacctgaagcccgagaacatcatgctgaaccaccagggccacgtgaagctgaccgacttcggcctgtgcaaggagagcatccacgacggcaccgtgacccacaccttctgcggcaccatcgagtacatggcccccgagatcctgatgagaagcggccacaacagagccgtggactggtggagcctgggcgccctgatgtacgacatgctgaccggcgccccccccttcaccggcgagaacagaaagaagaccatcgacaagatcctgaagtgcaagctgaacctgcccccctacctgacccaggaggccagagacctgctgaagaagctgctgaagagaaacgccgccagcagactgggcgccggccccggcgacgccggcgaggtgcaggcccaccccttcttcagacacatcaactgggaggagctgctggccagaaaggtggagccccccttcaagcccctgctgcagagcgaggaggacgtgagccagttcgacagcaagttcaccagacagacccccgtggacagccccgacgacagcaccctgagcgagagcgccaaccaggtgttcctgggcttcacctacgtggcccccagcgtgctggagagcgtgaaggagaagttcagcttcgagcccaagatcagaagccccagaagattcatcggcagccccagaacccccgtgagccccgtgaagttcagccccggcgacttctggggcagaggcgccagcgccagcaccgccaacccccagacccccgtggagtaccccatggagaccagcggcatcgagcagatggacgtgaccatgagcggcgaggccagcgcccccctgcccatcagacagcccaacagcggcccctacaagaagcaggccttccccatgatcagcaagagacccgagcacctgagaatgaacctgtag

SEQ ID NO: 12723 - DNA, 1932 bp, synthetic construct
  misc_feature 1..1932: note = Description of Artificial Sequence: Synthetic coding sequence
  source 1..1932: mol_type = other DNA
atgaaggtgctgaagaaggccaccctgaaggtgagagacagagtgagaaccaagatggagagagacatcctggccgacgtgaaccaccccttcgtggtgaagctgcactacgccttccagaccgagggcaagctgtacctgatcctggacttcctgagaggcggcgacctgttcaccagactgagcaaggaggtgatgttcaccgaggaggacgtgaagttctacctggccgagctggccctgggcctggaccacctgcacagcctgggcatcatctacagagacctgaagcccgagaacatcctgctggacgaggagggccacatcaagctgaccgacttcggcctgagcaaggaggccatcgaccacgagaagaaggcctacagcttctgcggcaccgtggagtacatggcccccgaggtggtgaacagacagggccacagccacagcgccgactggtggagctacggcgtgctgatgttcgagatgctgaccggcagcctgcccttccagggcaaggacagaaaggagaccatgaccctgatcctgaaggccaagctgggcatgccccagttcctgagcaccgaggcccagagcctgctgagagccctgttcaagagaaaccccgccaacagactgggcagcggccccgacggcgccgaggagatcaagagacacgtgttctacagcaccatcgactggaacaagctgtacagaagagagatcaagccccccttcaagcccgccgtggcccagcccgacgacaccttctacttcgacaccgagttcaccagcagaacccccaaggacagccccggcatcccccccagcgccggcgcccaccagctgttcagaggcttcagcttcgtggccaccggcctgatggaggacgacggcaagcccagagccccccaggcccccctgcacagcgtggtgcagcagctgcacggcaagaacctggtgttcagcgacggctacgtggtgaaggagaccatcggcgtgggcagctacagcgagtgcaagagatgcgtgcacaaggccaccaacatggagtacgccgtgaaggtgatcgacaagagcaagagagaccccagcgaggagatcgagatcctgctgagatacggccagcaccccaacatcatcaccctgaaggacgtgtacgacgacggcaagcacgtgtacctggtgaccgagctgatgagaggcggcgagctgctggacaagatcctgagacagaagttcttcagcgagagagaggccagcttcgtgctgcacaccatcggcaagaccgtggagtacctgcacagccagggcgtggtgcacagagacctgaagcccagcaacatcctgtacgtggacgagagcggcaaccccgagtgcctgagaatctgcgacttcggcttcgccaagcagctgagagccgagaacggcctgctgatgaccccctgctacaccgccaacttcgtggcccccgaggtgctgaagagacagggctacgacgagggctgcgacatctggagcctgggcatcctgctgtacaccatgctggccggctacacccccttcgccaacggccccagcgacacccccgaggagatcctgaccagaatcggcagcggcaagttcaccctgagcggcggcaactggaacaccgtgagcgagaccgccaaggacctggtgagcaagatgctgcacgtggacccccaccagagactgaccgccaagcaggtgctgcagcacccctgggtgacccagaaggacaagctgccccagagccagctgagccaccaggacctgcagctggtgaagggcgccatggccgccacctacagcgccctgaacagcagcaagcccaccccccagctgaagcccatcgagagcagcatcctggcccagagaagagtgagaaagctgcccagcaccaccctgtag

SEQ ID NO: 12724 - DNA, 687 bp, synthetic construct
  misc_feature 1..687: note = Description of Artificial Sequence: Synthetic coding sequence
  source 1..687: mol_type = other DNA
atgccccagttcctgagcaccgaggcccagagcctgctgagagccctgttcaagagaaaccccgccaacagactgggcagcggccccgacggcgccgaggagatcaagagacacgtgttctacagcaccatcgactggaacaagctgtacagaagagagatcaagccccccttcaagcccgccgtggcccagcccgacgacaccttctacttcgacaccgagttcaccagcagaacccccaaggacagccccggcatcccccccagcgccggcgcccaccagctgttcagaggcttcagcttcgtggccaccggcctgatggaggacgacggcaagcccagagccccccaggcccccctgcacagcgtggtgcaggtgatcgacaagagcaagagagaccccagcgaggagatcgagatcctgctgagatacggccagcaccccaacatcatcaccctgaaggacgtgtacgacgacggcaagcacgtgtacctggtgaccgagctgatgagaggcggcgagctgctggacaagatcctgagacagaagttcttcagcgagagagaggccagcttcgtgctgcacaccatcggcaagaccgtggagtacctgcacagccagggcgtggtgcacagagacctgaagcccagcaacatcctgtacgtggacgagagcggcaacccctag

SEQ ID NO: 12725 - DNA, 2208 bp, synthetic construct
  misc_feature 1..2208: note = Description of Artificial Sequence: Synthetic coding sequence
  source 1..2208: mol_type = other DNA
atgcccctggcccagctgaaggagccctggcccctgatggagctggtgcccctggaccccgagaacggccagaccagcggcgaggaggccggcctgcagcccagcaaggacgagggcgtgctgaaggagatcagcatcacccaccacgtgaaggccggcagcgagaaggccgaccccagccacttcgagctgctgaaggtgctgggccagggcagcttcggcaaggtgttcctggtgagaaaggtgaccagacccgacagcggccacctgtacgccatgaaggtgctgaagaaggccaccctgaaggtgagagacagagtgagaaccaagatggagagagacatcctggccgacgtgaaccaccccttcgtggtgaagctgcactacgccttccagaccgagggcaagctgtacctgatcctggacttcctgagaggcggcgacctgttcaccagactgagcaaggaggtgatgttcaccgaggaggacgtgaagttctacctggccgagctggccctgggcctggaccacctgcacagcctgggcatcatctacagagacctgaagcccgagaacatcctgctggacgaggagggccacatcaagctgaccgacttcggcctgagcaaggaggccatcgaccacgagaagaaggcctacagcttctgcggcaccgtggagtacatggcccccgaggtggtgaacagacagggccacagccacagcgccgactggtggagctacggcgtgctgatgttcgagatgctgaccggcagcctgcccttccagggcaaggacagaaaggagaccatgaccctgatcctgaaggccaagctgggcatgccccagttcctgagcaccgaggcccagagcctgctgagagccctgttcaagagaaaccccgccaacagactgggcagcggccccgacggcgccgaggagatcaagagacacgtgttctacagcaccatcgactggaacaagctgtacagaagagagatcaagccccccttcaagcccgccgtggcccagcccgacgacaccttctacttcgacaccgagttcaccagcagaacccccaaggacagccccggcatcccccccagcgccggcgcccaccagctgttcagaggcttcagcttcgtggccaccggcctgatggaggacgacggcaagcccagagccccccaggcccccctgcacagcgtggtgcagcagctgcacggcaagaacctggtgttcagcgacggctacgtggtgaaggagaccatcggcgtgggcagctacagcgagtgcaagagatgcgtgcacaaggccaccaacatggagtacgccgtgaaggtgatcgacaagagcaagagagaccccagcgaggagatcgagatcctgctgagatacggccagcaccccaacatcatcaccctgaaggacgtgtacgacgacggcaagcacgtgtacctggtgaccgagctgatgagaggcggcgagctgctggacaagatcctgagacagaagttcttcagcgagagagaggccagcttcgtgctgcacaccatcggcaagaccgtggagtacctgcacagccagggcgtggtgcacagagacctgaagcccagcaacatcctgtacgtggacgagagcggcaaccccgagtgcctgagaatctgcgacttcggcttcgccaagcagctgagagccgagaacggcctgctgatgaccccctgctacaccgccaacttcgtggcccccgaggtgctgaagagacagggctacgacgagggctgcgacatctggagcctgggcatcctgctgtacaccatgctggccggctacacccccttcgccaacggccccagcgacacccccgaggagatcctgaccagaatcggcagcggcaagttcaccctgagcggcggcaactggaacaccgtgagcgagaccgccaaggacctggtgagcaagatgctgcacgtggacccccaccagagactgaccgccaagcaggtgctgcagcacccctgggtgacccagaaggacaagctgccccagagccagctgagccaccaggacctgcagctggtgaagggcgccatggccgccacctacagcgccctgaacagcagcaagcccaccccccagctgaagcccatcgagagcagcatcctggcccagagaagagtgagaaagctgcccagcaccaccctgtag

SEQ ID NO: 12726 - DNA, 501 bp, synthetic construct
  misc_feature 1..501: note = Description of Artificial Sequence: Synthetic coding sequence
  source 1..501: mol_type = other DNA
gcccagcccgacgacaccttctacttcgacaccgagttcaccagcagaacccccaaggacagccccggcatcccccccagcgccggcgcccaccagctgttcagaggcttcagcttcgtggccaccggcctgatggaggacgacggcaagcccagagccccccaggcccccctgcacagcgtggtgcaggtgatcgacaagagcaagagagaccccagcgaggagatcgagatcctgctgagatacggccagcaccccaacatcatcaccctgaaggacgtgtacgacgacggcaagcacgtgtacctggtgaccgagctgatgagaggcggcgagctgctggacaagatcctgagacagaagttcttcagcgagagagaggccagcttcgtgctgcacaccatcggcaagaccgtggagtacctgcacagccagggcgtggtgcacagagacctgaagcccagcaacatcctgtacgtggacgagagcggcaacccctag

SEQ ID NO: 12727 - DNA, 2160 bp, synthetic construct
  misc_feature 1..2160: note = Description of Artificial Sequence: Synthetic coding sequence
  source 1..2160: mol_type = other DNA
atgcagacccccgccgacttccccagagtggagagagacctggtgccctgccccagaaaggacgagggcgtgctgaaggagatcagcatcacccaccacgtgaaggccggcagcgagaaggccgaccccagccacttcgagctgctgaaggtgctgggccagggcagcttcggcaaggtgttcctggtgagaaaggtgaccagacccgacagcggccacctgtacgccatgaaggtgctgaagaaggccaccctgaaggtgagagacagagtgagaaccaagatggagagagacatcctggccgacgtgaaccaccccttcgtggtgaagctgcactacgccttccagaccgagggcaagctgtacctgatcctggacttcctgagaggcggcgacctgttcaccagactgagcaaggaggtgatgttcaccgaggaggacgtgaagttctacctggccgagctggccctgggcctggaccacctgcacagcctgggcatcatctacagagacctgaagcccgagaacatcctgctggacgaggagggccacatcaagctgaccgacttcggcctgagcaaggaggccatcgaccacgagaagaaggcctacagcttctgcggcaccgtggagtacatggcccccgaggtggtgaacagacagggccacagccacagcgccgactggtggagctacggcgtgctgatgttcgagatgctgaccggcagcctgcccttccagggcaaggacagaaaggagaccatgaccctgatcctgaaggccaagctgggcatgccccagttcctgagcaccgaggcccagagcctgctgagagccctgttcaagagaaaccccgccaacagactgggcagcggccccgacggcgccgaggagatcaagagacacgtgttctacagcaccatcgactggaacaagctgtacagaagagagatcaagccccccttcaagcccgccgtggcccagcccgacgacaccttctacttcgacaccgagttcaccagcagaacccccaaggacagccccggcatcccccccagcgccggcgcccaccagctgttcagaggcttcagcttcgtggccaccggcctgatggaggacgacggcaagcccagagccccccaggcccccctgcacagcgtggtgcagcagctgcacggcaagaacctggtgttcagcgacggctacgtggtgaaggagaccatcggcgtgggcagctacagcgagtgcaagagatgcgtgcacaaggccaccaacatggagtacgccgtgaaggtgatcgacaagagcaagagagaccccagcgaggagatcgagatcctgctgagatacggccagcaccccaacatcatcaccctgaaggacgtgtacgacgacggcaagcacgtgtacctggtgaccgagctgatgagaggcggcgagctgctggacaagatcctgagacagaagttcttcagcgagagagaggccagcttcgtgctgcacaccatcggcaagaccgtggagtacctgcacagccagggcgtggtgcacagagacctgaagcccagcaacatcctgtacgtggacgagagcggcaaccccgagtgcctgagaatctgcgacttcggcttcgccaagcagctgagagccgagaacggcctgctgatgaccccctgctacaccgccaacttcgtggcccccgaggtgctgaagagacagggctacgacgagggctgcgacatctggagcctgggcatcctgctgtacaccatgctggccggctacacccccttcgccaacggccccagcgacacccccgaggagatcctgaccagaatcggcagcggcaagttcaccctgagcggcggcaactggaacaccgtgagcgagaccgccaaggacctggtgagcaagatgctgcacgtggacccccaccagagactgaccgccaagcaggtgctgcagcacccctgggtgacccagaaggacaagctgccccagagccagctgagccaccaggacctgcagctggtgaagggcgccatggccgccacctacagcgccctgaacagcagcaagcccaccccccagctgaagcccatcgagagcagcatcctggcccagagaagagtgagaaagctgcccagcaccaccctgtag

SEQ ID NO: 12728 - DNA, 2202 bp, synthetic construct
  misc_feature 1..2202: note = Description of Artificial Sequence: Synthetic coding sequence
  source 1..2202: mol_type = other DNA
atggacctgagcatgaagaagttcgccgtgagaagattcttcagcgtgtacctgagaagaaagagcagaagcaagagcagcagcctgagcagactggaggaggagggcgtggtgaaggagatcgacatcagccaccacgtgaaggagggcttcgagaaggccgaccccagccagttcgagctgctgaaggtgctgggccagggcagctacggcaaggtgttcctggtgagaaaggtgaagggcagcgacgccggccagctgtacgccatgaaggtgctgaagaaggccaccctgaaggtgagagacagagtgagaagcaagatggagagagacatcctggccgaggtgaaccaccccttcatcgtgaagctgcactacgccttccagaccgagggcaagctgtacctgatcctggacttcctgagaggcggcgacctgttcaccagactgagcaaggaggtgatgttcaccgaggaggacgtgaagttctacctggccgagctggccctggccctggaccacctgcacagcctgggcatcatctacagagacctgaagcccgagaacatcctgctggacgaggagggccacatcaagatcaccgacttcggcctgagcaaggaggccatcgaccacgacaagagagcctacagcttctgcggcaccatcgagtacatggcccccgaggtggtgaacagaagaggccacacccagagcgccgactggtggagcttcggcgtgctgatgttcgagatgctgaccggcagcctgcccttccagggcaaggacagaaaggagaccatggccctgatcctgaaggccaagctgggcatgccccagttcctgagcggcgaggcccagagcctgctgagagccctgttcaagagaaacccctgcaacagactgggcgccggcatcgacggcgtggaggagatcaagagacaccccttcttcgtgaccatcgactggaacaccctgtacagaaaggagatcaagccccccttcaagcccgccgtgggcagacccgaggacaccttccacttcgaccccgagttcaccgccagaacccccaccgacagccccggcgtgccccccagcgccaacgcccaccacctgttcagaggcttcagcttcgtggccagcagcctgatccaggagcccagccagcaggacctgcacaaggtgcccgtgcaccccatcgtgcagcagctgcacggcaacaacatccacttcaccgacggctacgagatcaaggaggacatcggcgtgggcagctacagcgtgtgcaagagatgcgtgcacaaggccaccgacaccgagtacgccgtgaagatcatcgacaagagcaagagagaccccagcgaggagatcgagatcctgctgagatacggccagcaccccaacatcatcaccctgaaggacgtgtacgacgacggcaagttcgtgtacctggtgatggagctgatgagaggcggcgagctgctggacagaatcctgagacagagatacttcagcgagagagaggccagcgacgtgctgtgcaccatcaccaagaccatggactacctgcacagccagggcgtggtgcacagagacctgaagcccagcaacatcctgtacagagacgagagcggcagccccgagagcatcagagtgtgcgacttcggcttcgccaagcagctgagagccggcaacggcctgctgatgaccccctgctacaccgccaacttcgtggcccccgaggtgctgaagagacagggctacgacgccgcctgcgacatctggagcctgggcatcctgctgtacaccatgctggccggcttcacccccttcgccaacggccccgacgacacccccgaggagatcctggccagaatcggcagcggcaagtacgccctgagcggcggcaactgggacagcatcagcgacgccgccaaggacgtggtgagcaagatgctgcacgtggacccccaccagagactgaccgccatgcaggtgctgaagcacccctgggtggtgaacagagagtacctgagccccaaccagctgagcagacaggacgtgcacctggtgaagggcgccatggccgccacctacttcgccctgaacagaaccccccaggcccccagactggagcccgtgctgagcagcaacctggcccagagaagaggcatgaagagactgaccagcaccagactgtag

SEQ ID NO: 12729 - DNA, 501 bp, synthetic construct
  misc_feature 1..501: note = Description of Artificial Sequence: Synthetic coding sequence
  source 1..501: mol_type = other DNA
atgttcaccgaggaggacgtgaagttctacctggccgagctggccctggccctggaccacctgcacagcctgggcatcatctacagagacctgaagcccgagaacatcctgctggacgaggagggccacatcaagatcaccgacttcggcctgagcaaggaggccatcgaccacgacaagagagcctacagcttctgcggcaccatcgagtacatggcccccgaggtggtgaacagaagaggccacacccagagcgccgactggtggagcttcggcgtgctgatgttcgagatgctgaccggcagcctgcccttccagggcaaggacagaaaggagaccatggccctgatcctgaaggccaagctgggcatgccccagttcctgagcggcgaggcccagagcctgctgagagccctgttcaagagaaacccctgcaacagactgggcgagaagaccgccctgtgccccagagtgagctgcagcagactgctgggcttctag

SEQ ID NO: 12730 - DNA, 1935 bp, synthetic construct
  misc_feature 1..1935: note = Description of Artificial Sequence: Synthetic coding sequence
  source 1..1935: mol_type = other DNA
atgaaggtgctgaagaaggccaccctgaaggtgagagacagagtgagaagcaagatggagagagacatcctggccgaggtgaaccaccccttcatcgtgaagctgcactacgccttccagaccgagggcaagctgtacctgatcctggacttcctgagaggcggcgacctgttcaccagactgagcaaggaggtgatgttcaccgaggaggacgtgaagttctacctggccgagctggccctggccctggaccacctgcacagcctgggcatcatctacagagacctgaagcccgagaacatcctgctggacgaggagggccacatcaagatcaccgacttcggcctgagcaaggaggccatcgaccacgacaagagagcctacagcttctgcggcaccatcgagtacatggcccccgaggtggtgaacagaagaggccacacccagagcgccgactggtggagcttcggcgtgctgatgttcgagatgctgaccggcagcctgcccttccagggcaaggacagaaaggagaccatggccctgatcctgaaggccaagctgggcatgccccagttcctgagcggcgaggcccagagcctgctgagagccctgttcaagagaaacccctgcaacagactgggcgccggcatcgacggcgtggaggagatcaagagacaccccttcttcgtgaccatcgactggaacaccctgtacagaaaggagatcaagccccccttcaagcccgccgtgggcagacccgaggacaccttccacttcgaccccgagttcaccgccagaacccccaccgacagccccggcgtgccccccagcgccaacgcccaccacctgttcagaggcttcagcttcgtggccagcagcctgatccaggagcccagccagcaggacctgcacaaggtgcccgtgcaccccatcgtgcagcagctgcacggcaacaacatccacttcaccgacggctacgagatcaaggaggacatcggcgtgggcagctacagcgtgtgcaagagatgcgtgcacaaggccaccgacaccgagtacgccgtgaagatcatcgacaagagcaagagagaccccagcgaggagatcgagatcctgctgagatacggccagcaccccaacatcatcaccctgaaggacgtgtacgacgacggcaagttcgtgtacctggtgatggagctgatgagaggcggcgagctgctggacagaatcctgagacagagatacttcagcgagagagaggccagcgacgtgctgtgcaccatcaccaagaccatggactacctgcacagccagggcgtggtgcacagagacctgaagcccagcaacatcctgtacagagacgagagcggcagccccgagagcatcagagtgtgcgacttcggcttcgccaagcagctgagagccggcaacggcctgctgatgaccccctgctacaccgccaacttcgtggcccccgaggtgctgaagagacagggctacgacgccgcctgcgacatctggagcctgggcatcctgctgtacaccatgctggccggcttcacccccttcgccaacggccccgacgacacccccgaggagatcctggccagaatcggcagcggcaagtacgccctgagcggcggcaactgggacagcatcagcgacgccgccaaggacgtggtgagcaagatgctgcacgtggacccccaccagagactgaccgccatgcaggtgctgaagcacccctgggtggtgaacagagagtacctgagccccaaccagctgagcagacaggacgtgcacctggtgaagggcgccatggccgccacctacttcgccctgaacagaaccccccaggcccccagactggagcccgtgctgagcagcaacctggcccagagaagaggcatgaagagactgaccagcaccagactgtag

SEQ ID NO: 12731 - DNA, 1935 bp, synthetic construct; identical to SEQ ID NO: 12730
  misc_feature 1..1935: note = Description of Artificial Sequence: Synthetic coding sequence
  source 1..1935: mol_type = other DNA

SEQ ID NO: 12732 - DNA, 2226 bp, synthetic construct
  misc_feature 1..2226: note = Description of Artificial Sequence: Synthetic coding sequence
  source 1..2226: mol_type = other DNA
atgcccatcgcccagctgctggagctgtggaagaagatcgaggtggagcccatggagatcgagaccaccgaggaggacctgaacctggacgtggagcccaccaccgaggacaccgccgaggaggaggagggcgtggtgaaggagatcgacatcagccaccacgtgaaggagggcttcgagaaggccgaccccagccagttcgagctgctgaaggtgctgggccagggcagctacggcaaggtgttcctggtgagaaaggtgaagggcagcgacgccggccagctgtacgccatgaaggtgctgaagaaggccaccctgaaggtgagagacagagtgagaagcaagatggagagagacatcctggccgaggtgaaccaccccttcatcgtgaagctgcactacgccttccagaccgagggcaagctgtacctgatcctggacttcctgagaggcggcgacctgttcaccagactgagcaaggaggtgatgttcaccgaggaggacgtgaagttctacctggccgagctggccctggccctggaccacctgcacagcctgggcatcatctacagagacctgaagcccgagaacatcctgctggacgaggagggccacatcaagatcaccgacttcggcctgagcaaggaggccatcgaccacgacaagagagcctacagcttctgcggcaccatcgagtacatggcccccgaggtggtgaacagaagaggccacacccagagcgccgactggtggagcttcggcgtgctgatgttcgagatgctgaccggcagcctgcccttccagggcaaggacagaaaggagaccatggccctgatcctgaaggccaagctgggcatgccccagttcctgagcggcgaggcccagagcctgctgagagccctgttcaagagaaacccctgcaacagactgggcgccggcatcgacggcgtggaggagatcaagagacaccccttcttcgtgaccatcgactggaacaccctgtacagaaaggagatcaagccccccttcaagcccgccgtgggcagacccgaggacaccttccacttcgaccccgagttcaccgccagaacccccaccgacagccccggcgtgccccccagcgccaacgcccaccacctgttcagaggcttcagcttcgtggccagcagcctgatccaggagcccagccagcaggacctgcacaaggtgcccgtgcaccccatcgtgcagcagctgcacggcaacaacatccacttcaccgacggctacgagatcaaggaggacatcggcgtgggcagctacagcgtgtgcaagagatgcgtgcacaaggccaccgacaccgagtacgccgtgaagatcatcgacaagagcaagagagaccccagcgaggagatcgagatcctgctgagatacggccagcaccccaacatcatcaccctgaaggacgtgtacgacgacggcaagttcgtgtacctggtgatggagctgatgagaggcggcgagctgctggacagaatcctgagacagagatacttcagcgagagagaggccagcgacgtgctgtgcaccatcaccaagaccatggactacctgcacagccagggcgtggtgcacagagacctgaagcccagcaacatcctgtacagagacgagagcggcagccccgagagcatcagagtgtgcgacttcggcttcgccaagcagctgagagccggcaacggcctgctgatgaccccctgctacaccgccaacttcgtggcccccgaggtgctgaagagacagggctacgacgccgcctgcgacatctggagcctgggcatcctgctgtacaccatgctggccggcttcacccccttcgccaacggccccgacgacacccccgaggagatcctggccagaatcggcagcggcaagtacgccctgagcggcggcaactgggacagcatcagcgacgccgccaaggacgtggtgagcaagatgctgcacgtggacccccaccagagactgaccgccatgcaggtgctgaagcacccctgggtggtgaacagagagtacctgagccccaaccagctgagcagacaggacgtgcacctggtgaagggcgccatggccgccacctacttcgccctgaacagaaccccccaggcccccagactggagcccgtgctgagcagcaacctggcccagagaagaggcatgaagagactgaccagcaccagactgtag

SEQ ID NO: 12733 - DNA, 516 bp, synthetic construct
  misc_feature 1..516: note = Description of Artificial Sequence: Synthetic coding sequence
  source 1..516: mol_type = other DNA
atgcccatcgcccagctgctggagctgtggaagaagatcgaggtggagcccatggagatcgagaccaccgaggaggacctgaacctggacgtggagcccaccaccgaggacaccgccgaggagggcaagagcgacagcgccgcctgcaagaccaaggtggccggcagcgtggaggaggagggcgtggtgaaggagatcgacatcagccaccacgtgaaggagggcttcgagaaggccgaccccagccagttcgagctgctgaaggtgctgggccagggcagctacggcaaggtgttcctggtgagaaaggtgaagggcagcgacgccggccagctgtacgccatgaaggtgctgaagaaggccaccctgaaggtgagagacagagtgagaagcaagatggagagagacatcctggccgaggtgaaccaccccttcatcgtgaagctgcactacgccttccagaccgagggcaagctgtacctgatcctggacttcctgagaggcggcgacctgtag

SEQ ID NO: 12734 - DNA, 2277 bp, synthetic construct
  misc_feature 1..2277: note = Description of Artificial Sequence: Synthetic coding sequence
  source 1..2277: mol_type = other DNA
atgcccatcgcccagctgctggagctgtggaagaagatcgaggtggagcccatggagatcgagaccaccgaggaggacctgaacctggacgtggagcccaccaccgaggacaccgccgaggagggcaagagcgacagcgccgcctgcaagaccaaggtggccggcagcgtggaggaggagggcgtggtgaaggagatcgacatcagccaccacgtgaaggagggcttcgagaaggccgaccccagccagttcgagctgctgaaggtgctgggccagggcagctacggcaaggtgttcctggtgagaaaggtgaagggcagcgacgccggccagctgtacgccatgaaggtgctgaagaaggccaccctgaaggtgagagacagagtgagaagcaagatggagagagacatcctggccgaggtgaaccaccccttcatcgtgaagctgcactacgccttccagaccgagggcaagctgtacctgatcctggacttcctgagaggcggcgacctgttcaccagactgagcaaggaggtgatgttcaccgaggaggacgtgaagttctacctggccgagctggccctggccctggaccacctgcacagcctgggcatcatctacagagacctgaagcccgagaacatcctgctggacgaggagggccacatcaagatcaccgacttcggcctgagcaaggaggccatcgaccacgacaagagagcctacagcttctgcggcaccatcgagtacatggcccccgaggtggtgaacagaagaggccacacccagagcgccgactggtggagcttcggcgtgctgatgttcgagatgctgaccggcagcctgcccttccagggcaaggacagaaaggagaccatggccctgatcctgaaggccaagctgggcatgccccagttcctgagcggcgaggcccagagcctgctgagagccctgttcaagagaaacccctgcaacagactgggcgccggcatcgacggcgtggaggagatcaagagacaccccttcttcgtgaccatcgactggaacaccctgtacagaaaggagatcaagccccccttcaagcccgccgtgggcagacccgaggacaccttccacttcgaccccgagttcaccgccagaacccccaccgacagccccggcgtgccccccagcgccaacgcccaccacctgttcagaggcttcagcttcgtggccagcagcctgatccaggagcccagccagcaggacctgcacaaggtgcccgtgcaccccatcgtgcagcagctgcacggcaacaacatccacttcaccgacggctacgagatcaaggaggacatcggcgtgggcagctacagcgtgtgcaagagatgcgtgcacaaggccaccgacaccgagtacgccgtgaagatcatcgacaagagcaagagagaccccagcgaggagatcgagatcctgctgagatacggccagcaccccaacatcatcaccctgaaggacgtgtacgacgacggcaagttcgtgtacctggtgatggagctgatgagaggcggcgagctgctggacagaatcctgagacagagatacttcagcgagagagaggccagcgacgtgctgtgcaccatcaccaagaccatggactacctgcacagccagggcgtggtgcacagagacctgaagcccagcaacatcctgtacagagacgagagcggcagccccgagagcatcagagtgtgcgacttcggcttcgccaagcagctgagagccggcaacggcctgctgatgaccccctgctacaccgccaacttcgtggcccccgaggtgctgaagagacagggctacgacgccgcctgcgacatctggagcctgggcatcctgctgtacaccatgctggccggcttcacccccttcgccaacggccccgacgacacccccgaggagatcctggccagaatcggcagcggcaagtacgccctgagcggcggcaactgggacagcatcagcgacgccgccaaggacgtggtgagcaagatgctgcacgtggacccccaccagagactgaccgccatgcaggtgctgaagcacccctgggtggtgaacagagagtacctgagccccaaccagctgagcagacaggacgtgcacctggtgaagggcgccatggccgccacctacttcgccctgaacagaaccccccaggcccccagactggagcccgtgctgagcagcaacctggcccagagaagaggcatgaagagactgaccagcaccagactgtag

SEQ ID NO: 12735 - DNA, 888 bp, synthetic construct
  misc_feature 1..888: note = Description of Artificial Sequence: Synthetic coding sequence
  source 1..888: mol_type = other DNA
atgagcggcgccctggacgtgctgcagatgaaggaggaggacgtgctgaagttcctggccgccggcacccacctgggcggcaccaacctggacttccagatggagcagtacatctacaagagaaagagcgacggcatctacatcatcaacctgaagagaacctgggagaagctgctgctggccgccagagccatcgtggccatcgagaaccccgccgacgtgagcgtgatcagcagcagaaacaccggccagagagccgtgctgaagttcgccgccgccaccggcgccacccccatcgccggcagattcacccccggcaccttcaccaaccagatccaggccgccttcagagagcccagactgctggtggtgaccgaccccagagccgaccaccagcccctgaccgaggccagctacgtgaacctgcccaccatcgccctgtgcaacaccgacagccccctgagatacgtggacatcgccatcccctgcaacaacaagggcgcccacagcgtgggcctgatgtggtggatgctggccagagaggtgctgagaatgagaggcaccatcagcagagagcacccctgggaggtgatgcccgacctgtacttctacagagaccccgaggagatcgagaaggaggagcaggccgccgccgagaaggccgtgaccaaggaggagttccagggcgagtggaccgcccccgcccccgagttcaccgccacccagcccgaggtggccgactggagcgagggcgtgcaggtgcccagcgtgcccatccagcagttccccaccgaggactggagcgcccagcccgccaccgaggactggagcgccgcccccaccgcccaggccaccgagtgggtgggcgccaccaccgactggagctag

SEQ ID NO: 12736 - DNA, 795 bp, synthetic construct
  misc_feature 1..795: note = Description of Artificial Sequence: Synthetic coding sequence
  source 1..795: mol_type = other DNA
atgagcggcgccctggacgtgctgcagatgaaggaggaggacgtgctgaagttcctggccgccggcacccacctgggcggcaccaacctggacttccagatggagcagtacatctacaagagaaagagcgacggcatctacatcatcaacctgaagagaacctgggagaagctgctgctggccgccagagccatcgtggccatcgagaaccccgccgacgtgagcgtgatcagcagcagaaacaccggccagagagccgtgctgaagttcgccgccgccaccggcgccacccccatcgccggcagattcacccccggcaccttcaccaaccagatccaggccgccttcagagagcccagactgctggtggtgaccgaccccagagccgaccaccagcccctgaccgaggccagctacgtgaacctgcccaccatcgccctgtgcaacaccgacagccccctgagatacgtggacatcgccatcccctgcaacaacaagggcgcccacagcgtgggcctgatgtggtggatgctggccagagaggtgctgagaatgagaggcaccatcagcagagagcacccctgggaggtgatgcccgacctgtacttctacagagaccccgaggagatcgagaaggaggagcaggccgccgccgagaaggccgtgaccaaggaggagttccagggcgagtggaccgcccccgcccccgagttcaccgccacccagcccgaggtggccgactggagcgagggcgtgcaggtgcccagcgtgcccatccagcagttccccacctag

SEQ ID NO: 12737 - DNA, 1458 bp, synthetic construct
  misc_feature 1..1458: note = Description of Artificial Sequence: Synthetic coding sequence
  source 1..1458: mol_type = other DNA
atgggcgagcccggcttcttcgtgaccggcgacagagccggcggcagaagctggtgcctgagaagagtgggcatgagcgccggctggctgctgctggaggacggctgcgaggtgaccgtgggcagaggcttcggcgtgacctaccagctggtgagcaagatctgccccctgatgatcagcagaaaccactgcgtgctgaagcagaaccccgagggccagtggaccatcatggacaacaagagcctgaacggcgtgtggctgaacagagccagactggagcccctgagagtgtacagcatccaccagggcgactacatccagctgggcgtgcccctggagaacaaggagaacgccgagtacgagtacgaggtgaccgaggaggactgggagaccatctacccctgcctgagccccaagaacgaccagatgatcgagaagaacaaggagctgagaaccaagagaaagttcagcctggacgagctggccggccccggcgccgagggccccagcaacctgaagagcaagatcaacaaggtgagctgcgagagcggccagcccgtgaagagccagggcaagggcgaggtggccagcacccccagcgacaacctggaccccaagctgaccgccctggagcccagcaagaccaccggcgcccccatctaccccggcttccccaaggtgaccgaggtgcaccacgagcagaaggccagcaacagcagcgccagccagagaagcctgcagatgttcaaggtgaccatgagcagaatcctgagactgaagatccagatgcaggagaagcacgaggccgtgatgaacgtgaagaagcagacccagaagggcaacagcaagaaggtggtgcagatggagcaggagctgcaggacctgcagagccagctgtgcgccgagcaggcccagcagcaggccagagtggagcagctggagaagaccttccaggaggaggagcagcacctgcagggcctggagatcgcccagggcgagaaggacctgaagcagcagctggcccaggccctgcaggagcactgggccctgatggaggagctgaacagaagcaagaaggacttcgaggccatcatccaggccaagaacaaggagctggagcagaccaaggaggagaaggagaagatgcaggcccagaaggaggaggtgctgagccacatgaacgacgtgctggagaacgagctgcagtgcatcatctgcagcgagtacttcatcgaggccgtgaccctgaactgcgcccacagcttctgcagctactgcatcaacgagtggatgaagagaaagatcgagtgccccatctgcagaaaggacatcaagagcaagacctacagcctggtgctggacaactgcatcaacaagatggtgaacaacctgagcagcgaggtgaaggagagaagaatcgtgctgatcagagagagaaaggccaagagactgttctag

SEQ ID NO: 12738 - DNA, 297 bp, synthetic construct
  misc_feature 1..297: note = Description of Artificial Sequence: Synthetic coding sequence
  source 1..297: mol_type = other DNA
atgggcgagcccggcttcttcgtgaccggcgacagagccggcggcagaagctggtgcctgagaagagtgggcatgagcgccggctggctgctgctggaggacggctgcgaggtgaccgtgggcagaggcttcggcgtgacctaccagctggtgagcaagatctgccccctgatgatcagcagaaaccactgcgtgctgaagcagaaccccgagggccagtggaccatcatggacaacaagagcttccccagcgagaaggccgaggacttcaccgccgccggcgagagattcctgtag

SEQ ID NO: 12739 - DNA, 1347 bp, synthetic construct
  misc_feature 1..1347: note = Description of Artificial Sequence: Synthetic coding sequence
  source 1..1347: mol_type = other DNA
atgggcgagcccggcttcttcgtgaccggcgacagagccggcggcagaagctggtgcctgagaagagtgggcatgagcgccggctggctgctgctggaggacggctgcgaggtgaccgtgggcagaggcttcggcgtgacctaccagctggtgagcaagatctgccccctgatgatcagcagaaaccactgcgtgctgaagcagaaccccgagggccagtggaccatcatggacaacaagagcctgaacggcgtgtggctgaacagagccagactggagcccctgagagtgtacagcatccaccagggcgactacatccagctgggcgtgcccctggagaacaaggagaacgccgagtacgagtacgaggtgaccgaggaggactgggagaccatctacccctgcctgagccccaagaacgaccagatgatcgagaagaacaaggagctgagaaccaagagaaagttcagcctggacgagctggccggccccggcgccgagggccccagcaacctgaagagcaagatcaacaaggtgagctgcgagagcggccagcccgtgaagagccagggcaagggcgaggtggccagcacccccagcgacaacctggaccccaagctgaccgccctggagcccagcaagaccaccggcgcccccatctaccccggcttccccaaggtgaccgaggtgcaccacgagcagaaggccagcaacagcagcgccagccagagaagcctgcagatgttcaaggtgaccatgagcagaatcctgagactgaagatccagatgcaggagaagcacgaggccgtgatgaacgtgaagaagcagacccagaagggcaacagcaagaaggtggtgcagatggagcaggagctgcaggacctgcagagccagctgtgcgccgagcaggcccagcagcaggccagagtggagcagctggagaagaccttccaggaggaggagcagcacctgcagggcctggagatcgcccagggcgagaaggacctgaagcagcagctggcccaggccctgcaggagcactgggccctgatggaggagctgaacagaagcaagaaggacttcgaggccatcatccaggccaagaacaaggagctggagcagaccaaggaggagaaggagaagatgcaggcccagaaggaggaggtgctgagccacatgaacgacgtgctggagaacgagctgcagtgcatcatctgcagcgagtacttcatcgagcagagagactgcagcgaggacagagccctgagagccttcgagagactgcccggcagcgccagcctgagatggagcggcggcttcagcctggccgtgacccccctgctgtag

SEQ ID NO: 12740 - DNA, 1593 bp, synthetic construct
  misc_feature 1..1593: note = Description of Artificial Sequence: Synthetic coding sequence
  source 1..1593: mol_type = other DNA
atggccgacgacatcgacatcgaggccatgctggaggccccctacaagaaggacgagaacaagctgagcagcgccaacggccacgaggagagaagcaagaagagaaagaagagcaagagcagaagcagaagccacgagagaaagagaagcaagagcaaggagagaaagagaagcagagacagagagagaaagaagagcaagagcagagagagaaagagaagcagaagcaaggagagaagaagaagcagaagcagaagcagagacagaagattcagaggcagatacagaagcccctacagcggccccaagttcaacagcgccatcagaggcaagatcggcctgccccacagcatcaagctgagcagaagaagaagcagaagcaagagccccttcagaaaggacaagagccccgtgagagagcccatcgacaacctgacccccgaggagagagacgccagaaccgtgttctgcatgcagctggccgccagaatcagacccagagacctggaggagttcttcagcaccgtgggcaaggtgagagacgtgagaatgatcagcgacagaaacagcagaagaagcaagggcatcgcctacgtggagttcgtggacgtgagcagcgtgcccctggccatcggcctgaccggccagagagtgctgggcgtgcccatcatcgtgcaggccagccaggccgagaagaacagagccgccgccatggccaacaacctgcagaagggcagcgccggccccatgagactgtacgtgggcagcctgcacttcaacatcaccgaggacatgctgagaggcatcttcgagcccttcggcagaatcgagagcatccagctgatgatggacagcgagaccggcagaagcaagggctacggcttcatcaccttcagcgacagcgagtgcgccaagaaggccctggagcagctgaacggcttcgagctggccggcagacccatgaaggtgggccacgtgaccgagagaaccgacgccagcagcgccagcagcttcctggacagcgacgagctggagagaaccggcatcgacctgggcaccaccggcagactgcagctgatggccagactggccgagggcaccggcctgcagatcccccccgccgcccagcaggccctgcagatgagcggcagcctggccttcggcgccgtggccgagttcagcttcgtgatcgacctgcagaccagactgagccagcagaccgaggccagcgccctggccgccgccgccagcgtgcagcccctggccacccagtgcttccagctgagcaacatgttcaacccccagaccgaggaggaggtgggctgggacaccgagatcaaggacgacgtgatcgaggagtgcaacaagcacggcggcgtgatccacatctacgtggacaagaacagcgcccagggcaacgtgtacgtgaagtgccccagcatcgccgccgccatcgccgccgtgaacgccctgcacggcagatggttcgccggcaagatgatcaccgccgcctacgtgcccctgcccacctaccacaacctgttccccgacagcatgaccgccacccagctgctggtgcccagcagaagatag

SEQ ID NO: 12741 - DNA, 1272 bp, synthetic construct
  misc_feature 1..1272: note = Description of Artificial Sequence: Synthetic coding sequence
  source 1..1272: mol_type = other DNA
atggccgacgacatcgacatcgaggccatgctggaggccccctacaagaaggacgagaacaagctgagcagcgccaacggccacgaggagagaagcaagaagagaaagaagagcaagagcagaagcagaagccacgagagaaagagaagcaagagcaaggagagaaagagaagcagagacagagagagaaagaagagcaagagcagagagagaaagagaagcagaagcaaggagagaagaagaagcagaagcagaagcagagacagaagattcagaggcagatacagaagcccctacagcggccccaagttcaacagcgccatcagaggcaagatcggcctgccccacagcatcaagctgagcagaagaagaagcagaagcaagagccccttcagaaaggacaagagccccgtgagagagcccatcgacaacctgacccccgaggagagagacgccagaaccgtgttctgcatgcagctggccgccagaatcagacccagagacctggaggagttcttcagcaccgtgggcaaggtgagagacgtgagaatgatcagcgacagaaacagcagaagaagcaagggcatcgcctacgtggagttcgtggacgtgagcagcgtgcccctggccatcggcctgaccggccagagagtgctgggcgtgcccatcatcgtgcaggccagccaggccgagaagaacagagccgccgccatggccaacaacctgcagaagggcagcgccggccccatgagactgtacgtgggcagcctgcacttcaacatcaccgaggacatgctgagaggcatcttcgagcccttcggcagaatcgagagcatccagctgatgatggacagcgagaccggcagaagcaagggctacggcttcatcaccttcagcgacagcgagtgcgccaagaaggccctggagcagctgaacggcttcgagctggccggcagacccatgaaggtgggccacgtgaccgagagaaccgacgccagcagcgccagcagcttcctggacagcgacgagctggagagaaccggcatcgacctgggcaccaccggcagactgcagctgatggccagactggccgagggcaccggcctgcagatcccccccgccgcccagcaggccctgcagatgagcggcagcctggccttcggcgccgtggccgacctgcagaccagactgagccagcagaccgaggccctgttcgtgatcatgttctggaacgagatctggagcgacaacatgatcaccctgcagctgtag

SEQ ID NO: 12742 - DNA, 1575 bp, synthetic construct
  misc_feature 1..1575: note = Description of Artificial Sequence: Synthetic coding sequence
  source 1..1575: mol_type = other DNA
atggccgacgacatcgacatcgaggccatgctggaggccccctacaagaaggacgagaacaagctgagcagcgccaacggccacgaggagagaagcaagaagagaaagaagagcaagagcagaagcagaagccacgagagaaagagaagcaagagcaaggagagaaagagaagcagagacagagagagaaagaagagcaagagcagagagagaaagagaagcagaagcaaggagagaagaagaagcagaagcagaagcagagacagaagattcagaggcagatacagaagcccctacagcggccccaagttcaacagcgccatcagaggcaagatcggcctgccccacagcatcaagctgagcagaagaagaagcagaagcaagagccccttcagaaaggacaagagccccgtgagagagcccatcgacaacctgacccccgaggagagagacgccagaaccgtgttctgcatgcagctggccgccagaatcagacccagagacctggaggagttcttcagcaccgtgggcaaggtgagagacgtgagaatgatcagcgacagaaacagcagaagaagcaagggcatcgcctacgtggagttcgtggacgtgagcagcgtgcccctggccatcggcctgaccggccagagagtgctgggcgtgcccatcatcgtgcaggccagccaggccgagaagaacagagccgccgccatggccaacaacctgcagaagggcagcgccggccccatgagactgtacgtgggcagcctgcacttcaacatcaccgaggacatgctgagaggcatcttcgagcccttcggcagaatcgagagcatccagctgatgatggacagcgagaccggcagaagcaagggctacggcttcatcaccttcagcgacagcgagtgcgccaagaaggccctggagcagctgaacggcttcgagctggccggcagacccatgaaggtgggccacgtgaccgagagaaccgacgccagcagcgccagcagcttcctggacagcgacgagctggagagaaccggcatcgacctgggcaccaccggcagactgcagctgatggccagactggccgagggcaccggcctgcagatcccccccgccgcccagcaggccctgcagatgagcggcagcctggccttcggcgccgtggccgacctgcagaccagactgagccagcagaccgaggccagcgccctggccgccgccgccagcgtgcagcccctggccacccagtgcttccagctgagcaacatgttcaacccccagaccgaggaggaggtgggctgggacaccgagatcaaggacgacgtgatcgaggagtgcaacaagcacggcggcgtgatccacatctacgtggacaagaacagcgcccagggcaacgtgtacgtgaagtgccccagcatcgccgccgccatcgccgccgtgaacgccctgcacggcagatggttcgccggcaagatgatcaccgccgcctacgtgcccctgcccacctaccacaacctgttccccgacagcatgaccgccacccagctgctggtgcccagcagaagatag

SEQ ID NO: 12743 - DNA, 696 bp, synthetic construct
  misc_feature 1..696: note = Description of Artificial Sequence: Synthetic coding sequence
  source 1..696: mol_type = other DNA
atggccgacgacatcgacatcgaggccatgctggaggccccctacaagaaggacgagaacaagctgagcagcgccaacggccacgaggagagaagcaagaagagaaagaagagcaagagcagaagcagaagccacgagagaaagagaagcaagagcaaggagagaaagagaagcagagacagagagagaaagaagagcaagagcagagagagaaagagaagcagaagcaaggagagaagaagaagcagaagcagaagcagagacagaagattcagaggcagatacagaagcccctacagcggccccaagttcaacagcgccatcagaggcaagatcggcctgccccacagcatcaagctgagaagaagaagcagaagcaagagccccttcagaaaggacaagagccccgtgagagagcccatcgacaacctgacccccgaggagagagacgccagaaccgtgttctgcatgcagctggccgccagaatcagacccagagacctggaggagttcttcagcaccgtgggcaaggtgagagacgtgagaatgatcagcgacagaaacagcagaagaagcaagggcatcgcctacgtggagttcgtggacgtgagcagcgtgcccctggccatcggcctgaccggccagagagtgctgggcgtgcccatcatcgtgcaggccagccaggccgagaagtag

SEQ ID NO: 12744 - DNA, 1122 bp, synthetic construct
  misc_feature 1..1122: note = Description of Artificial Sequence: Synthetic coding sequence
  source 1..1122: mol_type = other DNA
atgcagctggccgccagaatcagacccagagacctggaggagttcttcagcaccgtgggcaaggtgagagacgtgagaatgatcagcgacagaaacagcagaagaagcaagggcatcgcctacgtggagttcgtggacgtgagcagcgtgcccctggccatcggcctgaccggccagagagtgctgggcgtgcccatcatcgtgcaggccagccaggccgagaagaacagagccgccgccatggccaacaacctgcagaagggcagcgccggccccatgagactgtacgtgggcagcctgcacttcaacatcaccgaggacatgctgagaggcatcttcgagcccttcggcagaatcgagagcatccagctgatgatggacagcgagaccggcagaagcaagggctacggcttcatcaccttcagcgacagcgagtgcgccaagaaggccctggagcagctgaacggcttcgagctggccggcagacccatgaaggtgggccacgtgaccgagagaaccgacgccagcagcgccagcagcttcctggacagcgacgagctggagagaaccggcatcgacctgggcaccaccggcagactgcagctgatggccagactggccgagggcaccggcctgcagatcccccccgccgcccagcaggccctgcagatgagcggcagcctggccttcggcgccgtggccgagttcagcttcgtgatcgacctgcagaccagactgagccagcagaccgaggccagcgccctggccgccgccgccagcgtgcagcccctggccacccagtgcttccagctgagcaacatgttcaacccccagaccgaggaggaggtgggctgggacaccgagatcaaggacgacgtgatcgaggagtgcaacaagcacggcggcgtgatccacatctacgtggacaagaacagcgcccagggcaacgtgtacgtgaagtgccccagcatcgccgccgccatcgccgccgtgaacgccctgcacggcagatggttcgccggcaagatgatcaccgccgcctacgtgcccctgcccacctaccacaacctgttccccgacagcatgaccgccacccagctgctggtgcccagcagaagatag

SEQ ID NO: 12745 - DNA, 582 bp, synthetic construct
  misc_feature 1..582: note = Description of Artificial Sequence: Synthetic coding sequence
  source 1..582: mol_type = other DNA
atggccgacgacatcgacatcgaggccatgctggaggccccctacaagaaggacgagaacaagctgagcagcgccaacggccacgaggagagaagcaagaagagaaagaagagcaagagcagaagcagaagccacgagagaaagagaagcaagagcaaggagagaaagagaagcagagacagagagagaaagaagagcaagagcagagagagaaagagaagcagaagcaaggagagaagaagaagcagaagcagaagcagagacagaagattcagaggcagatacagaagcccctacagcggccccaagttcaacagcgccatcagaggcaagatcggcctgccccacagcatcaagctgagcagaagaagaagcagaagcaagagccccttcagaaaggacaagagccccgtgagagagcccatcgacaacctgacccccgaggagagagacgccagaaccgtgttctgcatgcagctggccgccagaatcagacccagagacctggaggagttcttcagcaccgtgggcaaggtgagagacgtgagaatgatcagcgacagaaacagcagaagaagctag

SEQ ID NO: 12746 - DNA, 1014 bp, synthetic construct
  misc_feature 1..1014: note = Description of Artificial Sequence: Synthetic coding sequence
  source 1..1014: mol_type = other DNA
tgaagccccttcagaaaggacaagagccccgtgagagagcccatcgacaacctgacccccgaggagagagacgccagaaccgtgttctgcatgcagctggccgccagaatcagacccagagacctggaggagttcttcagcaccgtgggcaaggtgagagacgtgagaatgatcagcgacagaaacagcagaagaagcaagggcatcgcctacgtggagttcgtggacgtgagcagcgtgcccctggccatcggcctgaccggccagagagtgctgggcgtgcccatcatcgtgcaggccagccaggccgagaagaacagagccgccgccatggccaacaacctgcagaagggcagcgccggccccatgagactgtacgtgggcagcctgcacttcaacatcaccgaggacatgctgagaggcatcttcgagcccttcggcagattcagcgacagcgagtgcgccaagaaggccctggagcagctgaacggcttcgagctggccggcagacccatgaaggtgggccacgtgaccgagagaaccgacgccagcagcgccagcagcttcctggacagcgacgagctggagagaaccggcatcgacctgggcaccaccggcagactgcagctgatggccagactggccgagggcaccggcctgcagatcccccccgccgcccagcaggccctgcagatgagcggcagcctggccttcggcgccgtggccgagttcagcttcgtgatcgacctgcagaccagactgagccagcagaccgaggccagcgccctggccgccgccgccagcgtgcagcccctggccacccagtgcttccagctgagcaacatgttcaacccccagaccgaggaggaggtgggctgggacaccgagatcaaggacgacgtgatcgaggagtgcaacaagcacggcggcgtgatccacatctacgtggacaagaacagcgcccagggcaacgtgtacgtgaagtgccccagcatcgccgccgccatcgcctag

SEQ ID NO: 12747 - DNA, 1527 bp, synthetic construct
  misc_feature 1..1527: note = Description of Artificial Sequence: Synthetic coding sequence
  source 1..1527: mol_type = other DNA
atggccgacgacatcgacatcgaggccatgctggaggccccctacaagaaggacgagaacaagctgagcagcgccaacggccacgaggagagaagcaagaagagaaagaagagcaagagcagaagcagaagccacgagagaaagagaagcaagagcaaggagagaaagagaagcagagacagagagagaaagaagagcaagagcagagagagaaagagaagcagaagcaaggagagaagaagaagcagaagcagaagcagagacagaagattcagaggcagatacagaagcccctacagaagaagaagcagaagcaagagccccttcagaaaggacaagagccccgtgagagagcccatcgacaacctgacccccgaggagagagacgccagaaccgtgttctgcatgcagctggccgccagaatcagacccagagacctggaggagttcttcagcaccgtgggcaaggtgagagacgtgagaatgatcagcgacagaaacagcagaagaagcaagggcatcgcctacgtggagttcgtggacgtgagcagcgtgcccctggccatcggcctgaccggccagagagtgctgggcgtgcccatcatcgtgcaggccagccaggccgagaagaacagagccgccgccatggccaacaacctgcagaagggcagcgccggccccatgagactgtacgtgggcagcctgcacttcaacatcaccgaggacatgctgagaggcatcttcgagcccttcggcagaatcgagagcatccagctgatgatggacagcgagaccggcagaagcaagggctacggcttcatcaccttcagcgacagcgagtgcgccaagaaggccctggagcagctgaacggcttcgagctggccggcagacccatgaaggtgggccacgtgaccgagagaaccgacgccagcagcgccagcagcttcctggacagcgacgagctggagagaaccggcatcgacctgggcaccaccggcagactgcagctgatggccagactggccgagggcaccggcctgcagatcccccccgccgcccagcaggccctgcagatgagcggcagcctggccttcggcgccgtggccgagttcagcttcgtgatcgacctgcagaccagactgagccagcagaccgaggccagcgccctggccgccgccgccagcgtgcagcccctggccacccagtgcttccagctgagcaacatgttcaacccccagaccgaggaggaggtgggctgggacaccgagatcaaggacgacgtgatcgaggagtgcaacaagcacggcggcgtgatccacatctacgtggacaagaacagcgcccagggcaacgtgtacgtgaagtgccccagcatcgccgccgccatcgccgccgtgaacgccctgcacggcagatggttcgccggcaagatgatcaccgccgcctacgtgcccctgcccacctaccacaacctgttccccgacagcatgaccgccacccagctgctggtgcccagcagaagatag

SEQ ID NO: 12748 - DNA, 1176 bp, synthetic construct
  misc_feature 1..1176: note = Description of Artificial Sequence: Synthetic coding sequence
  source 1..1176: mol_type = other DNA
atggtggaggccgacagacccggcaagctgttcatcggcggcctgaacaccgagaccaacgagaaggccctggaggccgtgttcggcaagtacggcagaatcgtggaggtgctgctgatgaaggacagagagaccaacaagagcagaggcttcgccttcgtgaccttcgagagccccgccgacgccaaggacgccgccagagacatgaacggcaagagcctggacggcaaggccatcaaggtggagcaggccaccaagcccagcttcgagagcggcagaagaggccccccccccccccccagaagcagaggcccccccagaggcctgagaggcggcagaggcggcagcggcggcaccagaggcccccccagcagaggcggccacatggacgacggcggctacagcatgaacttcaacatgagcagcagcagaggccccctgcccgtgaagagaggccccccccccagaagcggcggccccccccccaagagaagcgcccccagcggccccgtgagaagcagcagcggcatgggcggcagagcccccgtgagcagaggcagagacagctacggcggcccccccagaagagagcccctgcccagcagaagagacgtgtacctgagccccagagacgacggctacagcaccaaggacagctacagcagcagagactaccccagcagcagagacaccagagactacgcccccccccccagagactacacctacagagactacggccacagcagcagcagagacgactaccccagcagaggctacagcgacagagacggctacggcagagacagagactacagcgaccaccccagcggcggcagctacagagacagctacgagagctacggcaacagcagaagcgccccccccaccagaggccccccccccagctacggcggcagcagcagatacgacgactacagcagcagcagagacggctacggcggcagcagagacagctacagcagcagcagaagcgacctgtacagcagcggcagagacagagtgggcagacaggagagaggcctgccccccagcatggagagaggctaccccccccccagagacagctacagcagcagcagcagaggcgcccccagaggcggcggcagaggcggcagcagaagcgacagaggcggcggcagaagcagatactag

SEQ ID NO: 12749 - DNA, 309 bp, synthetic construct
  misc_feature 1..309: note = Description of Artificial Sequence: Synthetic coding sequence
  source 1..309: mol_type = other DNA
tgaatgttcatctgcccccaggagatgatgggcatcctgctgaagaccgccatccaggccgagatcacccaggtgctggtgatcctggagatcatgcaccaccaccacgagatcatcctgaccgtgatcatggtgatccccgtgcacgtgatgaccatccaccaggaggacatcgccatcgagatggacatggtggtgatcgtgaccatccagatcatccaggtggaggtgcccaccgagatccacatgagagtgatggtgggcgacttcgcccactacggcagaggcgtgctgatcgacagccagtag

SEQ ID NO: 12750 - DNA, 591 bp, synthetic construct
  misc_feature 1..591: note = Description of Artificial Sequence: Synthetic coding sequence
  source 1..591: mol_type = other DNA
atggtggaggccgacagacccggcaagctgttcatcggcggcctgaacaccgagaccaacgagaaggccctggaggccgtgttcggcaagtacggcagaatcgtggaggtgctgctgatgaaggacagagagaccaacaagagcagaggcttcgccttcgtgaccttcgagagccccgccgacgccaaggacgccgccagagacatgaacggcaagctgctgtaccacgtggaggagatcgtgatggaggtgcacctggagggcaacagatgccccctggtggagatgttcatctgcccccaggagatgatgggcatcctgctgaagaccgccatccaggccgagatcacccaggtgctggtgatcctggagatcatgcaccaccaccacgagatcatcctgaccgtgatcatggtgatccccgtgcacgtgatgaccatccaccaggaggacatcgccatcgagatggacatggtggtgatcgtgaccatccagatcatccaggtggaggtgcccaccgagatccacatgagagtgatggtgggcgacttcgcccactacggcagaggcgtgctgatcgacagccagtag

SEQ ID NO: 12751 - DNA, 1137 bp, synthetic construct
  misc_feature 1..1137: note = Description of Artificial Sequence: Synthetic coding sequence
  source 1..1137: mol_type = other DNA
atggtggaggccgacagacccggcaagctgttcatcggcggcctgaacaccgagaccaacgagaaggccctggaggccgtgttcggcaagtacggcagaatcgtggaggtgctgctgatgaaggacagagagagccccgccgacgccaaggacgccgccagagacatgaacggcaagagcctggacggcaaggccatcaaggtggagcaggccaccaagcccagcttcgagagcggcagaagaggccccccccccccccccagaagcagaggcccccccagaggcctgagaggcggcagaggcggcagcggcggcaccagaggcccccccagcagaggcggccacatggacgacggcggctacagcatgaacttcaacatgagcagcagcagaggccccctgcccgtgaagagaggccccccccccagaagcggcggccccccccccaagagaagcgcccccagcggccccgtgagaagcagcagcggcatgggcggcagagcccccgtgagcagaggcagagacagctacggcggcccccccagaagagagcccctgcccagcagaagagacgtgtacctgagccccagagacgacggctacagcaccaaggacagctacagcagcagagactaccccagcagcagagacaccagagactacgcccccccccccagagactacacctacagagactacggccacagcagcagcagagacgactaccccagcagaggctacagcgacagagacggctacggcagagacagagactacagcgaccaccccagcggcggcagctacagagacagctacgagagctacggcaacagcagaagcgccccccccaccagaggccccccccccagctacggcggcagcagcagatacgacgactacagcagcagcagagacggctacggcggcagcagagacagctacagcagcagcagaagcgacctgtacagcagcggcagagacagagtgggcagacaggagagaggcctgccccccagcatggagagaggctaccccccccccagagacagctacagcagcagcagcagaggcgcccccagaggcggcggcagaggcggcagcagaagcgacagaggcggcggcagaagcagatactag

SEQ ID NO: 12752 - DNA, 1443 bp, synthetic construct
  misc_feature 1..1443: note = Description of Artificial Sequence: Synthetic coding sequence
  source 1..1443: mol_type = other DNA
atggccagcgacagcatcttcgagagcttccccagctacccccagtgcttcatgagagagtgcatcctgggcatgaaccccagcagagacgtgcacgacgccagcaccagcagaagattcaccccccccagcaccgccctgagccccggcaagatgagcgaggccctgcccctgggcgcccccgacgccggcgccgccctggccggcaagctgagaagcggcgacagaagcatggtggaggtgctggccgaccaccccggcgagctggtgagaaccgacagccccaacttcctgtgcagcgtgctgcccacccactggagatgcaacaagaccctgcccatcgccttcaaggtggtggccctgggcgacgtgcccgacggcaccctggtgaccgtgatggccggcaacgacgagaactacagcgccgagctgagaaacgccaccgccgccatgaagaaccaggtggccagattcaacgacctgagattcgtgggcagaagcggcagaggcaagagcttcaccctgaccatcaccgtgttcaccaaccccccccaggtggccacctaccacagagccatcaagatcaccgtggacggccccagagagcccagaagacacagacagaagctggacgaccagaccaagcccggcagcctgagcttcagcgagagactgagcgagctggagcagctgagaagaaccgccatgagagtgagcccccaccaccccgcccccacccccaaccccagagccagcctgaaccacagcaccgccttcaacccccagccccagagccagatgcaggacaccagacagatccagcccagccccccctggagctacgaccagagctaccagtacctgggcagcatcgccagccccagcgtgcaccccgccacccccatcagccccggcagagccagcggcatgaccaccctgagcgccgagctgagcagcagactgagcaccgcccccgacctgaccgccttcagcgaccccagacagttccccgccctgcccagcatcagcgaccccagaatgcactaccccggcgccttcacctacagccccacccccgtgaccagcggcatcggcatcggcatgagcgccatgggcagcgccaccagataccacacctacctgccccccccctaccccggcagcagccaggcccagggcggccccttccaggccagcagccccagctaccacctgtactacggcgccagcgccggcagctaccagttcagcatggtgggcggcgagagaagcccccccagaatcctgcccccctgcaccaacgccagcaccggcagcgccctgctgaaccccagcctgcccaaccagagcgacgtggtggaggccgagggcagccacagcaacagccccaccaacatggcccccagcgccagactggaggaggccgtgtggagaccctactag

SEQ ID NO: 12753 - DNA, 1407 bp, synthetic construct
  misc_feature 1..1407: note = Description of Artificial Sequence: Synthetic coding sequence
  source 1..1407: mol_type = other DNA
atgcccgccgcccccagaggccccgcccagggcgaggccgccgccagaaccagaagcagagacgccagcaccagcagaagattcaccccccccagcaccgccctgagccccggcaagatgagcgaggccctgcccctgggcgcccccgacgccggcgccgccctggccggcaagctgagaagcggcgacagaagcatggtggaggtgctggccgaccaccccggcgagctggtgagaaccgacagccccaacttcctgtgcagcgtgctgcccacccactggagatgcaacaagaccctgcccatcgccttcaaggtggtggccctgggcgacgtgcccgacggcaccctggtgaccgtgatggccggcaacgacgagaactacagcgccgagctgagaaacgccaccgccgccatgaagaaccaggtggccagattcaacgacctgagattcgtgggcagaagcggcagaggcaagagcttcaccctgaccatcaccgtgttcaccaaccccccccaggtggccacctaccacagagccatcaagatcaccgtggacggccccagagagcccagaagacacagacagaagctggacgaccagaccaagcccggcagcctgagcttcagcgagagactgagcgagctggagcagctgagaagaaccgccatgagagtgagcccccaccaccccgcccccacccccaaccccagagccagcctgaaccacagcaccgccttcaacccccagccccagagccagatgcaggacaccagacagatccagcccagccccccctggagctacgaccagagctaccagtacctgggcagcatcgccagccccagcgtgcaccccgccacccccatcagccccggcagagccagcggcatgaccaccctgagcgccgagctgagcagcagactgagcaccgcccccgacctgaccgccttcagcgaccccagacagttccccgccctgcccagcatcagcgaccccagaatgcactaccccggcgccttcacctacagccccacccccgtgaccagcggcatcggcatcggcatgagcgccatgggcagcgccaccagataccacacctacctgccccccccctaccccggcagcagccaggcccagggcggccccttccaggccagcagccccagctaccacctgtactacggcgccagcgccggcagctaccagttcagcatggtgggcggcgagagaagcccccccagaatcctgcccccctgcaccaacgccagcaccggcagcgccctgctgaaccccagcctgcccaaccagagcgacgtggtggaggccgagggcagccacagcaacagccccaccaacatggcccccagcgccagactggaggaggccgtgtggagaccctactag

SEQ ID NO: 12754 - DNA, 1362 bp, synthetic construct
  misc_feature 1..1362: note = Description of Artificial Sequence: Synthetic coding sequence
  source 1..1362: mol_type = other DNA
atgagaatccccgtggacgccagcaccagcagaagattcaccccccccagcaccgccctgagccccggcaagatgagcgaggccctgcccctgggcgcccccgacgccggcgccgccctggccggcaagctgagaagcggcgacagaagcatggtggaggtgctggccgaccaccccggcgagctggtgagaaccgacagccccaacttcctgtgcagcgtgctgcccacccactggagatgcaacaagaccctgcccatcgccttcaaggtggtggccctgggcgacgtgcccgacggcaccctggtgaccgtgatggccggcaacgacgagaactacagcgccgagctgagaaacgccaccgccgccatgaagaaccaggtggccagattcaacgacctgagattcgtgggcagaagcggcagaggcaagagcttcaccctgaccatcaccgtgttcaccaaccccccccaggtggccacctaccacagagccatcaagatcaccgtggacggccccagagagcccagaagacacagacagaagctggacgaccagaccaagcccggcagcctgagcttcagcgagagactgagcgagctggagcagctgagaagaaccgccatgagagtgagcccccaccaccccgcccccacccccaaccccagagccagcctgaaccacagcaccgccttcaacccccagccccagagccagatgcaggacaccagacagatccagcccagccccccctggagctacgaccagagctaccagtacctgggcagcatcgccagccccagcgtgcaccccgccacccccatcagccccggcagagccagcggcatgaccaccctgagcgccgagctgagcagcagactgagcaccgcccccgacctgaccgccttcagcgaccccagacagttccccgccctgcccagcatcagcgaccccagaatgcactaccccggcgccttcacctacagccccacccccgtgaccagcggcatcggcatcggcatgagcgccatgggcagcgccaccagataccacacctacctgccccccccctaccccggcagcagccaggcccagggcggccccttccaggccagcagccccagctaccacctgtactacggcgccagcgccggcagctaccagttcagcatggtgggcggcgagagaagcccccccagaatcctgcccccctgcaccaacgccagcaccggcagcgccctgctgaaccccagcctgcccaaccagagcgacgtggtggaggccgagggcagccacagcaacagccccaccaacatggcccccagcgccagactggaggaggccgtgtggagaccctactag

SEQ ID NO: 12755 - DNA, 1428 bp, synthetic construct
  misc_feature 1..1428: note = Description of Artificial Sequence: Synthetic coding sequence
  source 1..1428: mol_type = other DNA
atgaaccccagcagagacgtgcacgacgccagcaccagcagaagattcaccccccccagcaccgccctgagccccggcaagatgagcgaggccctgcccctgggcgcccccgacgccggcgccgccctggccggcaagctgagaagcggcgacagaagcatggtggaggtgctggccgaccaccccggcgagctggtgagaaccgacagccccaacttcctgtgcagcgtgctgcccacccactggagatgcaacaagaccctgcccatcgccttcaaggtggtggccctgggcgacgtgcccgacggcaccctggtgaccgtgatggccggcaacgacgagaactacagcgccgagctgagaaacgccaccgccgccatgaagaaccaggtggccagattcaacgacctgagattcgtgggcagaagcggcagaggcaagagcttcaccctgaccatcaccgtgttcaccaaccccccccaggtggccacctaccacagagccatcaagatcaccgtggacggccccagagagcccagaagacacagacagaagctggacgaccagaccaagcccggcagcctgagcttcagcgagagactgagcgagctggagcagctgagaagaaccgccatgagagtgagcccccaccaccccgcccccacccccaaccccagagccagcctgaaccacagcaccgccttcaacccccagccccagagccagatgcaggacaccagacagatccagcccagccccccctggagctacgaccagagctaccagtacctgggcagcatcgccagccccagcgtgcaccccgccacccccatcagccccggcagagccagcggcatgaccaccctgagcgccgagctgagcagcagactgagcaccgcccccgacctgaccgccttcagcgaccccagacagttccccgccctgcccagcatcagcgaccccagaatgcactaccccggcgccttcacctacagccccacccccgtgaccagcggcatcggcatcggcatgagcgccatgggcagcgccaccagataccacacctacctgccccccccctaccccggcagcagccaggcccagggcggccccttccaggccagcagccccagctaccacctgtactacggcgccagcgccggcagctaccagttcagcatggtgggcggcgagagaagcccccccagaatcctgcccccctgcaccaacgccagcaccggcagcgccctgctgaaccccagcctgcccaaccagagcgacgtggtggaggccgagggcagccacagcaacagccccaccaacatggccagagccagctgcagcagacaggccagaagagaccccggcccctgggccagaccccccagctggggcagaggcagacccaccgccagaatcagcctgtag

SEQ ID NO: 12756 - DNA, 99 bp, synthetic construct
  misc_feature 1..99: note = Description of Artificial Sequence: Synthetic coding sequence
  source 1..99: mol_type = other DNA
atggccagcgacagcatcttcgagagcttccccagctacccccagtgcttcatgagagagtgcatcctgggcatgaaccccagcagagacgtgcactag

SEQ ID NO: 12757 - DNA, 414 bp, synthetic construct
  misc_feature 1..414: note = Description of Artificial Sequence: Synthetic coding sequence
  source 1..414: mol_type = other DNA
atgcaggacaccagacagatccagcccagccccccctggagctacgaccagagctaccagtacctgggcagcatcgccagccccagcgtgcaccccgccacccccatcagccccggcagagccagcggcatgaccaccctgagcgccgagctgagcagcagactgagcaccgcccccgacctgaccgccttcagcgaccccagacagttccccgccctgcccagcatcagcgaccccagaatgcactaccccggcgccttcacctacagccccacccccgtgaccagcggcatcggcatcggcatgagcgccatgggcagcgccaccagataccacacctacctgccccccccctaccccggcagcagccaggcccagggcggccccttccaggccagcagccccagctactag

SEQ ID NO: 12758 - DNA, 1443 bp, synthetic construct; identical to SEQ ID NO: 12752
  misc_feature 1..1443: note = Description of Artificial Sequence: Synthetic coding sequence
  source 1..1443: mol_type = other DNA

SEQ ID NO: 12759 - DNA, 576 bp, synthetic construct
  misc_feature 1..576: note = Description of Artificial Sequence: Synthetic coding sequence
  source 1..576: mol_type = other DNA
atgaaccccagcagagacgtgcacgacgccagcaccagcagaagattcaccccccccagcaccgccctgagccccggcaagatgagcgaggccctgcccctgggcgcccccgacgccggcgccgccctggccggcaagctgagaagcggcgacagaagcatggtggaggtgctggccgaccaccccggcgagctggtgagaaccgacagccccaacttcctgtgcagcgtgctgcccacccactggagatgcaacaagaccctgcccatcgccttcaaggtggtggccctgggcgacgtgcccgacggcaccctggtgaccgtgatggccggcaacgacgagaactacagcgccgagctgagaaacgccaccgccgccatgaagaaccaggtggccagattcaacgacctgagattcgtgggcagaagcggcagaggcaagagcttcaccctgaccatcaccgtgttcaccaaccccccccaggtggccacctaccacagagccatcaagatcaccgtggacggccccagagagcccagaaacagcctgacctggcccagatacccccacatctag

SEQ ID NO: 12760 - DNA, 753 bp, synthetic construct
  misc_feature 1..753: note = Description of Artificial Sequence: Synthetic coding sequence
  source 1..753: mol_type = other DNA
atgagaatccccgtggacgccagcaccagcagaagattcaccccccccagcaccgccctgagccccggcaagatgagcgaggccctgcccctgggcgcccccgacgccggcgccgccctggccggcaagctgagaagcggcgacagaagcatggtggaggtgctggccgaccaccccggcgagctggtgagaaccgacagccccaacttcctgtgcagcgtgctgcccacccactggagatgcaacaagaccctgcccatcgccttcaaggtggtggccctgggcgacgtgcccgacggcaccctggtgaccgtgatggccggcaacgacgagaactacagcgccgagctgagaaacgccaccgccgccatgaagaaccaggtggccagattcaacgacctgagattcgtgggcagaagcggcagaggcaagagcttcaccctgaccatcaccgtgttcaccaaccccccccaggtggccacctaccacagagccatcaagatcaccgtggacggccccagagagcccagaagacacagacagaagctggacgaccagaccaagcccggcagcctgagcttcagcgagagactgagcgagctggagcagctgagaagaaccgccatgagagtgagcccccaccaccccgcccccacccccaaccccagagccagcctgaaccacagcaccgccttcaacccccagccccagagccagatgcaggaggaggacaccgccccctggagatgctag

SEQ ID NO: 12761 - DNA, 1770 bp, synthetic construct
  misc_feature 1..1770: note = Description of Artificial Sequence: Synthetic coding sequence
  source 1..1770: mol_type = other DNA
atgctgcacagcccccacaagcagccccagaaccacaagtgcggcgccaacttcctgcaggaggacagcaagaagagcctggtgttcaagtggctgatcagcgccggccactaccagccccccagacccaccgagagcttcaaggccgccagcagcatctacaacagaggctacaagttctacctgaagaagaagggcggcaccatggccagcaacagcctgttcagcaccgtgaccccctgccagcagaacttcttctgggaccccagcaccagcagaagattcagcccccccagcagcagcctgcagcccggcaagatgagcgacgtgagccccgtggtggccgcccagcagcagcagcagcagcagcagcagcagcagcagcagcagcagcagcagcagcagcagcagcagcaggaggccgccgccgccgccgccgccgccgccgccgccgccgccgccgccgccgccgtgcccagactgagacccccccacgacaacagaaccatggtggagatcatcgccgaccaccccgccgagctggtgagaaccgacagccccaacttcctgtgcagcgtgctgcccagccactggagatgcaacaagaccctgcccgtggccttcaaggtggtggccctgggcgaggtgcccgacggcaccgtggtgaccgtgatggccggcaacgacgagaactacagcgccgagctgagaaacgccagcgccgtgatgaagaaccaggtggccagattcaacgacctgagattcgtgggcagaagcggcagaggcaagagcttcaccctgaccatcaccgtgttcaccaaccccccccaggtggccacctaccacagagccatcaaggtgaccgtggacggccccagagagcccagaagacacagacagaagctggacgacagcaagcccagcctgttcagcgacagactgagcgacctgggcagaatcccccaccccagcatgagagtgggcgtgcccccccagaaccccagacccagcctgaacagcgcccccagccccttcaacccccagggccagagccagatcaccgaccccagacaggcccagagcagccccccctggagctacgaccagagctaccccagctacctgagccagatgaccagccccagcatccacagcaccacccccctgagcagcaccagaggcaccggcctgcccgccatcaccgacgtgcccagaagaatcagcgacgacgacaccgccaccagcgacttctgcctgtggcccagcaccctgagcaagaagagccaggccggcgccagcgagctgggccccttcagcgaccccagacagttccccagcatcagcagcctgaccgagagcagattcagcaaccccagaatgcactaccccgccaccttcacctacaccccccccgtgaccagcggcatgagcctgggcatgagcgccaccacccactaccacacctacctgccccccccctaccccggcagcagccagagccagagcggccccttccagaccagcagcaccccctacctgtactacggcaccagcagcggcagctaccagttccccatggtgcccggcggcgacagaagccccagcagaatgctgcccccctgcaccaccaccagcaacggcagcaccctgctgaaccccaacctgcccaaccagaacgacggcgtggacgccgacggcagccacagcagcagccccaccgtgctgaacagcagcggcagaatggacgagagcgtgtggagaccctactag

SEQ ID NO: 12762 - DNA, 1524 bp, synthetic construct
  misc_feature 1..1524: note = Description of Artificial Sequence: Synthetic coding sequence
  source 1..1524: mol_type = other DNA
atgagaatccccgtggaccccagcaccagcagaagattcagcccccccagcagcagcctgcagcccggcaagatgagcgacgtgagccccgtggtggccgcccagcagcagcagcagcagcagcagcagcagcagcagcagcagcagcagcagcagcagcagcagcagcaggaggccgccgccgccgccgccgccgccgccgccgccgccgccgccgccgccgccgtgcccagactgagacccccccacgacaacagaaccatggtggagatcatcgccgaccaccccgccgagctggtgagaaccgacagccccaacttcctgtgcagcgtgctgcccagccactggagatgcaacaagaccctgcccgtggccttcaaggtggtggccctgggcgaggtgcccgacggcaccgtggtgaccgtgatggccggcaacgacgagaactacagcgccgagctgagaaacgccagcgccgtgatgaagaaccaggtggccagattcaacgacctgagattcgtgggcagaagcggcagaggcaagagcttcaccctgaccatcaccgtgttcaccaaccccccccaggtggccacctaccacagagccatcaaggtgaccgtggacggccccagagagcccagaagacacagacagaagctggacgacagcaagcccagcctgttcagcgacagactgagcgacctgggcagaatcccccaccccagcatgagagtgggcgtgcccccccagaaccccagacccagcctgaacagcgcccccagccccttcaacccccagggccagagccagatcaccgaccccagacaggcccagagcagccccccctggagctacgaccagagctaccccagctacctgagccagatgaccagccccagcatccacagcaccacccccctgagcagcaccagaggcaccggcctgcccgccatcaccgacgtgcccagaagaatcagcgacgacgacaccgccaccagcgacttctgcctgtggcccagcaccctgagcaagaagagccaggccggcgccagcgagctgggccccttcagcgaccccagacagttccccagcatcagcagcctgaccgagagcagattcagcaaccccagaatgcactaccccgccaccttcacctacaccccccccgtgaccagcggcatgagcctgggcatgagcgccaccacccactaccacacctacctgccccccccctaccccggcagcagccagagccagagcggccccttccagaccagcagcaccccctacctgtactacggcaccagcagcggcagctaccagttccccatggtgcccggcggcgacagaagccccagcagaatgctgcccccctgcaccaccaccagcaacggcagcaccctgctgaaccccaacctgcccaaccagaacgacggcgtggacgccgacggcagccacagcagcagccccaccgtgctgaacagcagcggcagaatggacgagagcgtgtggagaccctactag

SEQ ID NO: 12763 - DNA, 1458 bp, synthetic construct
  misc_feature 1..1458: note = Description of Artificial Sequence: Synthetic coding sequence
  source 1..1458: mol_type = other DNA
atgagaatccccgtggaccccagcaccagcagaagattcagcccccccagcagcagcctgcagcccggcaagatgagcgacgtgagccccgtggtggccgcccagcagcagcagcagcagcagcagcagcagcagcagcagcagcagcagcagcagcagcagcagcagcaggaggccgccgccgccgccgccgccgccgccgccgccgccgccgccgccgccgccgtgcccagactgagacccccccacgacaacagaaccatggtggagatcatcgccgaccaccccgccgagctggtgagaaccgacagccccaacttcctgtgcagcgtgctgcccagccactggagatgcaacaagaccctgcccgtggccttcaaggtggtggccctgggcgaggtgcccgacggcaccgtggtgaccgtgatggccggcaacgacgagaactacagcgccgagctgagaaacgccagcgccgtgatgaagaaccaggtggccagattcaacgacctgagattcgtgggcagaagcggcagaggcaagagcttcaccctgaccatcaccgtgttcaccaaccccccccaggtggccacctaccacagagccatcaaggtgaccgtggacggccccagagagcccagaagacacagacagaagctggacgacagcaagcccagcctgttcagcgacagactgagcgacctgggcagaatcccccaccccagcatgagagtgggcgtgcccccccagaaccccagacccagcctgaacagcgcccccagccccttcaacccccagggccagagccagatcaccgaccccagacaggcccagagcagccccccctggagctacgaccagagctaccccagctacctgagccagatgaccagccccagcatccacagcaccacccccctgagcagcaccagaggcaccggcctgcccgccatcaccgacgtgcccagaagaatcagcggcgccagcgagctgggccccttcagcgaccccagacagttccccagcatcagcagcctgaccgagagcagattcagcaaccccagaatgcactaccccgccaccttcacctacaccccccccgtgaccagcggcatgagcctgggcatgagcgccaccacccactaccacacctacctgccccccccctaccccggcagcagccagagccagagcggccccttccagaccagcagcaccccctacctgtactacggcaccagcagcggcagctaccagttccccatggtgcccggcggcgacagaagccccagcagaatgctgcccccctgcaccaccaccagcaacggcagcaccctgctgaaccccaacctgcccaaccagaacgacggcgtggacgccgacggcagccacagcagcagccccaccgtgctgaacagcagcggcagaatggacgagagcgtgtggagaccctactag

SEQ ID NO: 12764 - DNA, 1500 bp, synthetic construct
  misc_feature 1..1500: note = Description of Artificial Sequence: Synthetic coding sequence
  source 1..1500: mol_type = other DNA
atggccagcaacagcctgttcagcaccgtgaccccctgccagcagaacttcttctgggaccccagcaccagcagaagattcagcccccccagcagcagcctgcagcccggcaagatgagcgacgtgagccccgtggtggccgcccagcagcagcagcagcagcagcagcagcagcagcagcagcagcagcagcagcagcagcagcagcagcaggaggccgccgccgccgccgccgccgccgccgccgccgccgccgccgccgccgccgtgcccagactgagacccccccacgacaacagaaccatggtggagatcatcgccgaccaccccgccgagctggtgagaaccgacagccccaacttcctgtgcagcgtgctgcccagccactggagatgcaacaagaccctgcccgtggccttcaaggtggtggccctgggcgaggtgcccgacggcaccgtggtgaccgtgatggccggcaacgacgagaactacagcgccgagctgagaaacgccagcgccgtgatgaagaaccaggtggccagattcaacgacctgagattcgtgggcagaagcggcagaggcaagagcttcaccctgaccatcaccgtgttcaccaaccccccccaggtggccacctaccacagagccatcaaggtgaccgtggacggccccagagagcccagaagacacagacagaagctggacgacagcaagcccagcctgttcagcgacagactgagcgacctgggcagaatcccccaccccagcatgagagtgggcgtgcccccccagaaccccagacccagcctgaacagcgcccccagccccttcaacccccagggccagagccagatcaccgaccccagacaggcccagagcagccccccctggagctacgaccagagctaccccagctacctgagccagatgaccagccccagcatccacagcaccacccccctgagcagcaccagaggcaccggcctgcccgccatcaccgacgtgcccagaagaatcagcggcgccagcgagctgggccccttcagcgaccccagacagttccccagcatcagcagcctgaccgagagcagattcagcaaccccagaatgcactaccccgccaccttcacctacaccccccccgtgaccagcggcatgagcctgggcatgagcgccaccacccactaccacacctacctgccccccccctaccccggcagcagccagagccagagcggccccttccagaccagcagcaccccctacctgtactacggcaccagcagcggcagctaccagttccccatggtgcccggcggcgacagaagccccagcagaatgctgcccccctgcaccaccaccagcaacggcagcaccctgctgaaccccaacctgcccaaccagaacgacggcgtggacgccgacggcagccacagcagcagccccaccgtgctgaacagcagcggcagaatggacgagagcgtgtggagaccctactag

SEQ ID NO: 12765 - DNA, 1566 bp, synthetic construct
  misc_feature 1..1566: note = Description of Artificial Sequence: Synthetic coding sequence
  source 1..1566: mol_type = other DNA
atggccagcaacagcctgttcagcaccgtgaccccctgccagcagaacttcttctgggaccccagcaccagcagaagattcagcccccccagcagcagcctgcagcccggcaagatgagcgacgtgagccccgtggtggccgcccagcagcagcagcagcagcagcagcagcagcagcagcagcagcagcagcagcagcagcagcagcagcaggaggccgccgccgccgccgccgccgccgccgccgccgccgccgccgccgccgccgtgcccagactgagacccccccacgacaacagaaccatggtggagatcatcgccgaccaccccgccgagctggtgagaaccgacagccccaacttcctgtgcagcgtgctgcccagccactggagatgcaacaagaccctgcccgtggccttcaaggtggtggccctgggcgaggtgcccgacggcaccgtggtgaccgtgatggccggcaacgacgagaactacagcgccgagctgagaaacgccagcgccgtgatgaagaaccaggtggccagattcaacgacctgagattcgtgggcagaagcggcagaggcaagagcttcaccctgaccatcaccgtgttcaccaaccccccccaggtggccacctaccacagagccatcaaggtgaccgtggacggccccagagagcccagaagacacagacagaagctggacgacagcaagcccagcctgttcagcgacagactgagcgacctgggcagaatcccccaccccagcatgagagtgggcgtgcccccccagaaccccagacccagcctgaacagcgcccccagccccttcaacccccagggccagagccagatcaccgaccccagacaggcccagagcagccccccctggagctacgaccagagctaccccagctacctgagccagatgaccagccccagcatccacagcaccacccccctgagcagcaccagaggcaccggcctgcccgccatcaccgacgtgcccagaagaatcagcgacgacgacaccgccaccagcgacttctgcctgtggcccagcaccctgagcaagaagagccaggccggcgccagcgagctgggccccttcagcgaccccagacagttccccagcatcagcagcctgaccgagagcagattcagcaaccccagaatgcactaccccgccaccttcacctacaccccccccgtgaccagcggcatgagcctgggcatgagcgccaccacccactaccacacctacctgccccccccctaccccggcagcagccagagccagagcggccccttccagaccagcagcaccccctacctgtactacggcaccagcagcggcagctaccagttccccatggtgcccggcggcgacagaagccccagcagaatgctgcccccctgcaccaccaccagcaacggcagcaccctgctgaaccccaacctgcccaaccagaacgacggcgtggacgccgacggcagccacagcagcagccccaccgtgctgaacagcagcggcagaatggacgagagcgtgtggagaccctactag

SEQ ID NO: 12766 - DNA, 1566 bp, synthetic construct; identical to SEQ ID NO: 12765
  misc_feature 1..1566: note = Description of Artificial Sequence: Synthetic coding sequence
  source 1..1566: mol_type = other DNA

SEQ ID NO: 12767 - DNA, 1704 bp, synthetic construct
  misc_feature 1..1704: note = Description of Artificial Sequence: Synthetic coding sequence
  source 1..1704: mol_type = other DNA
atgctgcacagcccccacaagcagccccagaaccacaagtgcggcgccaacttcctgcaggaggacagcaagaagagcctggtgttcaagtggctgatcagcgccggccactaccagccccccagacccaccgagagcttcaaggccgccagcagcatctacaacagaggctacaagttctacctgaagaagaagggcggcaccatggccagcaacagcctgttcagcaccgtgaccccctgccagcagaacttcttctgggaccccagcaccagcagaagattcagcccccccagcagcagcctgcagcccggcaagatgagcgacgtgagccccgtggtggccgcccagcagcagcagcagcagcagcagcagcagcagcagcagcagcagcagcagcagcagcagcagcagcaggaggccgccgccgccgccgccgccgccgccgccgccgccgccgccgccgccgccgtgcccagactgagacccccccacgacaacagaaccatggtggagatcatcgccgaccaccccgccgagctggtgagaaccgacagccccaacttcctgtgcagcgtgctgcccagccactggagatgcaacaagaccctgcccgtggccttcaaggtggtggccctgggcgaggtgcccgacggcaccgtggtgaccgtgatggccggcaacgacgagaactacagcgccgagctgagaaacgccagcgccgtgatgaagaaccaggtggccagattcaacgacctgagattcgtgggcagaagcggcagaggcaagagcttcaccctgaccatcaccgtgttcaccaaccccccccaggtggccacctaccacagagccatcaaggtgaccgtggacggccccagagagcccagaagacacagacagaagctggacgacagcaagcccagcctgttcagcgacagactgagcgacctgggcagaatcccccaccccagcatgagagtgggcgtgcccccccagaaccccagacccagcctgaacagcgcccccagccccttcaacccccagggccagagccagatcaccgaccccagacaggcccagagcagccccccctggagctacgaccagagctaccccagctacctgagccagatgaccagccccagcatccacagcaccacccccctgagcagcaccagaggcaccggcctgcccgccatcaccgacgtgcccagaagaatcagcggcgccagcgagctgggccccttcagcgaccccagacagttccccagcatcagcagcctgaccgagagcagattcagcaaccccagaatgcactaccccgccaccttcacctacaccccccccgtgaccagcggcatgagcctgggcatgagcgccaccacccactaccacacctacctgccccccccctaccccggcagcagccagagccagagcggccccttccagaccagcagcaccccctacctgtactacggcaccagcagcggcagctaccagttccccatggtgcccggcggcgacagaagccccagcagaatgctgcccccctgcaccaccaccagcaacggcagcaccctgctgaaccccaacctgcccaaccagaacgacggcgtggacgccgacggcagccacagcagcagccccaccgtgctgaacagcagcggcagaatggacgagagcgtgtggagaccctactag

SEQ ID NO: 12768 - DNA, 1248 bp, synthetic construct
  misc_feature 1..1248: note = Description of Artificial Sequence: Synthetic coding sequence
  source 1..1248: mol_type = other DNA
atgagaatccccgtggaccccagcaccagcagaagattcaccccccccagccccgccttcccctgcggcggcggcggcggcaagatgggcgagaacagcggcgccctgagcgcccaggccgccgtgggccccggcggcagagccagacccgaggtgagaagcatggtggacgtgctggccgaccacgccggcgagctggtgagaaccgacagccccaacttcctgtgcagcgtgctgcccagccactggagatgcaacaagaccctgcccgtggccttcaaggtggtggccctgggcgacgtgcccgacggcaccgtggtgaccgtgatggccggcaacgacgagaactacagcgccgagctgagaaacgccagcgccgtgatgaagaaccaggtggccagattcaacgacctgagattcgtgggcagaagcggcagaggcaagagcttcaccctgaccatcaccgtgttcaccaaccccacccaggtggccacctaccacagagccatcaaggtgaccgtggacggccccagagagcccagaagacacagacagaagctggaggaccagaccaagcccttccccgacagattcggcgacctggagagactgagaatgagagtgacccccagcacccccagccccagaggcagcctgagcaccaccagccacttcagcagccagccccagacccccatccagggcaccagcgagctgaaccccttcagcgaccccagacagttcgacagaagcttccccaccctgcccaccctgaccgagagcagattccccgaccccagaatgcactaccccggcgccatgagcgccgccttcccctacagcgccacccccagcggcaccagcatcagcagcctgagcgtggccggcatgcccgccaccagcagattccaccacacctacctgccccccccctaccccggcgccccccagaaccagagcggccccttccaggccaaccccagcccctaccacctgtactacggcaccagcagcggcagctaccagttcagcatggtggccggcagcagcagcggcggcgacagaagccccaccagaatgctggccagctgcaccagcagcgccgccagcgtggccgccggcaacctgatgaaccccagcctgggcggccagagcgacggcgtggaggccgacggcagccacagcaacagccccaccgccctgagcacccccggcagaatggacgaggccgtgtggagaccctactag

SEQ ID NO: 12769 - DNA, 1290 bp, synthetic construct
  misc_feature 1..1290: note = Description of Artificial Sequence: Synthetic coding sequence
  source 1..1290: mol_type = other DNA
atggccagcaacagcatcttcgacagcttccccacctacagccccaccttcatcagagaccccagcaccagcagaagattcaccccccccagccccgccttcccctgcggcggcggcggcggcaagatgggcgagaacagcggcgccctgagcgcccaggccgccgtgggccccggcggcagagccagacccgaggtgagaagcatggtggacgtgctggccgaccacgccggcgagctggtgagaaccgacagccccaacttcctgtgcagcgtgctgcccagccactggagatgcaacaagaccctgcccgtggccttcaaggtggtggccctgggcgacgtgcccgacggcaccgtggtgaccgtgatggccggcaacgacgagaactacagcgccgagctgagaaacgccagcgccgtgatgaagaaccaggtggccagattcaacgacctgagattcgtgggcagaagcggcagaggcaagagcttcaccctgaccatcaccgtgttcaccaaccccacccaggtggccacctaccacagagccatcaaggtgaccgtggacggccccagagagcccagaagacacagacagaagctggaggaccagaccaagcccttccccgacagattcggcgacctggagagactgagaatgagagtgacccccagcacccccagccccagaggcagcctgagcaccaccagccacttcagcagccagccccagacccccatccagggcaccagcgagctgaaccccttcagcgaccccagacagttcgacagaagcttccccaccctgcccaccctgaccgagagcagattccccgaccccagaatgcactaccccggcgccatgagcgccgccttcccctacagcgccacccccagcggcaccagcatcagcagcctgagcgtggccggcatgcccgccaccagcagattccaccacacctacctgccccccccctaccccggcgccccccagaaccagagcggccccttccaggccaaccccagcccctaccacctgtactacggcaccagcagcggcagctaccagttcagcatggtggccggcagcagcagcggcggcgacagaagccccaccagaatgctggccagctgcaccagcagcgccgccagcgtggccgccggcaacctgatgaaccccagcctgggcggccagagcgacggcgtggaggccgacggcagccacagcaacagccccaccgccctgagcacccccggcagaatggacgaggccgtgtggagaccctactag

SEQ ID NO: 12770 - DNA, 1290 bp, synthetic construct; identical to SEQ ID NO: 12769
  misc_feature 1..1290: note = Description of Artificial Sequence: Synthetic coding sequence
  source 1..1290: mol_type = other DNA

SEQ ID NO: 12771 - DNA, 1089 bp, synthetic construct
  misc_feature 1..1089: note = Description of Artificial Sequence: Synthetic coding sequence
  source 1..1089: mol_type = other DNA
atgagaatccccgtggaccccagcaccagcagaagattcaccccccccagccccgccttcccctgcggcggcggcggcggcaagatgggcgagaacagcggcgccctgagcgcccaggccgccgtgggccccggcggcagagccagacccgaggtgagaagcatggtggacgtgctggccgaccacgccggcgagctggtgagaaccgacagccccaacttcctgtgcagcgtgctgcccagccactggagatgcaacaagaccctgcccgtggccttcaaggtggtggccctgggcgacgtgcccgacggcaccgtggtgaccgtgatggccggcaacgacgagaactacagcgccgagctgagaaacgccagcgccgtgatgaagaaccaggtggccagattcaacgacctgagattcgtgggcagaagcggcagaggcaagagcttcaccctgaccatcaccgtgttcaccaaccccacccaggtggccacctaccacagagccatcaaggtgaccgtggacggccccagagagcccagaagaaccagcgagctgaaccccttcagcgaccccagacagttcgacagaagcttccccaccctgcccaccctgaccgagagcagattccccgaccccagaatgcactaccccggcgccatgagcgccgccttcccctacagcgccacccccagcggcaccagcatcagcagcctgagcgtggccggcatgcccgccaccagcagattccaccacacctacctgccccccccctaccccggcgccccccagaaccagagcggccccttccaggccaaccccagcccctaccacctgtactacggcaccagcagcggcagctaccagttcagcatggtggccggcagcagcagcggcggcgacagaagccccaccagaatgctggccagctgcaccagcagcgccgccagcgtggccgccggcaacctgatgaaccccagcctgggcggccagagcgacggcgtggaggccgacggcagccacagcaacagccccaccgccctgagcacccccggcagaatggacgaggccgtgtggagaccctactag

SEQ ID NO: 12772 - DNA, 969 bp, synthetic construct
  misc_feature 1..969: note = Description of Artificial Sequence: Synthetic coding sequence
  source 1..969: mol_type = other DNA
atggtggtggccctgggcgacgtgcccgacggcaccgtggtgaccgtgatggccggcaacgacgagaactacagcgccgagctgagaaacgccagcgccgtgatgaagaaccaggtggccagattcaacgacctgagattcgtgggcagaagcggcagaggcaagagcttcaccctgaccatcaccgtgttcaccaaccccacccaggtggccacctaccacagagccatcaaggtgaccgtggacggccccagagagcccagaagacacagacagaagctggaggaccagaccaagcccttccccgacagattcggcgacctggagagactgagaatgagagtgacccccagcacccccagccccagaggcagcctgagcaccaccagccacttcagcagccagccccagacccccatccagggcaccagcgagctgaaccccttcagcgaccccagacagttcgacagaagcttccccaccctgcccaccctgaccgagagcagattccccgaccccagaatgcactaccccggcgccatgagcgccgccttcccctacagcgccacccccagcggcaccagcatcagcagcctgagcgtggccggcatgcccgccaccagcagattccaccacacctacctgccccccccctaccccggcgccccccagaaccagagcggccccttccaggccaaccccagcccctaccacctgtactacggcaccagcagcggcagctaccagttcagcatggtggccggcagcagcagcggcggcgacagaagccccaccagaatgctggccagctgcaccagcagcgccgccagcgtggccgccggcaacctgatgaaccccagcctgggcggccagagcgacggcgtggaggccgacggcagccacagcaacagccccaccgccctgagcacccccggcagaatggacgaggccgtgtggagaccctactag

SEQ ID NO: 12773 - DNA, 2439 bp, synthetic construct
  misc_feature 1..2439: note = Description of Artificial Sequence: Synthetic coding sequence
  source 1..2439: mol_type = other DNA
atggacttcagcagactgcacatgtacagccccccccagtgcgtgcccgagaacaccggctacacctacgccctgagcagcagctacagcagcgacgccctggacttcgagaccgagcacaagctggaccccgtgttcgacagccccagaatgagcagaagaagcctgagactggccaccaccgcctgcaccctgggcgacggcgaggccgtgggcgccgacagcggcaccagcagcgccgtgagcctgaagaacagagccgccagaaccaccaagcagagaagaagcaccaacaagagcgccttcagcatcaaccacgtgagcagacaggtgaccagcagcggcgtgagccacggcggcaccgtgagcctgcaggacgccgtgaccagaagaccccccgtgctggacgagagctggatcagagagcagaccaccgtggaccacttctggggcctggacgacgacggcgacctgaagggcggcaacaaggccgccatccagggcaacggcgacgtgggcgccgccgccgccaccgcccacaacggcttcagctgcagcaactgcagcatgctgagcgagagaaaggacgtgctgaccgcccaccccgccgcccccggccccgtgagcagagtgtacagcagagacagaaaccagaagtgcgacgactgcaagggcaagagacacctggacgcccaccccggcagagccggcaccctgtggcacatctgggcctgcgccggctacttcctgctgcagatcctgagaagaatcggcgccgtgggccaggccgtgagcagaaccgcctggagcgccctgtggctggccgtggtggcccccggcaaggccgccagcggcgtgttctggtggctgggcatcggctggtaccagttcgtgaccctgatcagctggctgaacgtgttcctgctgaccagatgcctgagaaacatctgcaagttcctggtgctgctgatccccctgttcctgctgctggccggcctgagcctgagaggccagggcaacttcttcagcttcctgcccgtgctgaactgggccagcatgcacagaacccagagagtggacgacccccaggacgtgttcaagcccaccaccagcagactgaagcagcccctgcagggcgacagcgaggccttcccctggcactggatgagcggcgtggagcagcaggtggccagcctgagcggccagtgccaccaccacggcgagaacctgagagagctgaccaccctgctgcagaagctgcaggccagagtggaccagatggagggcggcgccgccggccccagcgccagcgtgagagacgccgtgggccagccccccagagagaccgacttcatggccttccaccaggagcacgaggtgagaatgagccacctggaggacatcctgggcaagctgagagagaagagcgaggccatccagaaggagctggagcagaccaagcagaagaccatcagcgccgtgggcgagcagctgctgcccaccgtggagcacctgcagctggagctggaccagctgaagagcgagctgagcagctggagacacgtgaagaccggctgcgagaccgtggacgccgtgcaggagagagtggacgtgcaggtgagagagatggtgaagctgctgttcagcgaggaccagcagggcggcagcctggagcagctgctgcagagattcagcagccagttcgtgagcaagggcgacctgcagaccatgctgagagacctgcagctgcagatcctgagaaacgtgacccaccacgtgagcgtgaccaagcagctgcccaccagcgaggccgtggtgagcgccgtgagcgaggccggcgccagcggcatcaccgaggcccaggccagagccatcgtgaacagcgccctgaagctgtacagccaggacaagaccggcatggtggacttcgccctggagagcggcggcggcagcatcctgagcaccagatgcagcgagacctacgagaccaagaccgccctgatgagcctgttcggcatccccctgtggtacttcagccagagccccagagtggtgatccagcccgacatctaccccggcaactgctgggccttcaagggcagccagggctacctggtggtgagactgagcatgatgatccaccccgccgccttcaccctggagcacatccccaagaccctgagccccaccggcaacatcagcagcgcccccaaggacttcgccgtgtacggcctggagaacgagtaccaggaggagggccagctgctgggccagttcacctacgaccaggacggcgagagcctgcagatgttccaggccctgaagagacccgacgacaccgccttccagatcgtggagctgagaatcttcagcaactggggccaccccgagtacacctgcctgtacagattcagagtgcacggcgagcccgtgaagtag

SEQ ID NO: 12774 - DNA, 2109 bp, synthetic construct
  misc_feature 1..2109: note = Description of Artificial Sequence: Synthetic coding sequence
  source 1..2109: mol_type = other DNA
atgagcagaagaagcctgagactggccaccaccgcctgcaccctgggcgacggcgaggccgtgggcgccgacagcggcaccagcagcgccgtgagcctgaagaacagagccgccagaaccaccaagcagagaagaagcaccaacaagagcgccttcagcatcaaccacgtgagcagacaggtgaccagcagcggcgtgagccacggcggcaccgtgagcctgcaggacgccgtgaccagaagaccccccgtgctggacgagagctggatcagagagcagaccaccgtggaccacttctggggcctggacgacgacggcgacctgaagggcggcaacaaggccgccatccagggcaacggcgacgtgggcgccgccgccgccaccgcccacaacggcttcagctgcagcaactgcagcatgctgagcgagagaaaggacgtgctgaccgcccaccccgccgcccccggccccgtgagcagagtgtacagcagagacagaaaccagaagtggaaggccgccagcggcgtgttctggtggctgggcatcggctggtaccagttcgtgaccctgatcagctggctgaacgtgttcctgctgaccagatgcctgagaaacatctgcaagttcctggtgctgctgatccccctgttcctgctgctggccggcctgagcctgagaggccagggcaacttcttcagcttcctgcccgtgctgaactgggccagcatgcacagaacccagagagtggacgacccccaggacgtgttcaagcccaccaccagcagactgaagcagcccctgcagggcgacagcgaggccttcccctggcactggatgagcggcgtggagcagcaggtggccagcctgagcggccagtgccaccaccacggcgagaacctgagagagctgaccaccctgctgcagaagctgcaggccagagtggaccagatggagggcggcgccgccggccccagcgccagcgtgagagacgccgtgggccagccccccagagagaccgacttcatggccttccaccaggagcacgaggtgagaatgagccacctggaggacatcctgggcaagctgagagagaagagcgaggccatccagaaggagctggagcagaccaagcagaagaccatcagcgccgtgggcgagcagctgctgcccaccgtggagcacctgcagctggagctggaccagctgaagagcgagctgagcagctggagacacgtgaagaccggctgcgagaccgtggacgccgtgcaggagagagtggacgtgcaggtgagagagatggtgaagctgctgttcagcgaggaccagcagggcggcagcctggagcagctgctgcagagattcagcagccagttcgtgagcaagggcgacctgcagaccatgctgagagacctgcagctgcagatcctgagaaacgtgacccaccacgtgagcgtgaccaagcagctgcccaccagcgaggccgtggtgagcgccgtgagcgaggccggcgccagcggcatcaccgaggcccaggccagagccatcgtgaacagcgccctgaagctgtacagccaggacaagaccggcatggtggacttcgccctggagagcggcggcggcagcatcctgagcaccagatgcagcgagacctacgagaccaagaccgccctgatgagcctgttcggcatccccctgtggtacttcagccagagccccagagtggtgatccagcccgacatctaccccggcaactgctgggccttcaagggcagccagggctacctggtggtgagactgagcatgatgatccaccccgccgccttcaccctggagcacatccccaagaccctgagccccaccggcaacatcagcagcgcccccaaggacttcgccgtgtacggcctggagaacgagtaccaggaggagggccagctgctgggccagttcacctacgaccaggacggcgagagcctgcagatgttccaggccctgaagagacccgacgacaccgccttccagatcgtggagctgagaatcttcagcaactggggccaccccgagtacacctgcctgtacagattcagagtgcacggcgagcccgtgaagtag

SEQ ID NO: 12775 - DNA, 2358 bp, synthetic construct
  misc_feature 1..2358: note = Description of Artificial Sequence: Synthetic coding sequence
  source 1..2358: mol_type = other DNA
atggacttcagcagactgcacatgtacagccccccccagtgcgtgcccgagaacaccggctacacctacgccctgagcagcagctacagcagcgacgccctggacttcgagaccgagcacaagctggaccccgtgttcgacagccccagaatgagcagaagaagcctgagactggccaccaccgcctgcaccctgggcgacggcgaggccgtgggcgccgacagcggcaccagcagcgccgtgagcctgaagaacagagccgccagaaccaccaagcagagaagaagcaccaacaagagcgccttcagcatcaaccacgtgagcagacaggtgaccagcagcggcgtgagccacggcggcaccgtgagcctgcaggacgccgtgaccagaagaccccccgtgctggacgagagctggatcagagagcagaccaccgtggaccacttctggggcctggacgacgacggcgacctgaagggcggcaacaaggccgccatccagggcaacggcgacgtgggcgccgccgccgccaccgcccacaacggcttcagctgcagcaactgcagcatgctgagcgagagaaaggacgtgctgaccgcccaccccgccgcccccggccccgtgagcagagtgtacagcagagacagaaaccagaagtgctacttcctgctgcagatcctgagaagaatcggcgccgtgggccaggccgtgagcagaaccgcctggagcgccctgtggctggccgtggtggcccccggcaaggccgccagcggcgtgttctggtggctgggcatcggctggtaccagttcgtgaccctgatcagctggctgaacgtgttcctgctgaccagatgcctgagaaacatctgcaagttcctggtgctgctgatccccctgttcctgctgctggccggcctgagcctgagaggccagggcaacttcttcagcttcctgcccgtgctgaactgggccagcatgcacagaacccagagagtggacgacccccaggacgtgttcaagcccaccaccagcagactgaagcagcccctgcagggcgacagcgaggccttcccctggcactggatgagcggcgtggagcagcaggtggccagcctgagcggccagtgccaccaccacggcgagaacctgagagagctgaccaccctgctgcagaagctgcaggccagagtggaccagatggagggcggcgccgccggccccagcgccagcgtgagagacgccgtgggccagccccccagagagaccgacttcatggccttccaccaggagcacgaggtgagaatgagccacctggaggacatcctgggcaagctgagagagaagagcgaggccatccagaaggagctggagcagaccaagcagaagaccatcagcgccgtgggcgagcagctgctgcccaccgtggagcacctgcagctggagctggaccagctgaagagcgagctgagcagctggagacacgtgaagaccggctgcgagaccgtggacgccgtgcaggagagagtggacgtgcaggtgagagagatggtgaagctgctgttcagcgaggaccagcagggcggcagcctggagcagctgctgcagagattcagcagccagttcgtgagcaagggcgacctgcagaccatgctgagagacctgcagctgcagatcctgagaaacgtgacccaccacgtgagcgtgaccaagcagctgcccaccagcgaggccgtggtgagcgccgtgagcgaggccggcgccagcggcatcaccgaggcccaggccagagccatcgtgaacagcgccctgaagctgtacagccaggacaagaccggcatggtggacttcgccctggagagcggcggcggcagcatcctgagcaccagatgcagcgagacctacgagaccaagaccgccctgatgagcctgttcggcatccccctgtggtacttcagccagagccccagagtggtgatccagcccgacatctaccccggcaactgctgggccttcaagggcagccagggctacctggtggtgagactgagcatgatgatccaccccgccgccttcaccctggagcacatccccaagaccctgagccccaccggcaacatcagcagcgcccccaaggacttcgccgtgtacggcctggagaacgagtaccaggaggagggccagctgctgggccagttcacctacgaccaggacggcgagagcctgcagatgttccaggccctgaagagacccgacgacaccgccttccagatcgtggagctgagaatcttcagcaactggggccaccccgagtacacctgcctgtacagattcagagtgcacggcgagcccgtgaagtag

SEQ ID NO: 12776 - DNA, 774 bp, synthetic construct
  misc_feature 1..774: note = Description of Artificial Sequence: Synthetic coding sequence
  source 1..774: mol_type = other DNA
atggacttcagcagactgcacatgtacagccccccccagtgcgtgcccgagaacaccggctacacctacgccctgagcagcagctacagcagcgacgccctggacttcgagaccgagcacaagctggaccccgtgttcgacagccccagaatgagcagaagaagcctgagactggccaccaccgcctgcaccctgggcgacggcgaggccgtgggcgccgacagcggcaccagcagcgccgtgagcctgaagaacagagccgccagaaccaccaagcagagaagaagcaccaacaagagcgccttcagcatcaaccacgtgagcagacaggtgaccagcagcggcgtgagccacggcggcaccgtgagcctgcaggacgccgtgaccagaagaccccccgtgctggacgagagctggatcagagagcagaccaccgtggaccacttctggggcctggacgacgacggcgacctgaagggcggcaacaaggccgccatccagggcaacggcgacgtgggcgccgccgccgccaccgcccacaacggcttcagctgcagcaactgcagcatgctgagcgagagaaaggacgtgctgaccgcccaccccgccgcccccggccccgtgagcagagtgtacagcagagacagaaaccagaagtgcaagagccagagcttcaagacccagaagaaggtgtgcttccccaacctgatcttccccttctgcaagagccagtgcctgcactacctgagctggagactgaagatcatcccctag

SEQ ID NO: 12777 - DNA, 2469 bp, synthetic construct
  misc_feature 1..2469: note = Description of Artificial Sequence: Synthetic coding sequence
  source 1..2469: mol_type = other DNA
atggacttcagcagactgcacatgtacagccccccccagtgcgtgcccgagaacaccggctacacctacgccctgagcagcagctacagcagcgacgccctggacttcgagaccgagcacaagctggaccccgtgttcgacagccccagaatgagcagaagaagcctgagactggccaccaccgcctgcaccctgggcgacggcgaggccgtgggcgccgacagcggcaccagcagcgccgtgagcctgaagaacagagccgccagaaccaccaagcagagaagaagcaccaacaagagcgccttcagcatcaaccacgtgagcagacaggtgaccagcagcggcgtgagccacggcggcaccgtgagcctgcaggacgccgtgaccagaagaccccccgtgctggacgagagctggatcagagagcagaccaccgtggaccacttctggggcctggacgacgacggcgacctgaagggcggcaacaaggccgccatccagggcaacggcgacgtgggcgccgccgccgccaccgcccacaacggcttcagctgcagcaactgcagcatgctgagcgagagaaaggacgtgctgaccgcccaccccgccgcccccggccccgtgagcagagtgtacagcagagacagaaaccagaagtgcgacgactgcaagggcaagagacacctggacgcccacaccgccgcccacagccagagccccagactgcccggcagagccggcaccctgtggcacatctgggcctgcgccggctacttcctgctgcagatcctgagaagaatcggcgccgtgggccaggccgtgagcagaaccgcctggagcgccctgtggctggccgtggtggcccccggcaaggccgccagcggcgtgttctggtggctgggcatcggctggtaccagttcgtgaccctgatcagctggctgaacgtgttcctgctgaccagatgcctgagaaacatctgcaagttcctggtgctgctgatccccctgttcctgctgctggccggcctgagcctgagaggccagggcaacttcttcagcttcctgcccgtgctgaactgggccagcatgcacagaacccagagagtggacgacccccaggacgtgttcaagcccaccaccagcagactgaagcagcccctgcagggcgacagcgaggccttcccctggcactggatgagcggcgtggagcagcaggtggccagcctgagcggccagtgccaccaccacggcgagaacctgagagagctgaccaccctgctgcagaagctgcaggccagagtggaccagatggagggcggcgccgccggccccagcgccagcgtgagagacgccgtgggccagccccccagagagaccgacttcatggccttccaccaggagcacgaggtgagaatgagccacctggaggacatcctgggcaagctgagagagaagagcgaggccatccagaaggagctggagcagaccaagcagaagaccatcagcgccgtgggcgagcagctgctgcccaccgtggagcacctgcagctggagctggaccagctgaagagcgagctgagcagctggagacacgtgaagaccggctgcgagaccgtggacgccgtgcaggagagagtggacgtgcaggtgagagagatggtgaagctgctgttcagcgaggaccagcagggcggcagcctggagcagctgctgcagagattcagcagccagttcgtgagcaagggcgacctgcagaccatgctgagagacctgcagctgcagatcctgagaaacgtgacccaccacgtgagcgtgaccaagcagctgcccaccagcgaggccgtggtgagcgccgtgagcgaggccggcgccagcggcatcaccgaggcccaggccagagccatcgtgaacagcgccctgaagctgtacagccaggacaagaccggcatggtggacttcgccctggagagcggcggcggcagcatcctgagcaccagatgcagcgagacctacgagaccaagaccgccctgatgagcctgttcggcatccccctgtggtacttcagccagagccccagagtggtgatccagcccgacatctaccccggcaactgctgggccttcaagggcagccagggctacctggtggtgagactgagcatgatgatccaccccgccgccttcaccctggagcacatccccaagaccctgagccccaccggcaacatcagcagcgcccccaaggacttcgccgtgtacggcctggagaacgagtaccaggaggagggccagctgctgggccagttcacctacgaccaggacggcgagagcctgcagatgttccaggccctgaagagacccgacgacaccgccttccagatcgtggagctgagaatcttcagcaactggggccaccccgagtacacctgcctgtacagattcagagtgcacggcgagcccgtgaagtag

SEQ ID NO: 12778 - DNA, 1752 bp, synthetic construct
  misc_feature 1..1752: note = Description of Artificial Sequence: Synthetic coding sequence
  source 1..1752: mol_type = other DNA
atgaagctgagctacgagagcgagaactacaagctgaagacccacgagagcaaggactgcgagagcgagagctacaagagcaagagccacgagagcaaggcccacgccagctactacggcagaatgaacgtgagagaggtgctgagagaggacggccacctgagcgtgaacggcgaggccctgtggaaggccgccagcggcgtgttctggtggctgggcatcggctggtaccagttcgtgaccctgatcagctggctgaacgtgttcctgctgaccagatgcctgagaaacatctgcaagttcctggtgctgctgatccccctgttcctgctgctggccggcctgagcctgagaggccagggcaacttcttcagcttcctgcccgtgctgaactgggccagcatgcacagaacccagagagtggacgacccccaggacgtgttcaagcccaccaccagcagactgaagcagcccctgcagggcgacagcgaggccttcccctggcactggatgagcggcgtggagcagcaggtggccagcctgagcggccagtgccaccaccacggcgagaacctgagagagctgaccaccctgctgcagaagctgcaggccagagtggaccagatggagggcggcgccgccggccccagcgccagcaccgacttcatggccttccaccaggagcacgaggtgagaatgagccacctggaggacatcctgggcaagctgagagagaagagcgaggccatccagaaggagctggagcagaccaagcagaagaccatcagcgccgtgggcgagcagctgctgcccaccgtggagcacctgcagctggagctggaccagctgaagagcgagctgagcagctggagacacgtgaagaccggctgcgagaccgtggacgccgtgcaggagagagtggacgtgcaggtgagagagatggtgaagctgctgttcagcgaggaccagcagggcggcagcctggagcagctgctgcagagattcagcagccagttcgtgagcaagggcgacctgcagaccatgctgagagacctgcagctgcagatcctgagaaacgtgacccaccacgtgagcgtgaccaagcagctgcccaccagcgaggccgtggtgagcgccgtgagcgaggccggcgccagcggcatcaccgaggcccaggccagagccatcgtgaacagcgccctgaagctgtacagccaggacaagaccggcatggtggacttcgccctggagagcggcggcggcagcatcctgagcaccagatgcagcgagacctacgagaccaagaccgccctgatgagcctgttcggcatccccctgtggtacttcagccagagccccagagtggtgatccagcccgacatctaccccggcaactgctgggccttcaagggcagccagggctacctggtggtgagactgagcatgatgatccaccccgccgccttcaccctggagcacatccccaagaccctgagccccaccggcaacatcagcagcgcccccaaggacttcgccgtgtacggcctggagaacgagtaccaggaggagggccagctgctgggccagttcacctacgaccaggacggcgagagcctgcagatgttccaggccctgaagagacccgacgacaccgccttccagatcgtggagctgagaatcttcagcaactggggccaccccgagtacacctgcctgtacagattcagagtgcacggcgagcccgtgaagtag

SEQ ID NO: 12779 - DNA, 342 bp, synthetic construct
  misc_feature 1..342: note = Description of Artificial Sequence: Synthetic coding sequence
  source 1..342: mol_type = other DNA
atggacttcagcagactgcacatgtacagccccccccagtgcgtgcccgagaacaccggctacacctacgccctgagcagcagctacagcagcgacgccctggacttcgagaccgagcacaagctggaccccgtgttcgacagccccagaatgagcagaagaagcctgagactggccaccaccgcctgcaccctgggcgacggcgaggccgtgggcgccgacagcggcaccagcagcgccgtgagcctgaagaacagagccgccagaaccaccaagcagagaagaagcaccaacaagagcgccttcagcatcaaccacgtgagcagacaggtgaccagctag

SEQ ID NO: 12780 - DNA, 267 bp, synthetic construct
  misc_feature 1..267: note = Description of Artificial Sequence: Synthetic coding sequence
  source 1..267: mol_type = other DNA
atggacttcagcagactgcacatgtacagccccccccagtgcgtgcccgagaacaccggctacacctacgccctgagcagcagctacagcagcgacgccctggacttcgagaccgagcacaagctggaccccgtgttcgacagccccagaatgagcagaagaagcctgagactggccaccaccgcctgcaccctgggcgacggcgaggccgtgggcgccgacagcggcaccagcagcgccgtgagcctgaagaacagagccgcctag

SEQ ID NO: 12781 - DNA, 2109 bp, synthetic construct; identical to SEQ ID NO: 12774
  misc_feature 1..2109: note = Description of Artificial Sequence: Synthetic coding sequence
  source 1..2109: mol_type = other DNA

SEQ ID NO: 12782 - DNA, 525 bp, synthetic construct
  misc_feature 1..525: note = Description of Artificial Sequence: Synthetic coding sequence
  source 1..525: mol_type = other DNA
atggacttcagcagactgcacatgtacagccccccccagtgcgtgcccgagaacaccggctacacctacgccctgagcagcagctacagcagcgacgccctggacttcgagaccgagcacaagctggaccccgtgttcgacagccccagaatgagcagaagaagcctgagactggccaccaccgcctgcaccctgggcgacggcgaggccgtgggcgccgacagcggcaccagcagcgccgtgagcctgaagaacagagccgccagaaccaccaagcagagaagaagcaccaacaagagcgccttcagcatcaaccacgtgagcagacaggtgaccagcagcggcgtgagccacggcggcaccgtgagcctgcaggacgccgtgaccagaagaccccccgtgctggacgagagctggatcagagagcagaccaccgtggaccacttctggggcctggacgacgacggcgacctgaagggcggcaacaaggccgccatccagggcaacggcgacgtgggcgcctag

SEQ ID NO: 12783 - DNA, 408 bp, synthetic construct
  misc_feature 1..408: note = Description of Artificial Sequence: Synthetic coding sequence
  source 1..408: mol_type = other DNA
atggacttcagcagactgcacatgtacagccccccccagtgcgtgcccgagaacaccggctacacctacgccctgagcagcagctacagcagcgacgccctggacttcgagaccgagcacaagctggaccccgtgttcgacagccccagaatgagcagaagaagcctgagactggccaccaccgcctgcaccctgggcgacggcgaggccgtgggcgccgacagcggcaccagcagcgccgtgagcctgaagaacagagccgccagaaccaccaagcagagaagaagcaccaacaagagcgccttcagcatcaaccacgtgagcagacaggtgaccagcagcggcgtgagccacggcggcaccgtgagcctgcaggacgccgtgaccagaagaccccccgtgctgtag

SEQ ID NO: 12784 - DNA, 267 bp, synthetic construct; identical to SEQ ID NO: 12780
  misc_feature 1..267: note = Description of Artificial Sequence: Synthetic coding sequence
  source 1..267: mol_type = other DNA

SEQ ID NO: 12785 - DNA, 2049 bp, synthetic construct
  misc_feature 1..2049: note = Description of Artificial Sequence: Synthetic coding sequence
  source 1..2049: mol_type = other DNA
atggacttcagcagactgcacatgtacagccccccccagtgcgtgcccgagaacaccggctacacctacgccctgagcagcagctacagcagcgacgccctggacttcgagaccgagcacaagctggaccccgtgttcgacagccccagaatgagcagaagaagcctgagactggccaccaccgcctgcaccctgggcgacggcgaggccgtgggcgccgacagcggcaccagcagcgccgtgagcctgaagaacagagccgccagaaccaccaagcagagaagaagcaccaacaagagcgccttcagcatcaaccacgtgagcagacaggtgaccagcagcggcgtgagccacggcggcaccgtgagcctgcaggacgccgtgaccagaagaccccccgtgctggacgagagctggatcagagagcagaccaccgtggaccacttctggggcaaggccgccagcggcgtgttctggtggctgggcatcggctggtaccagttcgtgaccctgatcagctggctgaacgtgttcctgctgaccagatgcctgagaaacatctgcaagttcctggtgctgctgatccccctgttcctgctgctgggcctgagcctgagaggccagggcaacttcttcagcttcctgcccgtgctgaactgggccagcatgcacagaacccagagagtggacgacccccaggacgtgttcaagcccaccaccagcagactgaagcagcccctgcagggcgacagcgaggccttcccctggcactggatgagcggcgtggagcagcaggtggccagcctgagcggccagtgccaccaccacggcgagaacctgagagagctgaccaccctgctgcagaagctgcaggccagagtggaccagatggagggcggcgccgccggccccagcgccagcgtgagagacgccgtgggccagccccccagagagaccgacttcatggccttccaccaggagcacgaggtgagaatgagccacctggaggacatcctgggcaagctgagagagaagagcgaggccatccagaaggagctggagcagaccaagcagaagaccatcagcgccgtgggcgagcagctgctgcccaccgtggagcacctgcagctggagctggaccagctgaagagcgagctgagcagctggagacacgtgaagaccggctgcgagaccgtggacgccgtgcaggagagagtggacgtgcaggtgagagagatggtgaagctgctgttcagcgaggaccagcagggcggcagcctggagcagctgctgcagagattcagcagccagttcgtgagcaagggcgacctgcagaccatgctgagagacctgcagctgcagatcctgagaaacgtgacccaccacgtgagcgtgaccaagcagctgcccaccagcgaggccgtggtgagcgccgtgagcgaggccggcgccagcggcatcaccgaggcccaggccagagccatcgtgaacagcgccctgaagctgtacagccaggacaagaccggcatggtggacttcgccctggagagcggcggcggcagcatcctgagcaccagatgcagcgagacctacgagaccaagaccgccctgatgagcctgttcggcatccccctgtggtacttcagccagagccccagagtggtgatccagcccgacatctaccccggcaactgctgggccttcaagggcagccagggctacctggtggtgagactgagcatgatgatccaccccgccgccttcaccctggagcacatccccaagaccctgagccccaccggcaacatcagcagcgcccccaaggacttcgccgtgtacggcctggagaacgagtaccaggaggagggccagctgctgggccagttcacctacgaccaggacggcgagagcctgcagatgttccaggccctgaagagacccgacgacaccgccttccagatcgtggagctgagaatcttcagcaactggggccaccccgagtacacctgcctgtacagattcagagtgcacggcgagcccgtgaagtag

SEQ ID NO: 12786 - DNA, 2925 bp, synthetic construct
  misc_feature 1..2925: note = Description of Artificial Sequence: Synthetic coding sequence
  source 1..2925: mol_type = other DNA
atgggcgacgtgagaaaggccaaggaggccctggccgaggtgcagatccccccccccgacgccggccccagccccagatgcaagcccccccccgccgagagactgctgggccccggcagaagaagaagaggcctgagaagaagaagagaggccgtgtggttcgaggtggtgaacatggacttcagcagactgcacatgtacagccccccccagtgcgtgcccgagaacaccggctacacctacgccctgagcagcagctacagcagcgacgccctggacttcgagaccgagcacaagctggaccccgtgttcgacagccccagaatgagcagaagaagcctgagactggccaccaccgcctgcaccctgggcgacggcgaggccgtgggcgccgacagcggcaccagcagcgccgtgagcctgaagaacagagccgccagaaccaccaagcagagaagaagcaccaacaagagcgccttcagcatcaaccacgtgagcagacaggtgaccagcagcggcgtgagccacggcggcaccgtgagcctgcaggacgccgtgaccagaagaccccccgtgctggacgagagctggatcagagagcagaccaccgtggaccacttctggggcctggacgacgacggcgacctgaagggcggcaacaaggccgccatccagggcaacggcgacgtgggcgccgccgccgccaccgcccacaacggcttcagctgcagcaactgcagcatgctgagcgagagaaaggacgtgctgaccgcccaccccgccgcccccggccccgtgagcagagtgtacagcagagacagaaaccagaagtgcggcgccagcttctacgtgaacagaatcctgtggctggccagatacaccgccagcagcttcagcagcttcctggtgcagctgttccaggtggtgctgatgaagctgagctacgagagcgagaactacaagctgaagacccacgagagcaaggactgcgagagcgagagctacaagagcaagagccacgagagcaaggcccacgccagctactacggcagaatgaacgtgagagaggtgctgagagaggacggccacctgagcgtgaacggcgaggccctgtgcgacgactgcaagggcaagagacacctggacgcccacaccgccgcccacagccagagccccagactgcccggcagagccggcaccctgtggcacatctgggcctgcgccggctacttcctgctgcagatcctgagaagaatcggcgccgtgggccaggccgtgagcagaaccgcctggagcgccctgtggctggccgtggtggcccccggcaaggccgccagcggcgtgttctggtggctgggcatcggctggtaccagttcgtgaccctgatcagctggctgaacgtgttcctgctgaccagatgcctgagaaacatctgcaagttcctggtgctgctgatccccctgttcctgctgctggccggcctgagcctgagaggccagggcaacttcttcagcttcctgcccgtgctgaactgggccagcatgcacagaacccagagagtggacgacccccaggacgtgttcaagcccaccaccagcagactgaagcagcccctgcagggcgacagcgaggccttcccctggcactggatgagcggcgtggagcagcaggtggccagcctgagcggccagtgccaccaccacggcgagaacctgagagagctgaccaccctgctgcagaagctgcaggccagagtggaccagatggagggcggcgccgccggccccagcgccagcgtgagagacgccgtgggccagccccccagagagaccgacttcatggccttccaccaggagcacgaggtgagaatgagccacctggaggacatcctgggcaagctgagagagaagagcgaggccatccagaaggagctggagcagaccaagcagaagaccatcagcgccgtgggcgagcagctgctgcccaccgtggagcacctgcagctggagctggaccagctgaagagcgagctgagcagctggagacacgtgaagaccggctgcgagaccgtggacgccgtgcaggagagagtggacgtgcaggtgagagagatggtgaagctgctgttcagcgaggaccagcagggcggcagcctggagcagctgctgcagagattcagcagccagttcgtgagcaagggcgacctgcagaccatgctgagagacctgcagctgcagatcctgagaaacgtgacccaccacgtgagcgtgaccaagcagctgcccaccagcgaggccgtggtgagcgccgtgagcgaggccggcgccagcggcatcaccgaggcccaggccagagccatcgtgaacagcgccctgaagctgtacagccaggacaagaccggcatggtggacttcgccctggagagcggcggcggcagcatcctgagcaccagatgcagcgagacctacgagaccaagaccgccctgatgagcctgttcggcatccccctgtggtacttcagccagagccccagagtggtgatccagcccgacatctaccccggcaactgctgggccttcaagggcagccagggctacctggtggtgagactgagcatgatgatccaccccgccgccttcaccctggagcacatccccaagaccctgagccccaccggcaacatcagcagcgcccccaaggacttcgccgtgtacggcctggagaacgagtaccaggaggagggccagctgctgggccagttcacctacgaccaggacggcgagagcctgcagatgttccaggccctgaagagacccgacgacaccgccttccagatcgtggagctgagaatcttcagcaactggggccaccccgagtacacctgcctgtacagattcagagtgcacggcgagcccgtgaagtag

SEQ ID NO: 12787 - DNA, 837 bp, synthetic construct
  misc_feature 1..837: note = Description of Artificial Sequence: Synthetic coding sequence
  source 1..837: mol_type = other DNA
atgggcagaatcagccccggcagccccggcctgcccagaaccgtgtggttcgaggtggtgaacatggacttcagcagactgcacatgtacagccccccccagtgcgtgcccgagaacaccggctacacctacgccctgagcagcagctacagcagcgacgccctggacttcgagaccgagcacaagctggaccccgtgttcgacagccccagaatgagcagaagaagcctgagactggccaccaccgcctgcaccctgggcgacggcgaggccgtgggcgccgacagcggcaccagcagcgccgtgagcctgaagaacagagccgccagaaccaccaagcagagaagaagcaccaacaagagcgccttcagcatcaaccacgtgagcagacaggtgaccagcagcggcgtgagccacggcggcaccgtgagcctgcaggacgccgtgaccagaagaccccccgtgctggacgagagctggatcagagagcagaccaccgtggaccacttctggggcctggacgacgacggcgacctgaagggcggcaacaaggccgccatccagggcaacggcgacgtgggcgccgccgccgccaccgcccacaacggcttcagctgcagcaactgcagcatgctgagcgagagaaaggacgtgctgaccgcccaccccgccgcccccggccccgtgagcagagtgtacagcagagacagaaaccagaagtgcaagagccagagcttcaagacccagaagaaggtgtgcttccccaacctgatcttccccttctgcaagagccagtgcctgcactacctgagctggagactgaagatcatcccctag

SEQ ID NO: 12788 - DNA, 360 bp, synthetic construct
  misc_feature 1..360: note = Description of Artificial Sequence: Synthetic coding sequence
  source 1..360: mol_type = other DNA
atggacttcagcagactgcacatgtacagccccccccagtgcgtgcccgagaacaccggctacacctacgccctgagcagcagctacagcagcgacgccctggacttcgagaccgagcacaagctggaccccgtgttcgacagccccagaatgagcagaagaagcctgagactggccaccaccgcctgcaccctgggcgacggcgaggccgtgggcgccgacagcggcaccagcagcgccgtgagcctgaagaacagagccgccagaaccaccaagcagagaagaagcaccaacaagagcgccttcagcatcaaccacgtgagcagacaggtgaccagcagcggcgtgagccacggctag

SEQ ID NO: 12789 - DNA, 2352 bp, synthetic construct
  misc_feature 1..2352: note = Description of Artificial Sequence: Synthetic coding sequence
  source 1..2352: mol_type = other DNA
atggtgatcatgagcgagttcagcgccgaccccgccggccagggccagggccagcagaagcccctgagagtgggcttctacgacatcgagagaaccctgggcaagggcaacttcgccgtggtgaagctggccagacacagagtgaccaagacccaggtggccatcaagatcatcgacaagaccagactggacagcagcaacctggagaagatctacagagaggtgcagctgatgaagctgctgaaccacccccacatcatcaagctgtaccaggtgatggagaccaaggacatgctgtacatcgtgaccgagttcgccaagaacggcgagatgttcgactacctgaccagcaacggccacctgagcgagaacgaggccagaaagaagttctggcagatcctgagcgccgtggagtactgccacgaccaccacatcgtgcacagagacctgaagaccgagaacctgctgctggacggcaacatggacatcaagctggccgacttcggcttcggcaacttctacaagagcggcgagcccctgagcacctggtgcggcagccccccctacgccgcccccgaggtgttcgagggcaaggagtacgagggcccccagctggacatctggagcctgggcgtggtgctgtacgtgctggtgtgcggcagcctgcccttcgacggccccaacctgcccaccctgagacagagagtgctggagggcagattcagaatccccttcttcatgagccaggactgcgagagcctgatcagaagaatgctggtggtggaccccgccagaagaatcaccatcgcccagatcagacagcacagatggatgagagccgagccctgcctgcccggccccgcctgccccgccttcagcgcccacagctacaccagcaacctgggcgactacgacgagcaggccctgggcatcatgcagaccctgggcgtggacagacagagaaccgtggagagcctgcagaacagcagctacaaccacttcgccgccatctactacctgctgctggagagactgaaggagtacagaaacgcccagtgcgccagacccggccccgccagacagcccagacccagaagcagcgacctgagcggcctggaggtgccccaggagggcctgagcaccgaccccttcagacccgccctgctgtgcccccagccccagaccctggtgcagagcgtgctgcaggccgagatggactgcgagctgcagagcagcctgcagtggcccctgttcttccccgtggacgccagctgcagcggcgtgttcagacccagacccgtgagccccagcagcctgctggacaccgccatcagcgaggaggccagacagggccccggcctggaggaggagcaggacacccaggagagcctgcccagcagcaccggcagaagacacaccctggccgaggtgagcaccagactgagccccctgaccgccccctgcatcgtggtgagccccagcaccaccgccagccccgccgagggcaccagcagcgacagctgcctgaccttcagcgccagcaagagccccgccggcctgagcggcacccccgccacccagggcctgctgggcgcctgcagccccgtgagactggccagccccttcctgggcagccagagcgccacccccgtgctgcaggcccagggcggcctgggcggcgccgtgctgctgcccgtgagcttccaggagggcagaagagccagcgacaccagcctgacccagggcctgaaggccttcagacagcagctgagaaagaccaccagaaccaagggcttcctgggcctgaacaagatcaagggcctggccagacaggtgtgccaggcccccgccagcagagccagcagaggcggcctgagccccttccacgcccccgcccagagccccggcctgcacggcggcgccgccggcagcagagagggctggagcctgctggaggaggtgctggagcagcagagactgctgcagctgcagcaccaccccgccgccgcccccggctgcagccaggccccccagcccgcccccgcccccttcgtgatcgccccctgcgacggccccggcgccgcccccctgcccagcaccctgctgaccagcggcctgcccctgctgcccccccccctgctgcagaccggcgccagccccgtggccagcgccgcccagctgctggacacccacctgcacatcggcaccggccccaccgccctgcccgccgtgcccccccccagactggccagactggcccccggctgcgagcccctgggcctgctgcagggcgactgcgagatggaggacctgatgccctgcagcctgggcaccttcgtgctggtgcagtag

SEQ ID NO: 12790 - DNA, 3744 bp, synthetic construct
  misc_feature 1..3744: note = Description of Artificial Sequence: Synthetic coding sequence
  source 1..3744: mol_type = other DNA
atggaggacgccggcgccgccggccccggccccgagcccgagcccgagcccgagcccgagcccgagcccgcccccgagcccgagcccgagcccaagcccggcgccggcaccagcgaggccttcagcagactgtggaccgacgtgatgggcatcctggacggcagcctgggcaacatcgacgacctggcccagcagtacgccgactactacaacacctgcttcagcgacgtgtgcgagagaatggaggagctgagaaagagaagagtgagccaggacctggaggtggagaagcccgacgccagccccaccagcctgcagctgagaagccagatcgaggagagcctgggcttctgcagcgccgtgagcacccccgaggtggagagaaagaaccccctgcacaagagcaacagcgaggacagcagcgtgggcaagggcgactggaagaagaagaacaagtacttctggcagaacttcagaaagaaccagaagggcatcatgagacagaccagcaagggcgaggacgtgggctacgtggccagcgagatcaccatgagcgacgaggagagaatccagctgatgatgatggtgaaggagaagatgatcaccatcgaggaggccctggccagactgaaggagtacgaggcccagcacagacagagcgccgccctggaccccgccgactggcccgacggcagctaccccaccttcgacggcagcagcaactgcaacagcagagagcagagcgacgacgagaccgaggagagcgtgaagttcaagagactgcacaagctggtgaacagcaccagaagagtgagaaagaagctgatcagagtggaggagatgaagaagcccagcaccgagggcggcgaggagcacgtgttcgagaacagccccgtgctggacgagagaagcgccctgtacagcggcgtgcacaagaagcccctgttcttcgacggcagccccgagaagccccccgaggacgacagcgacagcctgaccaccagccccagcagcagcagcctggacacctggggcgccggcagaaagctggtgaagaccttcagcaagggcgagagcagaggcctgatcaagccccccaagaagatgggcaccttcttcagctaccccgaggaggagaaggcccagaaggtgagcagaagcctgaccgagggcgagatgaagaagggcctgggcagcctgagccacggcagaacctgcagcttcggcggcttcgacctgaccaacagaagcctgcacgtgggcagcaacaacagcgaccccatgggcaaggagggcgacttcgtgtacaaggaggtgatcaagagccccaccgccagcagaatcagcctgggcaagaaggtgaagagcgtgaaggagaccatgagaaagagaatgagcaagaagtacagcagcagcgtgagcgagcaggacagcggcctggacggcatgcccggcagccccccccccagccagcccgaccccgagcacctggacaagcccaagctgaaggccggcggcagcgtggagagcctgagaagcagcctgagcggccagagcagcatgagcggccagaccgtgagcaccaccgacagcagcaccagcaacagagagagcgtgaagagcgaggacggcgacgacgaggagcccccctacagaggccccttctgcggcagagccagagtgcacaccgacttcacccccagcccctacgacaccgacagcctgaagctgaagaagggcgacatcatcgacatcatcagcaagccccccatgggcacctggatgggcctgctgaacaacaaggtgggcaccttcaagttcatctacgtggacgtgctgagcgaggacgaggagaagcccaagagacccaccagaagaagaagaaagggcagacccccccagcccaagagcgtggaggacctgctggacagaatcaacctgaaggagcacatgcccaccttcctgttcaacggctacgaggacctggacaccttcaagctgctggaggaggaggacctggacgagctgaacatcagagaccccgagcacagagccgtgctgctgaccgccgtggagctgctgcaggagtacgacagcaacagcgaccagagcggcagccaggagaagctgctggtggacagccagggcctgagcggctgcagccccagagacagcggctgctacgagagcagcgagaacctggagaacggcaagaccagaaaggccagcctgctgagcgccaagagcagcaccgagcccagcctgaagagcttcagcagaaaccagctgggcaactaccccaccctgcccctgatgaagagcggcgacgccctgaagcagggccaggaggagggcagactgggcggcggcctggcccccgacaccagcaagagctgcgacccccccggcgtgaccggcctgaacaagaacagaagaagcctgcccgtgagcatctgcagaagctgcgagaccctggagggcccccagaccgtggacacctggcccagaagccacagcctggacgacctgcaggtggagcccggcgccgagcaggacgtgcccaccgaggtgaccgagccccccccccagatcgtgcccgaggtgccccagaagaccaccgccagcagcaccaaggcccagcccctggagcaggacagcgccgtggacaacgccctgctgctgacccagagcaagagattcagcgagccccagaagctgaccaccaagaagctggagggcagcatcgccgccagcggcagaggcctgagccccccccagtgcctgcccagaaactacgacgcccagccccccggcgccaagcacggcctggccagaacccccctggagggccacagaaagggccacgagttcgagggcacccaccaccccctgggcaccaaggagggcgtggacgccgagcagagaatgcagcccaagatccccagccagcccccccccgtgcccgccaagaagagcagagagagactggccaacggcctgcaccccgtgcccatgggccccagcggcgccctgcccagccccgacgccccctgcctgcccgtgaagagaggcagccccgccagccccaccagccccagcgactgcccccccgccctggcccccagacccctgagcggccaggcccccggcagcccccccagcaccagaccccccccctggctgagcgagctgcccgagaacaccagcctgcaggagcacggcgtgaagctgggccccgccctgaccagaaaggtgagctgcgccagaggcgtggacctggagaccctgaccgagaacaagctgcacgccgagggcatcgacctgaccgaggagccctacagcgacaagcacggcagatgcggcatccccgaggccctggtgcagagatacgccgaggacctggaccagcccgagagagacgtggccgccaacatggaccagatcagagtgaagcagctgagaaagcagcacagaatggccatccccagcggcggcctgaccgagatctgcagaaagcccgtgagccccggctgcatcagcagcgtgagcgactggctgatcagcatcggcctgcccatgtacgccggcaccctgagcaccgccggcttcagcaccctgagccaggtgcccagcctgagccacacctgcctgcaggaggccggcatcaccgaggagagacacatcagaaagctgctgagcgccgccagactgttcaagctgccccccggccccgaggccatgtag

SEQ ID NO: 12791 - DNA, 255 bp, synthetic construct
  misc_feature 1..255: note = Description of Artificial Sequence: Synthetic coding sequence
  source 1..255: mol_type = other DNA
atggaggagcaggactgcagagacggcagcctgggcaacatcgacgacctggcccagcagtacgccgactactacaacacctgcttcagcgacgtgtgcgagagaatggaggagctgagaaagagaagagtgagccaggacctggaggtggagaagcccgacgccagccccaccagcctgcagctgagaagccagatcgaggagagcctgggcttctgcagcgccgtgagcacccccgaggtggagagaaagtag

SEQ ID NO: 12792 - DNA, 249 bp, synthetic construct
  misc_feature 1..249: note = Description of Artificial Sequence: Synthetic coding sequence
  source 1..249: mol_type = other DNA
caggcccaggacttcaaggacggcagcctgggcaacatcgacgacctggcccagcagtacgccgactactacaacacctgcttcagcgacgtgtgcgagagaatggaggagctgagaaagagaagagtgagccaggacctggaggtggagaagcccgacgccagccccaccagcctgcagctgagaagccagatcgaggagagcctgggcttctgcagcgccgtgagcacccccgaggtggagagatag

SEQ ID NO: 12793 - DNA, 2091 bp, synthetic construct
  misc_feature 1..2091: note = Description of Artificial Sequence: Synthetic coding sequence
  source 1..2091: mol_type = other DNA
atgcccaagcccagcagagagcagagcgacgacgagaccgaggagagcgtgaagttcaagagactgcacaagctggtgaacagcaccagaagagtgagaaagaagctgatcagagtggaggagatgaagaagcccagcaccgagggcggcgaggagcacgtgttcgagaacagccccgtgctggacgagagaagcgccctgtacagcggcgtgcacaagaagcccctgttcttcgacggcagccccgagaagccccccgaggacgacagcgacagcctgaccaccagccccagcagcagcagcctggacacctggggcgccggcagaaagctggtgaagaccttcagcaagggcgagagcagaggcctgatcaagccccccaagaagatgggcaccttcttcagctaccccgaggaggagaaggcccagaaggtgagcagaagcctgaccgagggcgagatgaagaagggcctgggcagcctgagccacggcagaacctgcagcttcggcggcttcgacctgaccaacagaagcctgcacgtgggcagcaacaacagcgaccccatgggcaaggagggcgacttcgtgtacaaggaggtgatcaagagccccaccgccagcagaatcagcctgggcaagaaggtgaagagcgtgaaggagaccatgagaaagagaatgagcaagaagtacagcagcagcgtgagcgagcaggacagcggcctggacggcatgcccggcagccccccccccagccagcccgaccccgagcacctggacaagcccaagctgaaggccggcggcagcgtggagagcctgagaagcagcctgagcggccagagcagcatgagcggccagaccgtgagcaccaccgacagcagcaccagcaacagagagagcgtgaagagcgaggacggcgacgacgaggagcccccctacagaggccccttctgcggcagagccagagtgcacaccgacttcacccccagcccctacgacaccgacagcctgaagctgaagaagggcgacatcatcgacatcatcagcaagccccccatgggcacctggatgggcctgctgaacaacaaggtgggcaccttcaagttcatctacgtggacgtgctgagcgaggacgaggagaagcccaagagacccaccagaagaagaagaaagggcagacccccccagcccaagagcgtggaggacctgctggacagaatcaacctgaaggagcacatgcccaccttcctgttcaacggctacgaggacctggacaccttcaagctgctggaggaggaggacctggacgagctgaacatcagagaccccgagcacagagccgtgctgctgaccgccgtggagctgctgcaggagtacgacagcaacagcgaccagagcggcagccaggagaagctgctggtggacagccagggcctgagcggctgcagccccagagacagcggctgctacgagagcagcgagaacctggagaacggcaagaccagaaaggccagcctgctgagcgccaagagcagcaccgagcccagcctgaagagcttcagcagaaaccagctgggcaactaccccaccctgcccctgatgaagagcggcgacgccctgaagcagggccaggaggagggcagactgggcggcggcctggcccccgacaccagcaagagctgcgacccccccggcgtgaccggcctgaacaagaacagaagaagcctgcccgtgagcatctgcagaagctgcgagaccctggagggcccccagaccgtggacacctggcccagaagccacagcctggacgacctgcaggtggagcccggcgccgagcaggacgtgcccaccgaggtgaccgagccccccccccagatcgtgcccgaggtgccccagaagaccaccgccagcagcaccaaggcccagcccctggagcaggacagcgccgtggacaacgccctgctgctgacccagagcaagagattcagcgagccccagaagctgaccaccaagaagctggagggcagcatcgccgccagcggcagaggcctgagccccccccagtgcctgcccagaaactacgacgcccagtag

SEQ ID NO: 12794 - DNA, 1974 bp, synthetic construct
  misc_feature 1..1974: note = Description of Artificial Sequence: Synthetic coding sequence
  source 1..1974: mol_type = other DNA
atgggcacctggatgggcctgctgaacaacaaggtgggcaccttcaagttcatctacgtggacgtgctgagcgaggacgaggagaagcccaagagacccaccagaagaagaagaaagggcagacccccccagcccaagagcgtggaggacctgctggacagaatcaacctgaaggagcacatgcccaccttcctgttcaacggctacgaggacctggacaccttcaagctgctggaggaggaggacctggacgagctgaacatcagagaccccgagcacagagccgtgctgctgaccgccgtggagctgctgcaggagtacgacagcaacagcgaccagagcggcagccaggagaagctgctggtggacagccagggcctgagcggctgcagccccagagacagcggctgctacgagagcagcgagaacctggagaacggcaagaccagaaaggccagcctgctgagcgccaagagcagcaccgagcccagcctgaagagcttcagcagaaaccagctgggcaactaccccaccctgcccctgatgaagagcggcgacgccctgaagcagggccaggaggagggcagactgggcggcggcctggcccccgacaccagcaagagctgcgacccccccggcgtgaccggcctgaacaagaacagaagaagcctgcccgtgagcatctgcagaagctgcgagaccctggagggcccccagaccgtggacacctggcccagaagccacagcctggacgacctgcaggtggagcccggcgccgagcaggacgtgcccaccgaggtgaccgagccccccccccagatcgtgcccgaggtgccccagaagaccaccgccagcagcaccaaggcccagcccctggagcaggacagcgccgtggacaacgccctgctgctgacccagagcaagagattcagcgagccccagaagctgaccaccaagaagctggagggcagcatcgccgccagcggcagaggcctgagccccccccagtgcctgcccagaaactacgacgcccagccccccggcgccaagcacggcctggccagaacccccctggagggccacagaaagggccacgagttcgagggcacccaccaccccctgggcaccaaggagggcgtggacgccgagcagagaatgcagcccaagatccccagccagcccccccccgtgcccgccaagaagagcagagagagactggccaacggcctgcaccccgtgcccatgggccccagcggcgccctgcccagccccgacgccccctgcctgcccgtgaagagaggcagccccgccagccccaccagccccagcgactgcccccccgccctggcccccagacccctgagcggccaggcccccggcagcccccccagcaccagaccccccccctggctgagcgagctgcccgagaacaccagcctgcaggagcacggcgtgaagctgggccccgccctgaccagaaaggtgagctgcgccagaggcgtggacctggagaccctgaccgagaacaagctgcacgccgagggcatcgacctgaccgaggagccctacagcgacaagcacggcagatgcggcatccccgaggccctggtgcagagatacgccgaggacctggaccagcccgagagagacgtggccgccaacatggaccagatcagagtgaagcagctgagaaagcagcacagaatggccatccccagcggcggcctgaccgagatctgcagaaagcccgtgagccccggctgcatcagcagcgtgagcgactggctgatcagcatcggcctgcccatgtacgccggcaccctgagcaccgccggcttcagcaccctgagccaggtgcccagcctgagccacacctgcctgcaggaggccggcatcaccgaggagagacacatcagaaagctgctgagcgccgccagactgttcaagctgccccccggccccgaggccatgtag

SEQ ID NO: 12795 - DNA, 621 bp, synthetic construct
  misc_feature 1..621: note = Description of Artificial Sequence: Synthetic coding sequence
  source 1..621: mol_type = other DNA
atgctgccccccgccatccacttctacctgctgcccctggcctgcatcctgatgaagagctgcctggccttcaagaacgacgccaccgagatcctgtacagccacgtggtgaagcccgtgcccgcccaccccagcagcaacagcaccctgaaccaggccagaaacggcggcagacacttcagcaacaccggcctggacagaaacaccagagtgcaggtgggctgcagagagctgagaagcaccaagtacatcagcgacggccagtgcaccagcatcagccccctgaaggagctggtgtgcgccggcgagtgcctgcccctgcccgtgctgcccaactggatcggcggcggctacggcaccaagtactggagcagaagaagcagccaggagtggagatgcgtgaacgacaagaccagaacccagagaatccagctgcagtgccaggacggcagcaccagaacctacaagatcaccgtggtgaccgcctgcaagtgcaagagatacaccagacagcacaacgagagcagccacaacttcgagagcatgagccccgccaagcccgtgcagcaccacagagagagaaagagagccagcaagagcagcaagcacagcatgagctag

SEQ ID NO: 12796 - DNA, 693 bp, synthetic construct
  misc_feature 1..693: note = Description of Artificial Sequence: Synthetic coding sequence
  source 1..693: mol_type = other DNA
atgctgccccccgccatccacttctacctgctgcccctggcctgcatcctgatgaagagctgcctggccttcaagaacgacgccaccgagatcctgtacagccacgtggtgaagcccgtgcccgcccaccccagcagcaacagcaccctgaaccaggccagaaacggcggcagacacttcagcaacaccggcctggacagaaacagaaccgagagcctgaccagacagaactacttctggctgttccccggcgccttcctgagacagctgcaggaggccagagtgcaggtgggctgcagagagctgagaagcaccaagtacatcagcgacggccagtgcaccagcatcagccccctgaaggagctggtgtgcgccggcgagtgcctgcccctgcccgtgctgcccaactggatcggcggcggctacggcaccaagtactggagcagaagaagcagccaggagtggagatgcgtgaacgacaagaccagaacccagagaatccagctgcagtgccaggacggcagcaccagaacctacaagatcaccgtggtgaccgcctgcaagtgcaagagatacaccagacagcacaacgagagcagccacaacttcgagagcatgagccccgccaagcccgtgcagcaccacagagagagaaagagagccagcaagagcagcaagcacagcatgagctag

SEQ ID NO: 12797 - DNA, 2229 bp, synthetic construct
  misc_feature 1..2229: note = Description of Artificial Sequence: Synthetic coding sequence
  source 1..2229: mol_type = other DNA
atgggcagcgagaacagcgccctgaagagctacaccctgagagagccccccttcaccctgcccagcggcctggccgtgtaccccgccgtgctgcaggacggcaagttcgccagcgtgttcgtgtacaagagagagaacgaggacaaggtgaacaaggccgccaagcacctgaagaccctgagacacccctgcctgctgagattcctgagctgcaccgtggaggccgacggcatccacctggtgaccgagagagtgcagcccctggaggtggccctggagaccctgagcagcgccgaggtgtgcgccggcatctacgacatcctgctggccctgatcttcctgcacgacagaggccacctgacccacaacaacgtgtgcctgagcagcgtgttcgtgagcgaggacggccactggaagctgggcggcatggagaccgtgtgcaaggtgagccaggccacccccgagttcctgagaagcatccagagcatcagagaccccgccagcatcccccccgaggagatgagccccgagttcaccaccctgcccgagtgccacggccacgccagagacgccttcagcttcggcaccctggtggagagcctgctgaccatcctgaacgagcaggtgagcgccgacgtgctgagcagcttccagcagaccctgcacagcaccctgctgaaccccatccccaagtgcagacccgccctgtgcaccctgctgagccacgacttcttcagaaacgacttcctggaggtggtgaacttcctgaagagcctgaccctgaagagcgaggaggagaagaccgagttcttcaagttcctgctggacagagtgagctgcctgagcgaggagctgatcgccagcagactggtgcccctgctgctgaaccagctggtgttcgccgagcccgtggccgtgaagagcttcctgccctacctgctgggccccaagaaggaccacgcccagggcgagaccccctgcctgctgagccccgccctgttccagagcagagtgatccccgtgctgctgcagctgttcgaggtgcacgaggagcacgtgagaatggtgctgctgagccacatcgaggcctacgtggagcacttcacccaggagcagctgaagaaggtgatcctgccccaggtgctgctgggcctgagagacaccagcgacagcatcgtggccatcaccctgcacagcctggccgtgctggtgagcctgctgggccccgaggtggtggtgggcggcgagagaaccaagatcttcaagagaaccgcccccagcttcaccaagaacaccgacctgagcctggaggacagccccatgtgcgtggtgtgcagccaccacagccagatcagccccatcctggagaaccccttcagcagcatcttccccaagtgcttcttcagcggcagcacccccatcaacagcaagaagcacatccagagagactactacaacaccctgctgcagaccggcgaccccttcagccagcccatcaagttccccatcaacggcctgagcgacgtgaagaacaccagcgaggacagcgagaacttccccagcagcagcaagaagagcgaggagtggcccgactggagcgagcccgaggagcccgagaaccagaccgtgaacatccagatctggcccagagagccctgcgacgacgtgaagagccagtgcaccaccctggacgtggaggagagcagctgggacgactgcgagcccagcagcctggacaccaaggtgaaccccggcggcggcatcaccgccaccaagcccgtgaccagcggcgagcagaagcccatccccgccctgctgagcctgaccgaggagagcatgccctggaagagcagcctgccccagaagatcagcctggtgcagagaggcgacgacgccgaccagatcgagccccccaaggtgagcagccaggagagacccctgaaggtgcccagcgagctgggcctgggcgaggagttcaccatccaggtgaagaagaagcccgtgaaggaccccgagatggactggttcgccgacatgatccccgagatcaagcccagcgccgccttcctgatcctgcccgagctgagaaccgagatggtgcccaagaaggacgacgtgagccccgtgatgcagttcagcagcaagttcgccgccgccgagatcaccgagggcgaggccgagggctgggaggaggagggcgagctgaactgggaggacaacaactggtag

SEQ ID NO: 12798 - DNA, 2067 bp, synthetic construct
  misc_feature 1..2067: note = Description of Artificial Sequence: Synthetic coding sequence
  source 1..2067: mol_type = other DNA
atgggcagcgagaacagcgccctgaagagctacaccctgagagagccccccttcaccctgcccagcggcctggccgtgtaccccgccgtgctgcaggacggcaagttcgccagcgtgttcgtgtacaagagagagaacgaggacaaggtgaacaaggccgccaagcacctgaagaccctgagacacccctgcctgctgagattcctgagctgcaccgtggaggccgacggcatccacctggtgaccgagagagtgcagcccctggaggtggccctggagaccctgagcagcgccgaggtgtgcgccggcatctacgacatcctgctggccctgatcttcctgcacgacagaggccacctgacccacaacaacgtgtgcctgagcagcgtgttcgtgagcgaggacggccactggaagctgggcggcatggagaccgtgtgcaaggtgagccaggccacccccgagttcctgagaagcatccagagcatcagagaccccgccagcatcccccccgaggagatgagccccgagttcaccaccctgcccgagtgccacggccacgccagagacgccttcagcttcggcaccctggtggagagcctgctgaccatcctgaacgagcaggtgagcgccgacgtgctgagcagcttccagcagaccctgcacagcaccctgctgaaccccatccccaagtgcagacccgccctgtgcaccctgctgagccacgacttcttcagaaacgacttcctggaggtggtgaacttcctgaagagcctgaccctgaagagcgaggaggagaagaccgagttcttcaagttcctgctggacagagtgagctgcctgagcgaggagctgatcgccagcagactggtgcccctgctgctgaaccagctggtgttcgccgagcccgtggccgtgaagagcttcctgccctacctgctgggccccaagaaggaccacgcccagggcgagaccccctgcctgctgagccccgccctgttccagagcagagtgatccccgtgctgctgcagctgttcgaggtgcacgaggagcacgtgagaatggtgctgctgagccacatcgaggcctacgtggagcacttcacccaggagcagctgaagaaggtgatcctgccccaggtgctgctgggcctgagagacaccagcgacagcatcgtggccatcaccctgcacagcctggccgtgctggtgagcctgctgggccccgaggtggtggtgggcggcgagagaaccaagatcttcaagagaaccgcccccagcttcaccaagaacaccgacctgagcctggagggcgaccccttcagccagcccatcaagttccccatcaacggcctgagcgacgtgaagaacaccagcgaggacagcgagaacttccccagcagcagcaagaagagcgaggagtggcccgactggagcgagcccgaggagcccgagaaccagaccgtgaacatccagatctggcccagagagccctgcgacgacgtgaagagccagtgcaccaccctggacgtggaggagagcagctgggacgactgcgagcccagcagcctggacaccaaggtgaaccccggcggcggcatcaccgccaccaagcccgtgaccagcggcgagcagaagcccatccccgccctgctgagcctgaccgaggagagcatgccctggaagagcagcctgccccagaagatcagcctggtgcagagaggcgacgacgccgaccagatcgagccccccaaggtgagcagccaggagagacccctgaaggtgcccagcgagctgggcctgggcgaggagttcaccatccaggtgaagaagaagcccgtgaaggaccccgagatggactggttcgccgacatgatccccgagatcaagcccagcgccgccttcctgatcctgcccgagctgagaaccgagatggtgcccaagaaggacgacgtgagccccgtgatgcagttcagcagcaagttcgccgccgccgagatcaccgagggcgaggccgagggctgggaggaggagggcgagctgaactgggaggacaacaactggtag

SEQ ID NO: 12799 - DNA, 2229 bp, synthetic construct; identical to SEQ ID NO: 12797
  misc_feature 1..2229: note = Description of Artificial Sequence: Synthetic coding sequence
  source 1..2229: mol_type = other DNA

SEQ ID NO: 12800 - DNA, 1767 bp, synthetic construct
  misc_feature 1..1767: note = Description of Artificial Sequence: Synthetic coding sequence
  source 1..1767: mol_type = other DNA
atgggcagcgagaacagcgccctgaagagctacaccctgagagagccccccttcaccctgcccagcggcctggccgtgtaccccgccgtgctgcaggacggcaagttcgccagcgtgttcgtgtacaagagagagaacgaggacaaggtgaacaaggccgccaagcacctgaagaccctgagacacccctgcctgctgagattcctgagctgcaccgtggaggccgacggcatccacctggtgaccgagagagtgcagcccctggaggtggccctggagaccctgagcagcgccgaggtgtgcgccggcatctacgacatcctgctggccctgatcttcctgcacgacagaggccacctgacccacaacaacgtgtgcctgagcagcgtgttcgtgagcgaggacggccactggaagctgggcggcatggagaccgtgtgcaaggtgagccaggccacccccgagttcctgagaagcatccagagcatcagagaccccgccagcatcccccccgaggagatgagccccgagttcaccaccctgcccgagtgccacggccacgccagagacgccttcagcttcggcaccctggtggagagcctgctgaccatcctgaacgagcaggtgagcgccgacgtgctgagcagcttccagcagaccctgcacagcaccctgctgaaccccatccccaagtgcagacccgccctgtgcaccctgctgagccacgacttcttcagaaacgacttcctggaggtggtgaacttcctgaagagcctgaccctgaagagcgaggaggagaagaccgagttcttcaagttcctgctggacagagtgagctgcctgagcgaggagctgatcgccagcagactggtgcccctgctgctgaaccagctggtgttcgccgagcccgtggccgtgaagagcttcctgccctacctgctgggccccaagaaggaccacgcccagggcgagaccccctgcctgctgagccccgccctgttccagagcagagtgatccccgtgctgctgcagctgttcgaggtgcacgaggagcacgtgagaatggtgctgctgagccacatcgaggcctacgtggagcacttcacccaggagcagctgaagaaggtgatcctgccccaggtgctgctgggcctgagagacaccagcgacagcatcgtggccatcaccctgcacagcctggccgtgctggtgagcctgctgggccccgaggtggtggtgggcggcgagagaaccaagatcttcaagagaaccgcccccagcttcaccaagaacaccgacctgagcctggagggcgaccccttcagccagcccatcaagttccccatcaacggcctgagcgacgtgaagaacaccagcgaggacagcgagaacttccccagcagcagcaagaagagcgaggagtggcccgactggagcgagcccgaggagcccgagaaccagaccgtgaacatccagatctggcccagagagccctgcgacgacgtgaagagccagtgcaccaccctggacgtggaggagagcagctgggacgactgcgagcccagcagcctggacaccaaggtgaaccccggcggcggcatcaccgccaccaagcccgtgaccagcggcgagcagaagcccatccccgccctgctgagcctgaccgaggagagcatgccctggaagagcagcctgccccagaagatcagcctggtgcagagaggcgacgacgccgaccagatcgagccccccaaggtgagcagctag

SEQ ID NO: 12801 - DNA, 1008 bp, synthetic construct
  misc_feature 1..1008: note = Description of Artificial Sequence: Synthetic coding sequence
  source 1..1008: mol_type = other DNA
atgaagctgcccgccagagtgttcttcaccctgggcagcagactgccctgcggcctggcccccagaagattcttcagctacggcaccaagatcctgtaccagaacaccgaggccctgcagagcaagttcttcagccccctgcagaaggccatgctgccccccaacagcttccagggcaaggtggccttcatcaccggcggcggcaccggcctgggcaagggcatgaccaccctgctgagcagcctgggcgcccagtgcgtgatcgccagcagaaagatggacgtgctgaaggccaccgccgagcagatcagcagccagaccggcaacaaggtgcacgccatccagtgcgacgtgagagaccccgacatggtgcagaacaccgtgagcgagctgatcaaggtggccggccaccccaacatcgtgatcaacaacgccgccggcaacttcatcagccccaccgagagactgagccccaacgcctggaagaccatcaccgacatcgtgctgaacggcaccgccttcgtgaccctggagatcggcaagcagctgatcaaggcccagaagggcgccgccttcctgagcatcaccaccatctacgccgagaccggcagcggcttcgtggtgcccagcgccagcgccaaggccggcgtggaggccatgagcaagagcctggccgccgagtggggcaagtacggcatgagattcaacgtgatccagcccggccccatcaagaccaagggcgccttcagcagactggaccccaccggcaccttcgagaaggagatgatcggcagaatcccctgcggcagactgggcaccgtggaggagctggccaacctggccgccttcctgtgcagcgactacgccagctggatcaacggcgccgtgatcaagttcgacggcggcgaggaggtgctgatcagcggcgagttcaacgacctgagaaaggtgaccaaggagcagtgggacaccatcgaggagctgatcagaaagaccaagggcagctag

SEQ ID NO: 12802 - DNA, 945 bp, synthetic construct
  misc_feature 1..945: note = Description of Artificial Sequence: Synthetic coding sequence
  source 1..945: mol_type = other DNA
atgggcatcggcagaagcgagggcggcagaagaggcgccgccctgggcgtgctgctggccctgggcgccgccctgctggccgtgggcagcgccagcgagtacgactacgtgagcttccagagcgacatcggcccctaccagagcggcagattctacaccaagcccccccagtgcgtggacatccccgccgacctgagactgtgccacaacgtgggctacaagaagatggtgctgcccaacctgctggagcacgagaccatggccgaggtgaagcagcaggccagcagctgggtgcccctgctgaacaagaactgccacgccggcacccaggtgttcctgtgcagcctgttcgcccccgtgtgcctggacagacccatctacccctgcagatggctgtgcgaggccgtgagagacagctgcgagcccgtgatgcagttcttcggcttctactggcccgagatgctgaagtgcgacaagttccccgagggcgacgtgtgcatcgccatgaccccccccaacgccaccgaggccagcaagccccagggcaccaccgtgtgccccccctgcgacaacgagctgaagagcgaggccatcatcgagcacctgtgcgccagcgagttcgccctgagaatgaagatcaaggaggtgaagaaggagaacggcgacaagaagatcgtgcccaagaagaagaagcccctgaagctgggccccatcaagaagaaggacctgaagaagctggtgctgtacctgaagaacggcgccgactgcccctgccaccagctggacaacctgagccaccacttcctgatcatgggcagaaaggtgaagagccagtacctgctgaccgccatccacaagtgggacaagaagaacaaggagttcaagaacttcatgaagaagatgaagaaccacgagtgccccaccttccagagcgtgttcaagtag

SEQ ID NO: 12803 - DNA, 1041 bp, synthetic construct
  misc_feature 1..1041: note = Description of Artificial Sequence: Synthetic coding sequence
  source 1..1041: mol_type = other DNA
atgttcctgagcatcctggtggccctgtgcctgtggctgcacctggccctgggcgtgagaggcgccccctgcgaggccgtgagaatccccatgtgcagacacatgccctggaacatcaccagaatgcccaaccacctgcaccacagcacccaggagaacgccatcctggccatcgagcagtacgaggagctggtggacgtgaactgcagcgccgtgctgagattcttcctgtgcgccatgtacgcccccatctgcaccctggagttcctgcacgaccccatcaagccctgcaagagcgtgtgccagagagccagagacgactgcgagcccctgatgaagatgtacaaccacagctggcccgagagcctggcctgcgacgagctgcccgtgtacgacagaggcgtgtgcatcagccccgaggccatcgtgaccgacctgcccgaggacgtgaagtggatcgacatcacccccgacatgatggtgcaggagagacccctggacgtggactgcaagagactgagccccgacagatgcaagtgcaagaaggtgaagcccaccctggccacctacctgagcaagaactacagctacgtgatccacgccaagatcaaggccgtgcagagaagcggctgcaacgaggtgaccaccgtggtggacgtgaaggagatcttcaagagcagcagccccatccccagaacccaggtgcccctgatcaccaacagcagctgccagtgcccccacatcctgccccaccaggacgtgctgatcatgtgctacgagtggagaagcagaatgatgctgctggagaactgcctggtggagaagtggagagaccagctgagcaagagaagcatccagtgggaggagagactgcaggagcagagaagaaccgtgcaggacaagaagaagaccgccggcagaaccagcagaagcaacccccccaagcccaagggcaagccccccgcccccaagcccgccagccccaagaagaacatcaagaccagaagcgcccagaagagaaccaaccccaagagagtgtag

SEQ ID NO: 12804 - DNA, 1032 bp, synthetic construct
  misc_feature 1..1032: note = Description of Artificial Sequence: Synthetic coding sequence
  source 1..1032: mol_type = other DNA
atgagagtggccggcagagagggcagattcctgagcgccggcgtggccgccagagagggcagcgccatgttcctgagcatcctggtggccctgtgcctgtggctgcacctggccctgggcgtgagaggcgccccctgcgaggccgtgagaatccccatgtgcagacacatgccctggaacatcaccagaatgcccaaccacctgcaccacagcacccaggagaacgccatgtacgcccccatctgcaccctggagttcctgcacgaccccatcaagccctgcaagagcgtgtgccagagagccagagacgactgcgagcccctgatgaagatgtacaaccacagctggcccgagagcctggcctgcgacgagctgcccgtgtacgacagaggcgtgtgcatcagccccgaggccatcgtgaccgacctgcccgaggacgtgaagtggatcgacatcacccccgacatgatggtgcaggagagacccctggacgtggactgcaagagactgagccccgacagatgcaagtgcaagaaggtgaagcccaccctggccacctacctgagcaagaactacagctacgtgatccacgccaagatcaaggccgtgcagagaagcggctgcaacgaggtgaccaccgtggtggacgtgaaggagatcttcaagagcagcagccccatccccagaacccaggtgcccctgatcaccaacagcagctgccagtgcccccacatcctgccccaccaggacgtgctgatcatgtgctacgagtggagaagcagaatgatgctgctggagaactgcctggtggagaagtggagagaccagctgagcaagagaagcatccagtgggaggagagactgcaggagcagagaagaaccgtgcaggacaagaagaagaccgccggcagaaccagcagaagcaacccccccaagcccaagggcaagccccccgcccccaagcccgccagccccaagaagaacatcaagaccagaagcgcccagaagagaaccaaccccaagagagtgtag

SEQ ID NO: 12805 - DNA, 954 bp, synthetic construct
  misc_feature 1..954: note = Description of Artificial Sequence: Synthetic coding sequence
  source 1..954: mol_type = other DNA
atgagagccgccgccgccggcggcggcgtgagaaccgccgccctggccctgctgctgggcgccctgcactgggcccccgccagatgcgaggagtacgactactacggctggcaggccgagcccctgcacggcagaagctacagcaagcccccccagtgcctggacatccccgccgacctgcccctgtgccacaccgtgggctacaagagaatgagactgcccaacctgctggagcacgagagcctggccgaggtgaagcagcaggccagcagctggctgcccctgctggccaagagatgccacagcgacacccaggtgttcctgtgcagcctgttcgcccccgtgtgcctggacagacccatctacccctgcagaagcctgtgcgaggccgtgagagccggctgcgcccccctgatggaggcctacggcttcccctggcccgagatgctgcactgccacaagttccccctggacaacgacctgtgcatcgccgtgcagttcggccacctgcccgccaccgccccccccgtgaccaagatctgcgcccagtgcgagatggagcacagcgccgacggcctgatggagcagatgtgcagcagcgacttcgtggtgaagatgagaatcaaggagatcaagatcgagaacggcgacagaaagctgatcggcgcccagaagaagaagaagctgctgaagcccggccccctgaagagaaaggacaccaagagactggtgctgcacatgaagaacggcgccggctgcccctgcccccagctggacagcctggccggcagcttcctggtgatgggcagaaaggtggacggccagctgctgctgatggccgtgtacagatgggacaagaagaacaaggagatgaagttcgccgtgaagttcatgttcagctacccctgcagcctgtactaccccttcttctacggcgccgccgagccccactag

SEQ ID NO: 12806 - DNA, 903 bp, synthetic construct
  misc_feature 1..903: note = Description of Artificial Sequence: Synthetic coding sequence
  source 1..903: mol_type = other DNA
atgagaatcgccgtgatctgcttctgcctgctgggcatcacctgcgccatccccgtgaagcaggccgacagcggcagcagcgaggagaagcagctgtacaacaagtaccccgacgccgtggccacctggctgaaccccgaccccagccagaagcagaacctgctggccccccagaccctgcccagcaagagcaacgagagccacgaccacatggacgacatggacgacgaggacgacgacgaccacgtggacagccaggacagcatcgacagcaacgacagcgacgacgtggacgacaccgacgacagccaccagagcgacgagagccaccacagcgacgagagcgacgagctggtgaccgacttccccaccgacctgcccgccaccgaggtgttcacccccgtggtgcccaccgtggacacctacgacggcagaggcgacagcgtggtgtacggcctgagaagcaagagcaagaagttcagaagacccgacatccagtaccccgacgccaccgacgaggacatcaccagccacatggagagcgaggagctgaacggcgcctacaaggccatccccgtggcccaggacctgaacgcccccagcgactgggacagcagaggcaaggacagctacgagaccagccagctggacgaccagagcgccgagacccacagccacaagcagagcagactgtacaagagaaaggccaacgacgagagcaacgagcacagcgacgtgatcgacagccaggagctgagcaaggtgagcagagagttccacagccacgagttccacagccacgaggacatgctggtggtggaccccaagagcaaggaggaggacaagcacctgaagttcagaatcagccacgagctggacagcgccagcagcgaggtgaactag

SEQ ID NO: 12807 - DNA, 879 bp, synthetic construct
  misc_feature 1..879: note = Description of Artificial Sequence: Synthetic coding sequence
  source 1..879: mol_type = other DNA
atgagaatcgccgtgatctgcttctgcctgctgggcatcacctgcgccatccccgtgaagcaggccgacagcggcagcagcgaggagaagcagctgtacaacaagtaccccgacgccgtggccacctggctgaaccccgaccccagccagaagcagaacctgctggccccccagaacgccgtgagcagcgaggagaccaacgacttcaagcaggagaccctgcccagcaagagcaacgagagccacgaccacatggacgacatggacgacgaggacgacgacgaccaccagagcgacgagagccaccacagcgacgagagcgacgagctggtgaccgacttccccaccgacctgcccgccaccgaggtgttcacccccgtggtgcccaccgtggacacctacgacggcagaggcgacagcgtggtgtacggcctgagaagcaagagcaagaagttcagaagacccgacatccagtaccccgacgccaccgacgaggacatcaccagccacatggagagcgaggagctgaacggcgcctacaaggccatccccgtggcccaggacctgaacgcccccagcgactgggacagcagaggcaaggacagctacgagaccagccagctggacgaccagagcgccgagacccacagccacaagcagagcagactgtacaagagaaaggccaacgacgagagcaacgagcacagcgacgtgatcgacagccaggagctgagcaaggtgagcagagagttccacagccacgagttccacagccacgaggacatgctggtggtggaccccaagagcaaggaggaggacaagcacctgaagttcagaatcagccacgagctggacagcgccagcagcgaggtgaactag

SEQ ID NO: 12808 - DNA, 864 bp, synthetic construct
  misc_feature 1..864: note = Description of Artificial Sequence: Synthetic coding sequence
  source 1..864: mol_type = other DNA
atgagaatcgccgtgatctgcttctgcctgctgggcatcacctgcgccatccccgtgaagcaggccgacagcggcagcagcgaggagaagcagaacgccgtgagcagcgaggagaccaacgacttcaagcaggagaccctgcccagcaagagcaacgagagccacgaccacatggacgacatggacgacgaggacgacgacgaccacgtggacagccaggacagcatcgacagcaacgacagcgacgacgtggacgacaccgacgacagccaccagagcgacgagagccaccacagcgacgagagcgacgagctggtgaccgacttccccaccgacctgcccgccaccgaggtgttcacccccgtggtgcccaccgtggacacctacgacggcagaggcgacagcgtggtgtacggcctgagaagcaagagcaagaagttcagaagacccgacatccagtaccccgacgccaccgacgaggacatcaccagccacatggagagcgaggagctgaacggcgcctacaaggccatccccgtggcccaggacctgaacgcccccagcgactgggacagcagaggcaaggacagctacgagaccagccagctggacgaccagagcgccgagacccacagccacaagcagagcagactgtacaagagaaaggccaacgacgagagcaacgagcacagcgacgtgatcgacagccaggagctgagcaaggtgagcagagagttccacagccacgagttccacagccacgaggacatgctggtggtggaccccaagagcaaggaggaggacaagcacctgaagttcagaatcagccacgagctggacagcgccagcagcgaggtgaactag

SEQ ID NO: 12809 - DNA, 945 bp, synthetic construct
  misc_feature 1..945: note = Description of Artificial Sequence: Synthetic coding sequence
  source 1..945: mol_type = other DNA
atgagaatcgccgtgatctgcttctgcctgctgggcatcacctgcgccatccccgtgaagcaggccgacagcggcagcagcgaggagaagcagctgtacaacaagtaccccgacgccgtggccacctggctgaaccccgaccccagccagaagcagaacctgctggccccccagaacgccgtgagcagcgaggagaccaacgacttcaagcaggagaccctgcccagcaagagcaacgagagccacgaccacatggacgacatggacgacgaggacgacgacgaccacgtggacagccaggacagcatcgacagcaacgacagcgacgacgtggacgacaccgacgacagccaccagagcgacgagagccaccacagcgacgagagcgacgagctggtgaccgacttccccaccgacctgcccgccaccgaggtgttcacccccgtggtgcccaccgtggacacctacgacggcagaggcgacagcgtggtgtacggcctgagaagcaagagcaagaagttcagaagacccgacatccagtaccccgacgccaccgacgaggacatcaccagccacatggagagcgaggagctgaacggcgcctacaaggccatccccgtggcccaggacctgaacgcccccagcgactgggacagcagaggcaaggacagctacgagaccagccagctggacgaccagagcgccgagacccacagccacaagcagagcagactgtacaagagaaaggccaacgacgagagcaacgagcacagcgacgtgatcgacagccaggagctgagcaaggtgagcagagagttccacagccacgagttccacagccacgaggacatgctggtggtggaccccaagagcaaggaggaggacaagcacctgaagttcagaatcagccacgagctggacagcgccagcagcgaggtgaactag

SEQ ID NO: 12810 - DNA, 822 bp, synthetic construct
  misc_feature 1..822: note = Description of Artificial Sequence: Synthetic coding sequence
  source 1..822: mol_type = other DNA
atgagaatcgccgtgatctgcttctgcctgctgggcatcacctgcgccatccccgtgaagcaggccgacagcggcagcagcgaggagaagcagaccctgcccagcaagagcaacgagagccacgaccacatggacgacatggacgacgaggacgacgacgaccacgtggacagccaggacagcatcgacagcaacgacagcgacgacgtggacgacaccgacgacagccaccagagcgacgagagccaccacagcgacgagagcgacgagctggtgaccgacttccccaccgacctgcccgccaccgaggtgttcacccccgtggtgcccaccgtggacacctacgacggcagaggcgacagcgtggtgtacggcctgagaagcaagagcaagaagttcagaagacccgacatccagtaccccgacgccaccgacgaggacatcaccagccacatggagagcgaggagctgaacggcgcctacaaggccatccccgtggcccaggacctgaacgcccccagcgactgggacagcagaggcaaggacagctacgagaccagccagctggacgaccagagcgccgagacccacagccacaagcagagcagactgtacaagagaaaggccaacgacgagagcaacgagcacagcgacgtgatcgacagccaggagctgagcaaggtgagcagagagttccacagccacgagttccacagccacgaggacatgctggtggtggaccccaagagcaaggaggaggacaagcacctgaagttcagaatcagccacgagctggacagcgccagcagcgaggtgaactag

SEQ ID NO: 12811 - DNA, 2370 bp, synthetic construct
  misc_feature 1..2370: note = Description of Artificial Sequence: Synthetic coding sequence
  source 1..2370: mol_type = other DNA
atgagaacctaccactacatccccctgttcatctggacctacatgttccacaccgtggacaccatcctgctgcaggagaagcccaacagctacctgagcagcaagaagatcgccggcctgaccaaggacgacggcaagatgctgagaagaaccaagagaggctggatgtggaaccagttcttcctgctggaggagtacaccggcaccgacacccagtacgtgggcaagctgcacaccgaccaggacaagggcgacggcaacctgaagtacatcctgaccggcgacggcgccggcagcctgttcgtgatcgacgagaacaccggcgacatccacgccgccaagaagctggacagagaggagaagagcctgtacatcctgagagccaaggccatcgacagaaagaccggcagacaggtggagcccgagagcgagttcatcatcaagatccacgacatcaacgacaacgagcccaagttcaccaaggacctgtacaccgccagcgtgcccgagatgagcggcgtgggcaccagcgtgatccaggtgaccgccaccgacgccgacgacgccaactacggcaacagcgccaaggtggtgtacagcatcctgcagggccagccctacttcagcgtggaccccgagagcggcatcatcaagaccgccctgcccgacatgagcagagagaacagagagcagtaccaggtggtgatccaggccaaggacatgggcggccagatgggcggcctgagcggcaccaccaccgtgaacatcaccctgaccgacgtgaacaacaacccccccagattcccccagagcacctaccagttcaacagccccgagagcgtgcccctgggcacccacctgggcagaatcaaggccaacgaccccgacgtgggcgagaacgccgagatggagtacagcatcgccgagggcgacggcgccgacatgttcgacgtgatcaccgacaaggacacccaggagggcatcatcaccgtgaagcagaacctggacttcgagaaccagatgctgtacaccctgagagtggacgccagcaacacccaccccgaccccagattcctgcacctgggccccttcaaggacaccgccgtggtgaagatcagcgtggaggacatcgacgagccccccgtgttcaccaaggtgagctacctgatcgaggtggacgaggacgtgaaggagggcagcatcatcggccaggtgaccgcctacgaccccgacgccagaaacaacctgatcaagtacagcgtggacagacacaccgacatggacagaatcttcggcatccacagcgagaacggcagcatcttcaccctgaaggccctggacagagagagcagcccctggcacaacatcaccgtgaccgccaccgagatcaacaaccccaagcagagcagccacatccccgtgttcatcagaatcctggacatcaacgaccacgcccccgagttcgccatgtactacgagaccttcgtgtgcgagaacgccaagcccggccagctgatccagaccgtgagcgtgatggacaaggacgacccccccagaggccacaagttcttcttcgagcccgtgcccgagttcaccctgaaccccaacttcaccatcgtggacaacaaggacaacaccgccggcatcatgaccagaaaggacggctacagcagaaacaagatgagcacctacctgctgcccatcctgatcttcgacaacgactaccccatccagagcagcaccggcaccctgaccatcagagtgtgcgcctgcgacaaccagggcaacatgcagagctgcaccgccgaggccctgatcctgagcgccggcctgagcaccggcgccctggtggccatcctgctgtgcgtgctgatcctgctgatcctggtggtgctgttcgccgccctgaagagacagagaaagaaggagcccctgatcatcagcaaggacgacgtgagagacaacatcgtgacctacaacgacgagggcggcggcgaggaggacacccaggccttcgacatcggcaccctgagaaaccccgaggccagagaggacagcaagctgagaagagacgtgatgcccgagaccatcttccagatcagaagaaccgtgcccctgtgggagaacatcgacgtgcaggacttcatccacagaagactgaaggagaacgacgccgaccccagcgcccccccctacgacagcctggccacctacgcctacgagggcaacgacagcatcgccgacagcctgagcagcctggagagcctgaccgccgactgcaaccaggactacgactacctgagcgactggggccccagattcaagaagctggccgacatgtacggcggcgacgacagcgacagagactag

SEQ ID NO: 12812 - DNA, 162 bp, synthetic construct
  misc_feature 1..162: note = Description of Artificial Sequence: Synthetic coding sequence
  source 1..162: mol_type = other DNA
atgagagcctggatcttcttcctgctgtgcctggccggcagagccctggccgccccccagcaggaggccctgcccgacgagaccgaggtggtggaggagaccgtggccgaggtgaccgaggtgagcgtgggcgccaaccccgtgcaggtggaggtgggctag

SEQ ID NO: 12813 - DNA, 336 bp, synthetic construct
  misc_feature 1..336: note = Description of Artificial Sequence: Synthetic coding sequence
  source 1..336: mol_type = other DNA
atgagagcctggatcttcttcctgctgtgcctggccggcagagccctggccgccccccagcaggaggccctgcccgacgagaccgaggtggtggaggagaccgtggccgaggtgaccgaggtgagcgtgggcgccaaccccgtgcaggtggaggtgggcgagttcgacgacggcgccgaggagaccgaggaggaggtggtggccgagaacccctgccagaaccaccactgcaagcacggcaaggtgtgcgagctggacgagaacaacacccccatgtgcgtgtgccaggaccccaccagctgccccgcccccatcggcgagttcgagaaggtgtag

SEQ ID NO: 12814 - DNA, 276 bp, synthetic construct
  misc_feature 1..276: note = Description of Artificial Sequence: Synthetic coding sequence
  source 1..276: mol_type = other DNA
atgaagctggccgtgaccctgaccctggtgaccctggccctgtgctgcagcagcgccagcgccgagatctgccccagcttccagagagtgatcgagaccctgctgatggacacccccagcagctacgaggccgccatggagctgttcagccccgaccaggacatgagagaggccggcgcccagctgaagaagctggtggacaccctgccccagaagcccagagagagcatcatcaagctgatggagaagatcgcccagagcagcctgtgcaactag

SEQ ID NO: 12815 - DNA, 1380 bp, synthetic construct
  misc_feature 1..1380: note = Description of Artificial Sequence: Synthetic coding sequence
  source 1..1380: mol_type = other DNA
atgatcaagagattcctggaggacaccaccgacgacggcgagctgagcaagttcgtgaaggacttcagcggcaacgccagctgccacccccccgaggccaagacctgggccagcagaccccaggtgcccgagcccagaccccaggcccccgacctgtacgacgacgacctggagttcagaccccccagcagaccccagagcagcgacaaccagcagtacttctgcgcccccgcccccctgagccccagcgccagacccagaagcccctggggcaagctggacccctacgacagcagcgaggacgacaaggagtacgtgggcttcgccaccctgcccaaccaggtgcacagaaagagcgtgaagaagggcttcgacttcaccctgatggtggccggcgagagcggcctgggcaagagcaccctggtgaacagcctgttcctgaccgacctgtacagagacagaaagctgctgggcgccgaggagagaatcatgcagaccgtggagatcaccaagcacgccgtggacatcgaggagaagggcgtgagactgagactgaccatcgtggacacccccggcttcggcgacgccgtgaacaacaccgagtgctggaagcccgtggccgagtacatcgaccagcagttcgagcagtacttcagagacgagagcggcctgaacagaaagaacatccaggacaacagagtgcactgctgcctgtacttcatcagccccttcggccacggcctgagacccctggacgtggagttcatgaaggccctgcaccagagagtgaacatcgtgcccatcctggccaaggccgacaccctgaccccccccgaggtggaccacaagaagagaaagatcagagaggagatcgagcacttcggcatcaagatctaccagttccccgactgcgacagcgacgaggacgaggacttcaagctgcaggaccaggccctgaaggagagcatccccttcgccgtgatcggcagcaacaccgtggtggaggccagaggcagaagagtgagaggcagactgtacccctggggcatcgtggaggtggagaaccccggccactgcgacttcgtgaagctgagaaccatgctggtgagaacccacatgcaggacctgaaggacgtgaccagagagacccactacgagaactacagagcccagtgcatccagagcatgaccagactggtggtgaaggagagaaacagaaacaagctgaccagagagagcggcaccgacttccccatccccgccgtgccccccggcaccgaccccgagaccgagaagctgatcagagagaaggacgaggagctgagaagaatgcaggagatgctgcacaagatccagaagcagatgaaggagaactactag

SEQ ID NO: 12816 - DNA, 1437 bp, synthetic construct
  misc_feature 1..1437: note = Description of Artificial Sequence: Synthetic coding sequence
  source 1..1437: mol_type = other DNA
atggacagaagcctgggctggcagggcaacagcgtgcccgaggacagaaccgaggccggcatcaagagattcctggaggacaccaccgacgacggcgagctgagcaagttcgtgaaggacttcagcggcaacgccagctgccacccccccgaggccaagacctgggccagcagaccccaggtgcccgagcccagaccccaggcccccgacctgtacgacgacgacctggagttcagaccccccagcagaccccagagcagcgacaaccagcagtacttctgcgcccccgcccccctgagccccagcgccagacccagaagcccctggggcaagctggacccctacgacagcagcgaggacgacaaggagtacgtgggcttcgccaccctgcccaaccaggtgcacagaaagagcgtgaagaagggcttcgacttcaccctgatggtggccggcgagagcggcctgggcaagagcaccctggtgaacagcctgttcctgaccgacctgtacagagacagaaagctgctgggcgccgaggagagaatcatgcagaccgtggagatcaccaagcacgccgtggacatcgaggagaagggcgtgagactgagactgaccatcgtggacacccccggcttcggcgacgccgtgaacaacaccgagtgctggaagcccgtggccgagtacatcgaccagcagttcgagcagtacttcagagacgagagcggcctgaacagaaagaacatccaggacaacagagtgcactgctgcctgtacttcatcagccccttcggccacggcctgagacccctggacgtggagttcatgaaggccctgcaccagagagtgaacatcgtgcccatcctggccaaggccgacaccctgaccccccccgaggtggaccacaagaagagaaagatcagagaggagatcgagcacttcggcatcaagatctaccagttccccgactgcgacagcgacgaggacgaggacttcaagctgcaggaccaggccctgaaggagagcatccccttcgccgtgatcggcagcaacaccgtggtggaggccagaggcagaagagtgagaggcagactgtacccctggggcatcgtggaggtggagaaccccggccactgcgacttcgtgaagctgagaaccatgctggtgagaacccacatgcaggacctgaaggacgtgaccagagagacccactacgagaactacagagcccagtgcatccagagcatgaccagactggtggtgaaggagagaaacagaaacaagctgaccagagagagcggcaccgacttccccatccccgccgtgccccccggcaccgaccccgagaccgagaagctgatcagagagaaggacgaggagctgagaagaatgcaggagatgctgcacaagatccagaagcagatgaaggagaactactag

SEQ ID NO: 12817 - DNA, 1380 bp, synthetic construct; identical to SEQ ID NO: 12815
  misc_feature 1..1380: note = Description of Artificial Sequence: Synthetic coding sequence
  source 1..1380: mol_type = other DNA

SEQ ID NO: 12818 - DNA, 1413 bp, synthetic construct
  misc_feature 1..1413: note = Description of Artificial Sequence: Synthetic coding sequence
  source 1..1413: mol_type = other DNA
atgcccggcttctacagcgtgatgaccgacgaggagatcaagagattcctggaggacaccaccgacgacggcgagctgagcaagttcgtgaaggacttcagcggcaacgccagctgccacccccccgaggccaagacctgggccagcagaccccaggtgcccgagcccagaccccaggcccccgacctgtacgacgacgacctggagttcagaccccccagcagaccccagagcagcgacaaccagcagtacttctgcgcccccgcccccctgagccccagcgccagacccagaagcccctggggcaagctggacccctacgacagcagcgaggacgacaaggagtacgtgggcttcgccaccctgcccaaccaggtgcacagaaagagcgtgaagaagggcttcgacttcaccctgatggtggccggcgagagcggcctgggcaagagcaccctggtgaacagcctgttcctgaccgacctgtacagagacagaaagctgctgggcgccgaggagagaatcatgcagaccgtggagatcaccaagcacgccgtggacatcgaggagaagggcgtgagactgagactgaccatcgtggacacccccggcttcggcgacgccgtgaacaacaccgagtgctggaagcccgtggccgagtacatcgaccagcagttcgagcagtacttcagagacgagagcggcctgaacagaaagaacatccaggacaacagagtgcactgctgcctgtacttcatcagccccttcggccacggcctgagacccctggacgtggagttcatgaaggccctgcaccagagagtgaacatcgtgcccatcctggccaaggccgacaccctgaccccccccgaggtggaccacaagaagagaaagatcagagaggagatcgagcacttcggcatcaagatctaccagttccccgactgcgacagcgacgaggacgaggacttcaagctgcaggaccaggccctgaaggagagcatccccttcgccgtgatcggcagcaacaccgtggtggaggccagaggcagaagagtgagaggcagactgtacccctggggcatcgtggaggtggagaaccccggccactgcgacttcgtgaagctgagaaccatgctggtgagaacccacatgcaggacctgaaggacgtgaccagagagacccactacgagaactacagagcccagtgcatccagagcatgaccagactggtggtgaaggagagaaacagaaacaagctgaccagagagagcggcaccgacttccccatccccgccgtgccccccggcaccgaccccgagaccgagaagctgatcagagagaaggacgaggagctgagaagaatgcaggagatgctgcacaagatccagaagcagatgaaggagaactactag

SEQ ID NO: 12819 - DNA, 825 bp, synthetic construct
  misc_feature 1..825: note = Description of Artificial Sequence: Synthetic coding sequence
  source 1..825: mol_type = other DNA
atgatcaagagattcctggaggacaccaccgacgacggcgagctgagcaagttcgtgaaggacttcagcggcaacgccagctgccacccccccgaggccaagacctgggccagcagaccccaggtgcccgagcccagaccccaggcccccgacctgtacgacgacgacctggagttcagaccccccagcagaccccagagcagcgacaaccagcagtacttctgcgcccccgcccccctgagccccagcgccagacccagaagcccctggggcaagctggacccctacgacagcagcgaggacgacaaggagtacgtgggcttcgccaccctgcccaaccaggtgcacagaaagagcgtgaagaagggcttcgacttcaccctgatggtggccggcgagagcggcctgggcaagagcaccctggtgaacagcctgttcctgaccgacctgtacagagacagaaagctgctgggcgccgaggagagaatcatgcagaccgtggagatcaccaagcacgccgtggacatcgaggagaagggcgtgagactgagactgaccatcgtggacacccccggcttcggcgacgccgtgaacaacaccgagtgctggaagcccgtggccgagtacatcgaccagcagttcgagcagtacttcagagacgagagcggcctgaacagaaagaacatccaggacaacagagtgcactgctgcctgtacttcatcagccccttcggccacggctacggccccagcctgagactgctggccccccccggcgccgtgaagggcaccggccaggagcaccagggccagggctgccactag

SEQ ID NO: 12820 - DNA, 1479 bp, synthetic construct
  misc_feature 1..1479: note = Description of Artificial Sequence: Synthetic coding sequence
  source 1..1479: mol_type = other DNA
tacagcagccccgccctgttcagcagcagagccgccccccagaagcccagaaaggagggcagccaggccgccggcctgctggtgttcagcgacagcctggagatcaagagattcctggaggacaccaccgacgacggcgagctgagcaagttcgtgaaggacttcagcggcaacgccagctgccacccccccgaggccaagacctgggccagcagaccccaggtgcccgagcccagaccccaggcccccgacctgtacgacgacgacctggagttcagaccccccagcagaccccagagcagcgacaaccagcagtacttctgcgcccccgcccccctgagccccagcgccagacccagaagcccctggggcaagctggacccctacgacagcagcgaggacgacaaggagtacgtgggcttcgccaccctgcccaaccaggtgcacagaaagagcgtgaagaagggcttcgacttcaccctgatggtggccggcgagagcggcctgggcaagagcaccctggtgaacagcctgttcctgaccgacctgtacagagacagaaagctgctgggcgccgaggagagaatcatgcagaccgtggagatcaccaagcacgccgtggacatcgaggagaagggcgtgagactgagactgaccatcgtggacacccccggcttcggcgacgccgtgaacaacaccgagtgctggaagcccgtggccgagtacatcgaccagcagttcgagcagtacttcagagacgagagcggcctgaacagaaagaacatccaggacaacagagtgcactgctgcctgtacttcatcagccccttcggccacggcctgagacccctggacgtggagttcatgaaggccctgcaccagagagtgaacatcgtgcccatcctggccaaggccgacaccctgaccccccccgaggtggaccacaagaagagaaagatcagagaggagatcgagcacttcggcatcaagatctaccagttccccgactgcgacagcgacgaggacgaggacttcaagctgcaggaccaggccctgaaggagagcatccccttcgccgtgatcggcagcaacaccgtggtggaggccagaggcagaagagtgagaggcagactgtacccctggggcatcgtggaggtggagaaccccggccactgcgacttcgtgaagctgagaaccatgctggtgagaacccacatgcaggacctgaaggacgtgaccagagagacccactacgagaactacagagcccagtgcatccagagcatgaccagactggtggtgaaggagagaaacagaaacaagctgaccagagagagcggcaccgacttccccatccccgccgtgccccccggcaccgaccccgagaccgagaagctgatcagagagaaggacgaggagctgagaagaatgcaggagatgctgcacaagatccagaagcagatgaaggagaactactag

SEQ ID NO: 12821 - DNA, 996 bp, synthetic construct
  misc_feature 1..996: note = Description of Artificial Sequence: Synthetic coding sequence
  source 1..996: mol_type = other DNA
atggtggccggcgagagcggcctgggcaagagcaccctggtgaacagcctgttcctgaccgacctgtacagagacagaaagctgctgggcgccgaggagagaatcatgcagaccgtggagatcaccaagcacgccgtggacatcgaggagaagggcgtgagactgagactgaccatcgtggacacccccggcttcggcgacgccgtgaacaacaccgagtgctggaagcccgtggccgagtacatcgaccagcagttcgagcagtacttcagagacgagagcggcctgaacagaaagaacatccaggacaacagagtgcactgctgcctgtacttcatcagccccttcggccacggcctgagacccctggacgtggagttcatgaaggccctgcaccagagagtgaacatcgtgcccatcctggccaaggccgacaccctgaccccccccgaggtggaccacaagaagagaaagatcagagaggagatcgagcacttcggcatcaagatctaccagttccccgactgcgacagcgacgaggacgaggacttcaagctgcaggaccaggccctgaaggagagcatccccttcgccgtgatcggcagcaacaccgtggtggaggccagaggcagaagagtgagaggcagactgtacccctggggcatcgtggaggtggagaaccccggccactgcgacttcgtgaagctgagaaccatgctggtgagaacccacatgcaggacctgaaggacgtgaccagagagacccactacgagaactacagagcccagtgcatccagagcatgaccagactggtggtgaaggagagaaacagaaacaagctgaccagagagagcggcaccgacttccccatccccgccgtgccccccggcaccgaccccgagaccgagaagctgatcagagagaaggacgaggagctgagaagaatgcaggagatgctgcacaagatccagaagcagatgaaggagaactactag

SEQ ID NO: 12822 - DNA, 1311 bp, synthetic construct
  misc_feature 1..1311: note = Description of Artificial Sequence: Synthetic coding sequence
  source 1..1311: mol_type = other DNA
atgagcgtgagcgccagaagcgccgccgccgaggagagaagcgtgaacagcagcaccatgggccagcagaagaacctggagggctacgtgggcttcgccaacctgcccaaccaggtgtacagaaagagcgtgaagagaggcttcgagttcaccctgatggtggtgggcgagagcggcctgggcaagagcaccctgatcaacagcctgttcctgaccgacctgtacagccccgagtaccccggccccagccacagaatcaagaagaccgtgcaggtggagcagagcaaggtgctgatcaaggagggcggcgtgcagctgctgctgaccatcgtggacacccccggcttcggcgacgccgtggacaacagcaactgctggcagcccgtgatcgactacatcgacagcaagttcgaggactacctgaacgccgagagcagagtgaacagaagacagatgcccgacaacagagtgcagtgctgcctgtacttcatcgcccccagcggccacggcctgaagcccctggacatcgagttcatgaagagactgcacgagaaggtgaacatcatccccctgatcgccaaggccgacaccctgacccccgaggagtgccagcagttcaagaagcagatcatgaaggagatccaggagcacaagatcaagatctacgagttccccgagaccgacgacgaggaggagaacaagctggtgaagaagatcaaggacagactgcccctggccgtggtgggcagcaacaccatcatcgaggtgaacggcaagagagtgagaggcagacagtacccctggggcgtggccgaggtggagaacggcgagcactgcgacttcaccatcctgagaaacatgctgatcagaacccacatgcaggacctgaaggacgtgaccaacaacgtgcactacgagaactacagaagcagaaagctggccgccgtgacctacaacggcgtggacaacaacaagaacaagggccagctgaccaagagccccctggcccagatggaggaggagagaagagagcacgtggccaagatgaagaagatggagatggagatggagcaggtgttcgagatgaaggtgaaggagaaggtgcagaagctgaaggacagcgaggccgagctgcagagaagacacgagcagatgaagaagaacctggaggcccagcacaaggagctggaggagaagagaagacagttcgaggacgagaaggccaactgggaggcccagcagagaatcctggagcagcagaacagcagcagaaccctggagaagaacaagaagaagggcaagatcttctag

SEQ ID NO: 12823 - DNA, 1317 bp, synthetic construct
  misc_feature 1..1317: note = Description of Artificial Sequence: Synthetic coding sequence
  source 1..1317: mol_type = other DNA
atgagcgtgagcgccagaagcgccgccgccgaggagagaagcgtgaacagcagcaccatggaggtggcccagcagaagaacctggagggctacgtgggcttcgccaacctgcccaaccaggtgtacagaaagagcgtgaagagaggcttcgagttcaccctgatggtggtgggcgagagcggcctgggcaagagcaccctgatcaacagcctgttcctgaccgacctgtacagccccgagtaccccggccccagccacagaatcaagaagaccgtgcaggtggagcagagcaaggtgctgatcaaggagggcggcgtgcagctgctgctgaccatcgtggacacccccggcttcggcgacgccgtggacaacagcaactgctggcagcccgtgatcgactacatcgacagcaagttcgaggactacctgaacgccgagagcagagtgaacagaagacagatgcccgacaacagagtgcagtgctgcctgtacttcatcgcccccagcggccacggcctgaagcccctggacatcgagttcatgaagagactgcacgagaaggtgaacatcatccccctgatcgccaaggccgacaccctgacccccgaggagtgccagcagttcaagaagcagatcatgaaggagatccaggagcacaagatcaagatctacgagttccccgagaccgacgacgaggaggagaacaagctggtgaagaagatcaaggacagactgcccctggccgtggtgggcagcaacaccatcatcgaggtgaacggcaagagagtgagaggcagacagtacccctggggcgtggccgaggtggagaacggcgagcactgcgacttcaccatcctgagaaacatgctgatcagaacccacatgcaggacctgaaggacgtgaccaacaacgtgcactacgagaactacagaagcagaaagctggccgccgtgacctacaacggcgtggacaacaacaagaacaagggccagctgaccaagagccccctggcccagatggaggaggagagaagagagcacgtggccaagatgaagaagatggagatggagatggagcaggtgttcgagatgaaggtgaaggagaaggtgcagaagctgaaggacagcgaggccgagctgcagagaagacacgagcagatgaagaagaacctggaggcccagcacaaggagctggaggagaagagaagacagttcgaggacgagaaggccaactgggaggcccagcagagaatcctggagcagcagaacagcagcagaaccctggagaagaacaagaagaagggcaagatcttctag

SEQ ID NO: 12824 - DNA, 1311 bp, synthetic construct
  misc_feature 1..1311: note = Description of Artificial Sequence: Synthetic coding sequence
  source 1..1311: mol_type = other DNA
atgagcgtgagcgccagaagcgccgccgccgaggagagaagcgtgaacagcagcaccatggtgcagcagaagaacctggagggctacgtgggcttcgccaacctgcccaaccaggtgtacagaaagagcgtgaagagaggcttcgagttcaccctgatggtggtgggcgagagcggcctgggcaagagcaccctgatcaacagcctgttcctgaccgacctgtacagccccgagtaccccggccccagccacagaatcaagaagaccgtgcaggtggagcagagcaaggtgctgatcaaggagggcggcgtgcagctgctgctgaccatcgtggacacccccggcttcggcgacgccgtggacaacagcaactgctggcagcccgtgatcgactacatcgacagcaagttcgaggactacctgaacgccgagagcagagtgaacagaagacagatgcccgacaacagagtgcagtgctgcctgtacttcatcgcccccagcggccacggcctgaagcccctggacatcgagttcatgaagagactgcacgagaaggtgaacatcatccccctgatcgccaaggccgacaccctgacccccgaggagtgccagcagttcaagaagcagatcatgaaggagatccaggagcacaagatcaagatctacgagttccccgagaccgacgacgaggaggagaacaagctggtgaagaagatcaaggacagactgcccctggccgtggtgggcagcaacaccatcatcgaggtgaacggcaagagagtgagaggcagacagtacccctggggcgtggccgaggtggagaacggcgagcactgcgacttcaccatcctgagaaacatgctgatcagaacccacatgcaggacctgaaggacgtgaccaacaacgtgcactacgagaactacagaagcagaaagctggccgccgtgacctacaacggcgtggacaacaacaagaacaagggccagctgaccaagagccccctggcccagatggaggaggagagaagagagcacgtggccaagatgaagaagatggagatggagatggagcaggtgttcgagatgaaggtgaaggagaaggtgcagaagctgaaggacagcgaggccgagctgcagagaagacacgagcagatgaagaagaacctggaggcccagcacaaggagctggaggagaagagaagacagttcgaggacgagaaggccaactgggaggcccagcagagaatcctggagcagcagaacagcagcagaaccctggagaagaacaagaagaagggcaagatcttctag

SEQ ID NO: 12825 - DNA, 267 bp, synthetic construct
  misc_feature 1..267: note = Description of Artificial Sequence: Synthetic coding sequence
  source 1..267: mol_type = other DNA
atgaagaagatggagatggagatggagcaggtgttcgagatgaaggtgaaggagaaggtgcagaagctgaaggacagcgaggccgagctgcagagaagacacgagcagatgaagaagaacctggaggcccagcacaaggagctggaggagaagagaagacagttcgaggacgagaaggccaactgggaggcccagcagagaatcctggagcagcagaacagcagcagaaccctggagaagaacaagaagaagggcaagatcttctag

SEQ ID NO: 12826 - DNA, 1155 bp, synthetic construct
  misc_feature 1..1155: note = Description of Artificial Sequence: Synthetic coding sequence
  source 1..1155: mol_type = other DNA
atggtggtgggcgagagcggcctgggcaagagcaccctgatcaacagcctgttcctgaccgacctgtacagccccgagtaccccggccccagccacagaatcaagaagaccgtgcaggtggagcagagcaaggtgctgatcaaggagggcggcgtgcagctgctgctgaccatcgtggacacccccggcttcggcgacgccgtggacaacagcaactgctggcagcccgtgatcgactacatcgacagcaagttcgaggactacctgaacgccgagagcagagtgaacagaagacagatgcccgacaacagagtgcagtgctgcctgtacttcatcgcccccagcggccacggcctgaagcccctggacatcgagttcatgaagagactgcacgagaaggtgaacatcatccccctgatcgccaaggccgacaccctgacccccgaggagtgccagcagttcaagaagcagatcatgaaggagatccaggagcacaagatcaagatctacgagttccccgagaccgacgacgaggaggagaacaagctggtgaagaagatcaaggacagactgcccctggccgtggtgggcagcaacaccatcatcgaggtgaacggcaagagagtgagaggcagacagtacccctggggcgtggccgaggtggagaacggcgagcactgcgacttcaccatcctgagaaacatgctgatcagaacccacatgcaggacctgaaggacgtgaccaacaacgtgcactacgagaactacagaagcagaaagctggccgccgtgacctacaacggcgtggacaacaacaagaacaagggccagctgaccaagagccccctggcccagatggaggaggagagaagagagcacgtggccaagatgaagaagatggagatggagatggagcaggtgttcgagatgaaggtgaaggagaaggtgcagaagctgaaggacagcgaggccgagctgcagagaagacacgagcagatgaagaagaacctggaggcccagcacaaggagctggaggagaagagaagacagttcgaggacgagaaggccaactgggaggcccagcagagaatcctggagcagcagaacagcagcagaaccctggagaagaacaagaagaagggcaagatcttctag

SEQ ID NO: 12827 - DNA, 708 bp, synthetic construct
  misc_feature 1..708: note = Description of Artificial Sequence: Synthetic coding sequence
  source 1..708: mol_type = other DNA
atgagcgtgagcgccagaagcgccgccgccgaggagagaagcgtgaacagcagcaccatgggccagcagaagaacctggagggctacgtgggcttcgccaacctgcccaaccaggtgtacagaaagagcgtgaagagaggcttcgagttcaccctgatggtggtgggcgagagcggcctgggcaagagcaccctgatcaacagcctgttcctgaccgacctgtacagccccgagtaccccggccccagccacagaatcaagaagaccgtgcaggtggagcagagcaaggtgctgatcaaggagggcggcgtgcagctgctgctgaccatcgtggacacccccggcttcggcgacgccgtggacaacagcaactgctggcagcccgtgatcgactacatcgacagcaagttcgaggactacctgaacgccgagagcagagtgaacagaagacagatgcccgacaacagagtgcagtgctgcctgtacttcatcgcccccagcggccacggcctgaagcccctggacatcgagttcatgaagagactgcacgagaaggtgaacatcatccccctgatcgccaaggccgacaccctgacccccgaggagtgccagcagttcaagaagcagatcatgaaggagatccaggagcacaagatcaagatctacgagttccccgagaccgccaagaagaagaagaagaagaagtag

SEQ ID NO: 12828 - DNA, 1155 bp, synthetic construct; identical to SEQ ID NO: 12826
  misc_feature 1..1155: note = Description of Artificial Sequence: Synthetic coding sequence
  source 1..1155: mol_type = other DNA

SEQ ID NO: 12829 - DNA, 1146 bp, synthetic construct
  misc_feature 1..1146: note = Description of Artificial Sequence: Synthetic coding sequence
  source 1..1146: mol_type = other DNA
gtgacccacgagaccatcgtggagcagcagaagaacctggagggctacgtgggcttcgccaacctgcccaaccaggtgtacagaaagagcgtgaagagaggcttcgagttcaccctgatggtggtgggcgagagcggcctgggcaagagcaccctgatcaacagcctgttcctgaccgacctgtacagccccgagtaccccggccccagccacagaatcaagaagaccgtgcaggtggagcagagcaaggtgctgatcaaggagggcggcgtgcagctgctgctgaccatcgtggacacccccggcttcggcgacgccgtggacaacagcaactgctggcagcccgtgatcgactacatcgacagcaagttcgaggactacctgaacgccgagagcagagtgaacagaagacagatgcccgacaacagagtgcagtgctgcctgtacttcatcgcccccagcggccacggcctgaagcccctggacatcgagttcatgaagagactgcacgagaaggtgaacatcatccccctgatcgccaaggccgacaccctgacccccgaggagtgccagcagttcaagaagcagatcatgaaggagatccaggagcacaagatcaagatctacgagttccccgagaccgacgacgaggaggagaacaagctggtgaagaagatcaaggacagactgcccctggccgtggtgggcagcaacaccatcatcgaggtgaacggcaagagagtgagaggcagacagtacccctggggcgtggccgaggtggagaacggcgagcactgcgacttcaccatcctgagaaacatgctgatcagaacccacatgcaggacctgaaggacgtgaccaacaacgtgcactacgagaactacagaagcagaaagctggccgccgtgacctacaacggcgtggacaacaacaagaacaagggccagctgaccaagagccccctggcccagatggaggaggagagaagagagcacgtggccaagatgaagaagatggagatggagatggagcaggtgttcgagatgaaggtgaaggagaaggtgcagaagctgaaggacagcgaggccgaggtgatcagcctgatcagccacctgctggccgacatcgtgttcctgttcaagtag

SEQ ID NO: 12830 - DNA, 1149 bp, synthetic construct
  misc_feature 1..1149: note = Description of Artificial Sequence: Synthetic coding sequence
  source 1..1149: mol_type = other DNA
atgggcgagagcggcctgggcaagagcaccctgatcaacagcctgttcctgaccgacctgtacagccccgagtaccccggccccagccacagaatcaagaagaccgtgcaggtggagcagagcaaggtgctgatcaaggagggcggcgtgcagctgctgctgaccatcgtggacacccccggcttcggcgacgccgtggacaacagcaactgctggcagcccgtgatcgactacatcgacagcaagttcgaggactacctgaacgccgagagcagagtgaacagaagacagatgcccgacaacagagtgcagtgctgcctgtacttcatcgcccccagcggccacggcctgaagcccctggacatcgagttcatgaagagactgcacgagaaggtgaacatcatccccctgatcgccaaggccgacaccctgacccccgaggagtgccagcagttcaagaagcagatcatgaaggagatccaggagcacaagatcaagatctacgagttccccgagaccgacgacgaggaggagaacaagctggtgaagaagatcaaggacagactgcccctggccgtggtgggcagcaacaccatcatcgaggtgaacggcaagagagtgagaggcagacagtacccctggggcgtggccgaggtggagaacggcgagcactgcgacttcaccatcctgagaaacatgctgatcagaacccacatgcaggacctgaaggacgtgaccaacaacgtgcactacgagaactacagaagcagaaagctggccgccgtgacctacaacggcgtggacaacaacaagaacaagggccagctgaccaagagccccctggcccagatggaggaggagagaagagagcacgtggccaagatgaagaagatggagatggagatggagcaggtgttcgagatgaaggtgaaggagaaggtgcagaagctgaaggacagcgaggccgagctgcagagaagacacgagcagatgaagaagaacctggaggcccagcacaaggagctggaggagaagagaagacagttcgaggacgagaaggccaactgggaggcccagcagagaatcctggagcagcagaacagcagcagaaccctggagaagaacaagaagaagggcaagatcttctag

SEQ ID NO: 12831 - DNA, 1302 bp, synthetic construct
  misc_feature 1..1302: note = Description of Artificial Sequence: Synthetic coding sequence
  source 1..1302: mol_type = other DNA
atggaggtggtggacccccagcagctgggcatgttcaccgagggcgagctgatgagcgtgggcatggacaccttcatccacagaatcgacagcaccgaggtgatctaccagcccagaagaaagagagccaagctgatcggcaagtacctgatgggcgacctgctgggcgagggcagctacggcaaggtgaaggaggtgctggacagcgagaccctgtgcagaagagccgtgaagatcctgaagaagaagaagctgagaagaatccccaacggcgaggccaacgtgaagaaggagatccagctgctgagaagactgagacacaagaacgtgatccagctggtggacgtgctgtacaacgaggagaagcagaagatgtacatggtgatggagtactgcgtgtgcggcatgcaggagatgctggacagcgtgcccgagaagagattccccgtgtgccaggcccacggctacttctgccagctgatcgacggcctggagtacctgcacagccagggcatcgtgcacaaggacatcaagcccggcaacctgctgctgaccaccggcggcaccctgaagatcagcgacctgggcgtggccgaggccctgcaccccttcgccgccgacgacacctgcagaaccagccagggcagccccgccttccagccccccgagatcgccaacggcctggacaccttcagcggcttcaaggtggacatctggagcgccggcgtgaccctgtacaacatcaccaccggcctgtaccccttcgagggcgacaacatctacaagctgttcgagaacatcggcaagggcagctacgccatccccggcgactgcggcccccccctgagcgacctgctgaagggcatgctggagtacgagcccgccaagagattcagcatcagacagatcagacagcacagctggttcagaaagaagcacccccccgccgaggcccccgtgcccatcccccccagccccgacaccaaggacagatggagaagcatgaccgtggtgccctacctggaggacctgcacggcgccgacgaggacgaggacctgttcgacatcgaggacgacatcatctacacccaggacttcaccgtgcccggccaggtgcccgaggaggaggccagccacaacggccagagaagaggcctgcccaaggccgtgtgcatgaacggcaccgaggccgcccagctgagcaccaagagcagagccgagggcagagcccccaaccccgccagaaaggcctgcagcgccagcagcaagatcagaagactgagcgcctgcaagcagcagtag

SEQ ID NO: 12832 - DNA, 1299 bp, synthetic construct
  misc_feature 1..1299: note = Description of Artificial Sequence: Synthetic coding sequence
  source 1..1299: mol_type = other DNA
atggaggtggtggacccccagcagctgggcatgttcaccgagggcgagctgatgagcgtgggcatggacaccttcatccacagaatcgacagcaccgaggtgatctaccagcccagaagaaagagagccaagctgatcggcaagtacctgatgggcgacctgctgggcgagggcagctacggcaaggtgaaggaggtgctggacagcgagaccctgtgcagaagagccgtgaagatcctgaagaagaagaagctgagaagaatccccaacggcgaggccaacgtgaagaaggagatccagctgctgagaagactgagacacaagaacgtgatccagctggtggacgtgctgtacaacgaggagaagcagaagatgtacatggtgatggagtactgcgtgtgcggcatgcaggagatgctggacagcgtgcccgagaagagattccccgtgtgccaggcccacggctacttctgccagctgatcgacggcctggagtacctgcacagccagggcatcgtgcacaaggacatcaagcccggcaacctgctgctgaccaccggcggcaccctgaagatcagcgacctgggcgtggccgaggccctgcaccccttcgccgccgacgacacctgcagaaccagccagggcagccccgccttccagccccccgagatcgccaacggcctggacaccttcagcggcttcaaggtggacatctggagcgccggcgtgaccctgtacaacatcaccaccggcctgtaccccttcgagggcgacaacatctacaagctgttcgagaacatcggcaagggcagctacgccatccccggcgactgcggcccccccctgagcgacctgctgaagggcatgctggagtacgagcccgccaagagattcagcatcagacagatcagacagcacagctggttcagaaagaagcacccccccgccgaggcccccgtgcccatcccccccagccccgacaccaaggacagatggagaagcatgaccgtggtgccctacctggaggacctgcacggcgccgacgaggacgaggacctgttcgacatcgaggacgacatcatctacacccaggacttcaccgtgcccggccaggtgcccgaggaggaggccagccacaacggccagagaagaggcctgcccaaggccgtgtgcatgaacggcaccgaggccgcccagctgagcaccaagagcagagccgaggccggcccccccaccctgcccgccagacccgccgccagcagcaagatcagaagactgagcgcctgcaagcagcagtag

SEQ ID NO: 12833 - DNA, 1248 bp, synthetic construct
  misc_feature 1..1248: note = Description of Artificial Sequence: Synthetic coding sequence
  source 1..1248: mol_type = other DNA
atggaggacctgtgcgtggccaacaccctgttcgccctgaacctgttcaagcacctggccaaggccagccccacccagaacctgttcctgagcccctggagcatcagcagcaccatggccatggtgtacatgggcagcagaggcagcaccgaggaccagatggccaaggtgctgcagttcaacgaggtgggcgccaacgccgtgacccccatgacccccgagaacttcaccagctgcggcttcatgcagcagatccagaagggcagctaccccgacgccatcctgcaggcccaggccgccgacaagatccacagcagcttcagaagcctgagcagcgccatcaacgccagcaccggcaactacctgctggagagcgtgaacaagctgttcggcgagaagagcgccagcttcagagaggagtacatcagactgtgccagaagtactacagcagcgagccccaggccgtggacttcctggagtgcgccgaggaggccagaaagaagatcaacagctgggtgaagacccagaccaagggcaagatccccaacctgctgcccgagggcagcgtggacggcgacaccagaatggtgctggtgaacgccgtgtacttcaagggcaagtggaagacccccttcgagaagaagctgaacggcctgtaccccttcagagtgaacagcgcccagagaacccccgtgcagatgatgtacctgagagagaagctgaacatcggctacatcgaggacctgaaggcccagatcctggagctgccctacgccggcgacgtgagcatgttcctgctgctgcccgacgagatcgccgacgtgagcaccggcctggagctgctggagagcgagatcacctacgacaagctgaacaagtggaccagcaaggacaagatggccgaggacgaggtggaggtgtacatcccccagttcaagctggaggagcactacgagctgagaagcatcctgagaagcatgggcatggaggacgccttcaacaagggcagagccaacttcagcggcatgagcgagagaaacgacctgttcctgagcgaggtgttccaccaggccatggtggacgtgaacgaggagggcaccgaggccgccgccggcaccggcggcgtgatgaccggcagaaccggccacggcggcccccagttcgtggccgaccaccccttcctgttcctgatcatgcacaagatcaccaactgcatcctgttcttcggcagattcagcagcccctag

SEQ ID NO: 12834 - DNA, 342 bp, synthetic construct
  misc_feature 1..342: note = Description of Artificial Sequence: Synthetic coding sequence
  source 1..342: mol_type = other DNA
atggaggacctgtgcgtggccaacaccctgttcgccctgaacctgttcaagcacctggccaaggccagccccacccagaacctgttcctgagcccctggagcatcagcagcaccatggccatggtgtacatgggcagcagaggcagcaccgaggaccagatggccaaggtgctgcagttcaacgaggtgggcgccaacgccgtgacccccatgacccccgagaacttcaccagctgcggcttcatgcagcagatccagaagggcagctaccccgacgccatcctgcaggcccaggccgccgacaagatccacagcagcttcagaagcctgagcagcgcctag

SEQ ID NO: 12835 - DNA, 486 bp, synthetic construct
  misc_feature 1..486: note = Description of Artificial Sequence: Synthetic coding sequence
  source 1..486: mol_type = other DNA
atggaggacctgtgcgtggccaacaccctgttcgccctgaacctgttcaagcacctggccaaggccagccccacccagaacctgttcctgagcccctggagcatcagcagcaccatggccatggtgtacatgggcagcagaggcagcaccgaggaccagatggccaaggtgctgcagttcaacgaggtgggcgccaacgccgtgacccccatgacccccgagaacttcaccagctgcggcttcatgcagcagatccagaagggcagctaccccgacgccatcctgcaggcccaggccgccgacaagatccacagcagcttcagaagcctgagcagcgccatcaacgccagcaccggcaactacctgctggagagcgtgaacaagctgttcggcgagaagagcgccagcttcagagaggagtacatcagactgtgccagaagtactacagcagcgagccccaggccgtggacttcctggagtgctag

SEQ ID NO: 12836 - DNA, 399 bp, synthetic construct
  misc_feature 1..399: note = Description of Artificial Sequence: Synthetic coding sequence
  source 1..399: mol_type = other DNA
atggaggacctgtgcgtggccaacaccctgttcgccctgaacctgttcaagcacctggccaaggccagccccacccagaacctgttcctgagcccctggagcatcagcagcaccatggccatggtgtacatgggcagcagaggcagcaccgaggaccagatggccaaggtgctgcagttcaacgaggtgggcgccaacgccgtgacccccatgacccccgagaacttcaccagctgcggcttcatgcagcagatccagaagggcagctaccccgacgccatcctgcaggcccaggccgccgacaagatccacagcagcttcagaagcctgagcagcgccatcaacgccagcaccggcaactacctgctggagagcgtgaacaagctgttcggcgagtag

SEQ ID NO: 12837 - DNA, 1248 bp, synthetic construct; identical to SEQ ID NO: 12833
  misc_feature 1..1248: note = Description of Artificial Sequence: Synthetic coding sequence
  source 1..1248: mol_type = other DNA

SEQ ID NO: 12838 - DNA, 2280 bp, synthetic construct
  misc_feature 1..2280: note = Description of Artificial Sequence: Synthetic coding sequence
  source 1..2280: mol_type = other DNA
atggccggcctgaccctgttcgtgggcagactgccccccagcgccagaagcgagcagctggaggagctgttcagccaggtgggccccgtgaagcagtgcttcgtggtgaccgagaagggcagcaaggcctgcagaggcttcggctacgtgaccttcagcatgctggaggacgtgcagagagccctgaaggagatcaccaccttcgagggctgcaagatcaacgtgaccgtggccaagaagaagctgagaaacaagaccaaggagaagggcaagaacgagaacagcgagtgccccaagaaggagcccaaggccaagaaggccaaggtggccgacaagaaggccagactgatcatcagaaacctgagcttcaagtgcagcgaggacgacctgaagaccgtgttcgcccagttcggcgccgtgctggaggtgaacatccccagaaagcccgacggcaagatgagaggcttcggcttcgtgcagttcaagaacctgctggaggccggcaaggccctgaagggcatgaacatgaaggagatcaagggcagaaccgtggccgtggactgggccgtggccaaggacaagtacaaggacacccagagcgtgagcgccatcggcgaggagaagagccacgagagcaagcaccaggagagcgtgaagaagaagggcagagaggaggaggacatggaggaggaggagaacgacgacgacgacgacgacgacgacgaggaggacggcgtgttcgacgacgaggacgaggaggaggagaacatcgagagcaaggtgaccaagcccgtgcagatccagaagagagccgtgaagagacccgcccccgccaagagcagcgaccacagcgaggaggacagcgacctggaggagagcgacagcatcgacgacggcgaggagctggcccagagcgacaccagcaccgaggagcaggaggacaaggccgtgcaggtgagcaacaagaagaagagaaagctgcccagcgacgtgaacgagggcaagaccgtgttcatcagaaacctgagcttcgacagcgaggaggaggagctgggcgagctgctgcagcagttcggcgagctgaagtacgtgagaatcgtgctgcaccccgacaccgagcacagcaagggctgcgccttcgcccagttcatgacccaggaggccgcccagaagtgcctgctggccgccagccccgagaacgaggccggcggcctgaagctggacggcagacagctgaaggtggacctggccgtgaccagagacgaggccgccaagctgcagaccaccaaggtgaagaagcccaccggcaccagaaacctgtacctggccagagagggcctgatcagagccggcaccaaggccgccgagggcgtgagcgccgccgacatggccaagagagagagattcgagctgctgaagcaccagaagctgaaggaccagaacatcttcgtgagcagaaccagactgtgcctgcacaacctgcccaaggccgtggacgacaagcagctgagaaagctgctgctgagcgccaccagcggcgagaagggcgtgagaatcaaggagtgcagagtgatgagagacctgaagggcgtgcacggcaacatgaagggccagagcctgggctacgccttcgccgagttccaggagcacgagcacgccctgaaggccctgagactgatcaacaacaaccccgagatcttcggccccctgaagagacccatcgtggagttcagcctggaggacagaagaaagctgaagatgaaggagctgagaatccagagaagcctgcagaagatgagaagcaagcccgccaccggcgagccccagaagggccagcccgagcccgccaaggaccagcagcagaaggccgcccagcaccacaccgaggagcagagcaaggtgccccccgagcagaagagaaaggccggcagcaccagctggaccggcttccagaccaaggccgaggtggagcaggtggagctgcccgacggcaagaagagaagaaaggtgctggccctgcccagccacagaggccccaagatcagactgagagacaagggcaaggtgaagcccgtgcaccccaagaagcccaagccccagatcaaccagtggaagcaggagaagcagcagctgagcagcgagcaggtgagcagaaagaaggccaagggcaacaagaccgagaccagattcaaccagctggtggagcagtacaagcagaagctgctgggccccagcaagggcgcccccctggccaagagaagcaagtggttcgacagctag

SEQ ID NO: 12839 - DNA, 1164 bp, synthetic construct
  misc_feature 1..1164: note = Description of Artificial Sequence: Synthetic coding sequence
  source 1..1164: mol_type = other DNA
atgcagatgagccccgccctgacctgcctggtgctgggcctggccctggtgttcggcgagggcagcgccgtgcaccacccccccagctacgtggcccaggccagcaaggacagaaacgtggtgttcagcccctacggcgtggccagcgtgctggccatgctgcagctgaccaccggcggcgagacccagcagcagatccaggccgccatgggcttcaagatcgacgacaagggcatggcccccgccctgagacacctgtacaaggagctgatgggcccctggaacaaggacgagatcagcaccaccgacgccatcttcgtgcagagagacctgaagctggtgcagggcttcatgccccacttcttcagactgttcagaagcaccgtgaagcaggtggacttcagcgaggtggagagagccagattcatcatcaacgactgggtgaagacccacaccaagggcatgatcagcaacctgctgggcaagggcgccgtggaccagctgaccagactggtgctggtgaacgccctgtacttcaacggccagtggaagacccccttccccgacagcagcacccacagaagactgttccacaagagcgacggcagcaccgtgagcgtgcccatgatggcccagaccaacaagttcaactacaccgagttcaccacccccgacggccactactacgacatcctggagctgccctaccacggcgacaccctgagcatgttcatcgccgccccctacgagaaggaggtgcccctgagcgccctgaccaacatcctgagcgcccagctgatcagccactggaagggcaacatgaccagactgcccagactgctggtgctgcccaagttcagcctggagaccgaggtggacctgagaaagcccctggagaacctgggcatgaccgacatgttcagacagttccaggccgacttcaccagcctgagcgaccaggagcccctgcacgtggcccaggccctgcagaaggtgaagatcgaggtgaacgagagcggcaccgtggccagcagcagcaccgccgtgatcgtgagcgccagaatggcccccgaggagatcatcatggacagacccttcctgttcgtggtgagacacaaccccaccggcaccgtgctgttcatgggccaggtgatggagccctag

SEQ ID NO: 12840 - DNA, 540 bp, synthetic construct
  misc_feature 1..540: note = Description of Artificial Sequence: Synthetic coding sequence
  source 1..540: mol_type = other DNA
atgatggcccagaccaacaagttcaactacaccgagttcaccacccccgacggccactactacgacatcctggagctgccctaccacggcgacaccctgagcatgttcatcgccgccccctacgagaaggaggtgcccctgagcgccctgaccaacatcctgagcgcccagctgatcagccactggaagggcaacatgaccagactgcccagactgctggtgctgcccaagttcagcctggagaccgaggtggacctgagaaagcccctggagaacctgggcatgaccgacatgttcagacagttccaggccgacttcaccagcctgagcgaccaggagcccctgcacgtggcccaggccctgcagaaggtgaagatcgaggtgaacgagagcggcaccgtggccagcagcagcaccgccgtgatcgtgagcgccagaatggcccccgaggagatcatcatggacagacccttcctgttcgtggtgagacacaaccccaccggcaccgtgctgttcatgggccaggtgatggagccctag

SEQ ID NO: 12841 - DNA, 711 bp, synthetic construct
  misc_feature 1..711: note = Description of Artificial Sequence: Synthetic coding sequence
  source 1..711: mol_type = other DNA
atgctgagcaagggcctgaagagaaagagagaggaggaggaggagaaggagcccctggccgtggacagctggtggctggaccccggccacaccgccgtggcccaggccccccccgccgtggccagcagcagcctgttcgacctgagcgtgctgaagctgcaccacagcctgcagcagagcgagcccgacctgagacacctggtgctggtggtgaacaccctgagaagaatccaggccagcatggcccccgccgccgccctgccccccgtgcccagcccccccgccgcccccagcgtggccgacaacctgctggccagcagcgacgccgccctgagcgccagcatggccagcctgctggaggacctgagccacatcgagggcctgagccaggccccccagcccctggccgacgagggcccccccggcagaagcatcggcggcgccgcccccagcctgggcgccctggacctgctgggccccgccaccggctgcctgctggacgacggcctggagggcctgttcgaggacatcgacaccagcatgtacgacaacgagctgtgggcccccgccagcgagggcctgaagcccggccccgaggacggccccggcaaggaggaggcccccgagctggacgaggccgagctggactacctgatggacgtgctggtgggcacccaggccctggagagaccccccggccccggcagatag

SEQ ID NO: 12842 - DNA, 1527 bp, synthetic construct
  misc_feature 1..1527: note = Description of Artificial Sequence: Synthetic coding sequence
  source 1..1527: mol_type = other DNA
atgctgcccacccaggccggcgccgccgccgccctgggcagaggcagcgccctgggcggcagcctgaacagaacccccaccggcagacccggcggcggcggcggcaccagaggcgccaacggcggcagagtgcccggcaacggcgccggcctgggccccggcagactggagagagaggccgccgccgccgccgccaccacccccgcccccaccgccggcgccctgtacagcggcagcgagggcgacagcgagagcggcgaggaggaggagctgggcgccgagagaagaggcctgaagagaagcctgagcgagatggagatcggcatggtggtgggcggccccgaggccagcgccgccgccaccggcggctacggccccgtgagcggcgccgtgagcggcgccaagcccggcaagaagaccagaggcagagtgaagatcaagatggagttcatcgacaacaagctgagaagatacaccaccttcagcaagagaaagaccggcatcatgaagaaggcctacgagctgagcaccctgaccggcacccaggtgctgctgctggtggccagcgagaccggccacgtgtacaccttcgccaccagaaagctgcagcccatgatcaccagcgagaccggcaaggccctgatccagacctgcctgaacagccccgacagcccccccagaagcgaccccaccaccgaccagagaatgagcgccaccggcttcgaggagaccgacctgacctaccaggtgagcgagagcgacagcagcggcgagaccaaggacaccctgaagcccgccttcaccgtgaccaacctgcccggcaccaccagcaccatccagaccgcccccagcaccagcaccaccatgcaggtgagcagcggccccagcttccccatcaccaactacctggcccccgtgagcgccagcgtgagccccagcgccgtgagcagcgccaacggcaccgtgctgaagagcaccggcagcggccccgtgagcagcggcggcctgatgcagctgcccaccagcttcaccctgatgcccggcggcgccgtggcccagcaggtgcccgtgcaggccatccaggtgcaccaggccccccagcaggccagccccagcagagacagcagcaccgacctgacccagaccagcagcagcggcaccgtgaccctgcccgccaccatcatgaccagcagcgtgcccaccaccgtgggcggccacatgatgtaccccagcccccacgccgtgatgtacgcccccaccagcggcctgggcgacggcagcctgaccgtgctgaacgccttcagccaggcccccagcaccatgcaggtgagccacagccaggtgcaggagcccggcggcgtgccccaggtgttcctgaccgccagcagcggcaccgtgcagatccccgtgagcgccgtgcagctgcaccagatggccgtgatcggccagcaggccggcagcagcagcaacctgaccgagctgcaggtggtgaacctggacaccgcccacagcaccaagagcgagtag

SEQ ID NO: 12843 - DNA, 915 bp, synthetic construct
  misc_feature 1..915: note = Description of Artificial Sequence: Synthetic coding sequence
  source 1..915: mol_type = other DNA
atgatcaccagcgagaccggcaaggccctgatccagacctgcctgaacagccccgacagcccccccagaagcgaccccaccaccgaccagagaatgagcgccaccggcttcgaggagaccgacctgacctaccaggtgagcgagagcgacagcagcggcgagaccaaggacaccctgaagcccgccttcaccgtgaccaacctgcccggcaccaccagcaccatccagaccgcccccagcaccagcaccaccatgcaggtgagcagcggccccagcttccccatcaccaactacctggcccccgtgagcgccagcgtgagccccagcgccgtgagcagcgccaacggcaccgtgctgaagagcaccggcagcggccccgtgagcagcggcggcctgatgcagctgcccaccagcttcaccctgatgcccggcggcgccgtggcccagcaggtgcccgtgcaggccatccaggtgcaccaggccccccagcaggccagccccagcagagacagcagcaccgacctgacccagaccagcagcagcggcaccgtgaccctgcccgccaccatcatgaccagcagcgtgcccaccaccgtgggcggccacatgatgtaccccagcccccacgccgtgatgtacgcccccaccagcggcctgggcgacggcagcctgaccgtgctgaacgccttcagccaggcccccagcaccatgcaggtgagccacagccaggtgcaggagcccggcggcgtgccccaggtgttcctgaccgccagcagcggcaccgtgcagatccccgtgagcgccgtgcagctgcaccagatggccgtgatcggccagcaggccggcagcagcagcaacctgaccgagctgcaggtggtgaacctggacaccgcccacagcaccaagagcgagtag

SEQ ID NO: 12844 - DNA, 834 bp, synthetic construct
  misc_feature 1..834: note = Description of Artificial Sequence: Synthetic coding sequence
  source 1..834: mol_type = other DNA
atgagcgcccccgccgccaaggtgagcaagaaggagctgaacagcaaccacgacggcgccgacgagaccagcgagaaggagcagcaggaggccatcgagcacatcgacgaggtgcagaacgagatcgacagactgaacgagcaggccagcgaggagatcctgaaggtggagcagaagtacaacaagctgagacagcccttcttccagaagagaagcgagctgatcgccaagatccccaacttctgggtgaccaccttcgtgaaccacccccaggtgagcgccctgctgggcgaggaggacgaggaggccctgcactacctgaccagagtggaggtgaccgagttcgaggacatcaagagcggctacagaatcgacttctacttcgacgagaacccctacttcgagaacaaggtgctgagcaaggagttccacctgaacgagagcggcgaccccagcagcaagagcaccgagatcaagtggaagagcggcaaggacctgaccaagagaagcagccagacccagaacaaggccagcagaaagagacagcacgaggagcccgagagcttcttcacctggttcaccgaccacagcgacgccggcgccgacgagctgggcgaggtgatcaaggacgacatctggcccaaccccctgcagtactacctggtgcccgacatggacgacgaggagggcgagggcgaggaggacgacgacgacgacgaggaggaggagggcctggaggacatcgacgaggagggcgacgaggacgagggcgaggaggacgaggacgacgacgagggcgaggagggcgaggaggacgagggcgaggacgactag

SEQ ID NO: 12845 - DNA, 798 bp, synthetic construct
  misc_feature 1..798: note = Description of Artificial Sequence: Synthetic coding sequence
  source 1..798: mol_type = other DNA
atgcccagaagccaccagccccccccccccccccacgagaaggagcagcaggaggccatcgagcacatcgacgaggtgcagaacgagatcgacagactgaacgagcaggccagcgaggagatcctgaaggtggagcagaagtacaacaagctgagacagcccttcttccagaagagaagcgagctgatcgccaagatccccaacttctgggtgaccaccttcgtgaaccacccccaggtgagcgccctgctgggcgaggaggacgaggaggccctgcactacctgaccagagtggaggtgaccgagttcgaggacatcaagagcggctacagaatcgacttctacttcgacgagaacccctacttcgagaacaaggtgctgagcaaggagttccacctgaacgagagcggcgaccccagcagcaagagcaccgagatcaagtggaagagcggcaaggacctgaccaagagaagcagccagacccagaacaaggccagcagaaagagacagcacgaggagcccgagagcttcttcacctggttcaccgaccacagcgacgccggcgccgacgagctgggcgaggtgatcaaggacgacatctggcccaaccccctgcagtactacctggtgcccgacatggacgacgaggagggcgagggcgaggaggacgacgacgacgacgaggaggaggagggcctggaggacatcgacgaggagggcgacgaggacgagggcgaggaggacgaggacgacgacgagggcgaggagggcgaggaggacgagggcgaggacgactag

SEQ ID NO: 12846 - DNA, 801 bp, synthetic construct
  misc_feature 1..801: note = Description of Artificial Sequence: Synthetic coding sequence
  source 1..801: mol_type = other DNA
atgatgcccagaagccaccagccccccccccccccccacgagaaggagcagcaggaggccatcgagcacatcgacgaggtgcagaacgagatcgacagactgaacgagcaggccagcgaggagatcctgaaggtggagcagaagtacaacaagctgagacagcccttcttccagaagagaagcgagctgatcgccaagatccccaacttctgggtgaccaccttcgtgaaccacccccaggtgagcgccctgctgggcgaggaggacgaggaggccctgcactacctgaccagagtggaggtgaccgagttcgaggacatcaagagcggctacagaatcgacttctacttcgacgagaacccctacttcgagaacaaggtgctgagcaaggagttccacctgaacgagagcggcgaccccagcagcaagagcaccgagatcaagtggaagagcggcaaggacctgaccaagagaagcagccagacccagaacaaggccagcagaaagagacagcacgaggagcccgagagcttcttcacctggttcaccgaccacagcgacgccggcgccgacgagctgggcgaggtgatcaaggacgacatctggcccaaccccctgcagtactacctggtgcccgacatggacgacgaggagggcgagggcgaggaggacgacgacgacgacgaggaggaggagggcctggaggacatcgacgaggagggcgacgaggacgagggcgaggaggacgaggacgacgacgagggcgaggagggcgaggaggacgagggcgaggacgactag

SEQ ID NO: 12847 - DNA, 873 bp, synthetic construct
  misc_feature 1..873: note = Description of Artificial Sequence: Synthetic coding sequence
  source 1..873: mol_type = other DNA
atggcccccaagagacagagccccctgcccccccagaagaagaagcccagacccccccccgccctgggccccgaggagaccagcgccagcgccggcctgcccaagaagggcgagaaggagcagcaggaggccatcgagcacatcgacgaggtgcagaacgagatcgacagactgaacgagcaggccagcgaggagatcctgaaggtggagcagaagtacaacaagctgagacagcccttcttccagaagagaagcgagctgatcgccaagatccccaacttctgggtgaccaccttcgtgaaccacccccaggtgagcgccctgctgggcgaggaggacgaggaggccctgcactacctgaccagagtggaggtgaccgagttcgaggacatcaagagcggctacagaatcgacttctacttcgacgagaacccctacttcgagaacaaggtgctgagcaaggagttccacctgaacgagagcggcgaccccagcagcaagagcaccgagatcaagtggaagagcggcaaggacctgaccaagagaagcagccagacccagaacaaggccagcagaaagagacagcacgaggagcccgagagcttcttcacctggttcaccgaccacagcgacgccggcgccgacgagctgggcgaggtgatcaaggacgacatctggcccaaccccctgcagtactacctggtgcccgacatggacgacgaggagggcgagggcgaggaggacgacgacgacgacgaggaggaggagggcctggaggacatcgacgaggagggcgacgaggacgagggcgaggaggacgaggacgacgacgagggcgaggagggcgaggaggacgagggcgaggacgactag

SEQ ID NO: 12848 - DNA, 807 bp, synthetic construct
  misc_feature 1..807: note = Description of Artificial Sequence: Synthetic coding sequence
  source 1..807: mol_type = other DNA
atgggctgcagagacctgctgcccagcctgaagcccaccctgctggagaaggagcagcaggaggccatcgagcacatcgacgaggtgcagaacgagatcgacagactgaacgagcaggccagcgaggagatcctgaaggtggagcagaagtacaacaagctgagacagcccttcttccagaagagaagcgagctgatcgccaagatccccaacttctgggtgaccaccttcgtgaaccacccccaggtgagcgccctgctgggcgaggaggacgaggaggccctgcactacctgaccagagtggaggtgaccgagttcgaggacatcaagagcggctacagaatcgacttctacttcgacgagaacccctacttcgagaacaaggtgctgagcaaggagttccacctgaacgagagcggcgaccccagcagcaagagcaccgagatcaagtggaagagcggcaaggacctgaccaagagaagcagccagacccagaacaaggccagcagaaagagacagcacgaggagcccgagagcttcttcacctggttcaccgaccacagcgacgccggcgccgacgagctgggcgaggtgatcaaggacgacatctggcccaaccccctgcagtactacctggtgcccgacatggacgacgaggagggcgagggcgaggaggacgacgacgacgacgaggaggaggagggcctggaggacatcgacgaggagggcgacgaggacgagggcgaggaggacgaggacgacgacgagggcgaggagggcgaggaggacgagggcgaggacgactag

SEQ ID NO: 12849 - DNA, 99 bp, synthetic construct
  misc_feature 1..99: note = Description of Artificial Sequence: Synthetic coding sequence
  source 1..99: mol_type = other DNA
atggcccccaagagacagagccccctgcccccccagaagaagaagcccagacccccccccgccctgggccccgaggagaccagcgccagcgccggctag

SEQ ID NO: 12850 - DNA, 942 bp, synthetic construct
  misc_feature 1..942: note = Description of Artificial Sequence: Synthetic coding sequence
  source 1..942: mol_type = other DNA
atgaccggcaaggccaccccccccagcctgtacagctggagaggcgtgctgttcacctgcctgcccgccgccagaaccagaaagagaaaggagatgagcagacagaccgccaccgccctgcccaccggcaccagcaagtgcccccccagccagagagtgcccgccctgaccggcaccaccgccagcaacaacgacctggccagcctgttcgagtgccccgtgtgcttcgactacgtgctgccccccatcctgcagtgccagagcggccacctggtgtgcagcaactgcagacccaagctgacctgctgccccacctgcagaggccccctgggcagcatcagaaacctggccatggagaaggtggccaacagcgtgctgttcccctgcaagtacgccagcagcggctgcgagatcaccctgccccacaccgagaaggccgaccacgaggagctgtgcgagttcagaccctacagctgcccctgccccggcgccagctgcaagtggcagggcagcctggacgccgtgatgccccacctgatgcaccagcacaagagcatcaccaccctgcagggcgaggacatcgtgttcctggccaccgacatcaacctgcccggcgccgtggactgggtgatgatgcagagctgcttcggcttccacttcatgctggtgctggagaagcaggagaagtacgacggccaccagcagttcttcgccatcgtgcagctgatcggcaccagaaagcaggccgagaacttcgcctacagactggagctgaacggccacagaagaagactgacctgggaggccacccccagaagcatccacgagggcatcgccaccgccatcatgaacagcgactgcctggtgttcgacaccagcatcgcccagctgttcgccgagaacggcaacctgggcatcaacgtgaccatcagcatgtgctag

SEQ ID NO: 12851 - DNA, 897 bp, synthetic construct
  misc_feature 1..897: note = Description of Artificial Sequence: Synthetic coding sequence
  source 1..897: mol_type = other DNA
atggtgatcatcatcttcctgctgcccccctacgtgttcatcagcgagatgagcagacagaccgccaccgccctgcccaccggcaccagcaagtgcccccccagccagagagtgcccgccctgaccggcaccaccgccagcaacaacgacctggccagcctgttcgagtgccccgtgtgcttcgactacgtgctgccccccatcctgcagtgccagagcggccacctggtgtgcagcaactgcagacccaagctgacctgctgccccacctgcagaggccccctgggcagcatcagaaacctggccatggagaaggtggccaacagcgtgctgttcccctgcaagtacgccagcagcggctgcgagatcaccctgccccacaccgagaaggccgaccacgaggagctgtgcgagttcagaccctacagctgcccctgccccggcgccagctgcaagtggcagggcagcctggacgccgtgatgccccacctgatgcaccagcacaagagcatcaccaccctgcagggcgaggacatcgtgttcctggccaccgacatcaacctgcccggcgccgtggactgggtgatgatgcagagctgcttcggcttccacttcatgctggtgctggagaagcaggagaagtacgacggccaccagcagttcttcgccatcgtgcagctgatcggcaccagaaagcaggccgagaacttcgcctacagactggagctgaacggccacagaagaagactgacctgggaggccacccccagaagcatccacgagggcatcgccaccgccatcatgaacagcgactgcctggtgttcgacaccagcatcgcccagctgttcgccgagaacggcaacctgggcatcaacgtgaccatcagcatgtgctag

SEQ ID NO: 12852 - DNA, 849 bp, synthetic construct
  misc_feature 1..849: note = Description of Artificial Sequence: Synthetic coding sequence
  source 1..849: mol_type = other DNA
atgagcagacagaccgccaccgccctgcccaccggcaccagcaagtgcccccccagccagagagtgcccgccctgaccggcaccaccgccagcaacaacgacctggccagcctgttcgagtgccccgtgtgcttcgactacgtgctgccccccatcctgcagtgccagagcggccacctggtgtgcagcaactgcagacccaagctgacctgctgccccacctgcagaggccccctgggcagcatcagaaacctggccatggagaaggtggccaacagcgtgctgttcccctgcaagtacgccagcagcggctgcgagatcaccctgccccacaccgagaaggccgaccacgaggagctgtgcgagttcagaccctacagctgcccctgccccggcgccagctgcaagtggcagggcagcctggacgccgtgatgccccacctgatgcaccagcacaagagcatcaccaccctgcagggcgaggacatcgtgttcctggccaccgacatcaacctgcccggcgccgtggactgggtgatgatgcagagctgcttcggcttccacttcatgctggtgctggagaagcaggagaagtacgacggccaccagcagttcttcgccatcgtgcagctgatcggcaccagaaagcaggccgagaacttcgcctacagactggagctgaacggccacagaagaagactgacctgggaggccacccccagaagcatccacgagggcatcgccaccgccatcatgaacagcgactgcctggtgttcgacaccagcatcgcccagctgttcgccgagaacggcaacctgggcatcaacgtgaccatcagcatgtgctag

SEQ ID NO: 12853 - DNA, 708 bp, synthetic construct
  misc_feature 1..708: note = Description of Artificial Sequence: Synthetic coding sequence
  source 1..708: mol_type = other DNA
atgaccttcgacctgaccaagatcaccaagaccagcagcagcttcgaggtgagaacctgggaccccgagggcgtgatcttctacggcgacaccaaccccaaggacgactggttcatgctgggcctgagagacggcagacccgagatccagctgcacaaccactgggcccagctgaccgtgggcgccggccccagactggacgacggcagatggcaccaggtggaggtgaagatggagggcgacagcgtgctgctggaggtggacggcgaggaggtgctgagactgagacaggtgagcggccccctgaccagcaagagacaccccatcatgagaatcgccctgggcggcctgctgttccccgccagcaacctgagactgcccctggtgcccgccctggacggctgcctgagaagagacagctggctggacaagcaggccgagatcagcgccagcgcccccaccagcctgagaagctgcgacgtggagagcaaccccggcatcttcctgccccccggcacccaggccgagttcaacctgagagacatcccccagccccacgccgagccctgggccttcagcctggacctgggcctgaagcaggccgccggcagcggccacctgctggccctgggcacccccgagaaccccagctggctgagcctgcacctgcaggaccaggagaagaccctgccccccctgttcgcctag

SEQ ID NO: 12854 - DNA, 1209 bp, synthetic construct
  misc_feature 1..1209: note = Description of Artificial Sequence: Synthetic coding sequence
  source 1..1209: mol_type = other DNA
atggagagcagaggccccctggccaccagcagactgctgctgctgctgctgctgctgctgctgagacacaccagacagggctgggccctgagacccgtgctgcccacccagagcgcccacgacccccccgccgtgcacctgagcaacggccccggccaggagcccatcgccgtgatgaccttcgacctgaccaagatcaccaagaccagcagcagcttcgaggtgagaacctgggaccccgagggcgtgatcttctacggcgacaccaaccccaaggacgactggttcatgctgggcctgagagacggcagacccgagatccagctgcacaaccactgggcccagctgaccgtgggcgccggccccagactggacgacggcagatggcaccaggtggaggtgaagatggagggcgacagcgtgctgctggaggtggacggcgaggaggtgctgagactgagacaggtgagcggccccctgaccagcaagagacaccccatcatgagaatcgccctgggcggcctgctgttccccgccagcaacctgagactgcccctggtgcccgccctggacggctgcctgagaagagacagctggctggacaagcaggccgagatcagcgccagcgcccccaccagcctgagaagctgcgacgtggagagcaaccccggcatcttcctgccccccggcacccaggccgagttcaacctgagagacatcccccagccccacgccgagccctgggccttcagcctggacctgggcctgaagcaggccgccggcagcggccacctgctggccctgggcacccccgagaaccccagctggctgagcctgcacctgcaggaccagaaggtggtgctgagcagcggcagcggccccggcctggacctgcccctggtgctgggcctgcccctgcagctgaagctgagcatgagcagagtggtgctgagccagggcagcaagatgaaggccctggccctgccccccctgggcctggcccccctgctgaacctgtgggccaagccccagggcagactgttcctgggcgccctgcccggcgaggacagcagcaccagcttctgcctgaacggcctgtgggcccagggccagagactggacgtggaccaggccctgaacagaagccacgagatctggacccacagctgcccccagagccccggcaacggcaccgacgccagccactag

SEQ ID NO: 12855 - DNA, 882 bp, synthetic construct
  misc_feature 1..882: note = Description of Artificial Sequence: Synthetic coding sequence
  source 1..882: mol_type = other DNA
atggagagcagaggccccctggccaccagcagactgctgctgctgctgctgctgctgctgctgagacacaccagacagggctgggccctgagacccgtgctgcccacccagagcgcccacgacccccccgccgtgcacctgagcaacggccccggccaggagcccatcgccgtgatgaccttcgacctgaccaagatcaccaagaccagcagcagcttcgaggtgagaacctgggaccccgagggcgtgatcttctacggcgacaccaaccccaaggacgactggttcatgctgggcctgagagacggcagacccgagatccagctgcacaaccactgggcccagctgaccgtgggcgccggccccagactggacgacggcagatggcaccaggtggaggtgaagatggagggcgacagcgtgctgctggaggtggacggcgaggaggtgctgagactgagacaggtgagcggccccctgaccagcaagagacaccccatcatgagaatcgccctgggcggcctgctgttccccgccagcaacctgagactgcccctggtgcccgccctggacggctgcctgagaagagacagctggctggacaagcaggccgagatcagcgccagcgcccccaccagcctgagaagctgcgacgtggagagcaaccccggcatcttcctgccccccggcacccaggccgagttcaacctgagagacatcccccagccccacgccgagccctgggccttcagcctggacctgggcctgaagcaggccgccggcagcggccacctgctggccctgggcacccccgagaaccccagctggctgagcctgcacctgcaggaccaggagaagaccctgccccccctgttcgcctag

SEQ ID NO: 12856 - DNA, 720 bp, synthetic construct
  misc_feature 1..720: note = Description of Artificial Sequence: Synthetic coding sequence
  source 1..720: mol_type = other DNA
atggagagcagaggccccctggccaccagcagactgctgctgctgctgctgctgctgctgctgagacacaccagacagggctgggccctgagacccgtgctgcccacccagagcgcccacgacccccccgccgtgcacctgagcaacggccccggccaggagcccatcgccgtgatgaccttcgacctgaccaagatcaccaagaccagcagcagcttcgaggtgagaacctgggaccccgagggcgtgatcttctacggcgacaccaaccccaaggacgactggttcatgctgggcctgagagacggcagacccgagatccagctgcacaaccactgggcccagctgaccgtgggcgccggccccagactggacgacggcagatggcaccagctggtgcccgccctggacggctgcctgagaagagacagctggctggacaagcaggccgagatcagcgccagcgcccccaccagcctgagaagctgcgacgtggagagcaaccccggcatcttcctgccccccggcacccaggccgagttcaacctgagagacatcccccagccccacgccgagccctgggccttcagcctggacctgggcctgaagcaggccgccggcagcggccacctgctggccctgggcacccccgagaaccccagctggctgagcctgcacctgcaggaccaggagaagaccctgccccccctgttcgcctag

SEQ ID NO: 12857 - DNA, 864 bp, synthetic construct
  misc_feature 1..864: note = Description of Artificial Sequence: Synthetic coding sequence
  source 1..864: mol_type = other DNA
atggagagcagaggccccctggccaccagcagactgctgctgctgctgctgctgctgctgctgagacacaccagacagggctgggccctgagacccgtgctgcccacccagagcgcccacgacccccccgccgtgcacctgagcaacggccccggccaggagcccatcgccgtgatgaccttcgacctgaccaagatcaccaagaccagcagcagcttcgaggtgagaacctgggaccccgagggcgtgatcttctacggcgacaccaaccccaaggacgactggttcatgctgggcctgagagacggcagacccgagatccagctgcacaaccactgggcccagctgaccgtgggcgccggccccagactggacgacggcagatggcaccaggtggaggtgaagatggagggcgacagcgtgctgctggaggtggacggcgaggaggtgctgagactgagacaggtgagcggccccctgaccagcaagagacaccccatcatgagaatcgccctgggcggcctgctgttccccgccagcaacctgagactgcccctggtgcccgccctggacggctgcctgagaagagacagctggctggacaagcaggccgagatcagcgccagcgcccccaccagcctgagaagctgcgacgtggagagcaaccccggcatcttcctgccccccggcacccaggccgagttcaacctgagaggcgaggacagcagcaccagcttctgcctgaacggcctgtgggcccagggccagagactggacgtggaccaggccctgaacagaagccacgagatctggacccacagctgcccccagagccccggcaacggcaccgacgccagccactag

SEQ ID NO: 12858 - DNA, 423 bp, synthetic construct
  misc_feature 1..423: note = Description of Artificial Sequence: Synthetic coding sequence
  source 1..423: mol_type = other DNA
atggagagcagaggccccctggccaccagcagactgctgctgctgctgctgctgctgctgctgagacacaccagacagggctgggccctgagacccgtgctgcccacccagagcgcccacgacccccccgccgtgcacctgagcaacggccccggccaggagcccatcgccgtgatgaccttcgacctgaccaagatcaccaagaccagcagcagcttcgaggtgagaacctgggaccccgagggcgtgatcttctacggcgacaccaaccccaaggacgactggttcatgctgggcctgagagacggcagacccgagatccagctgcacaaccactgggcccagctgaccgtgggcgccggccccagactggacgacggcagatggcaccaggagaagaccctgccccccctgttcgcctag

SEQ ID NO: 12859 - DNA, 1155 bp, synthetic construct
  misc_feature 1..1155: note = Description of Artificial Sequence: Synthetic coding sequence
  source 1..1155: mol_type = other DNA
atggagagcagaggccccctggccaccagcagactgctgctgctgctgctgctgctgctgctgagacacaccagacagggctgggccctgagacccgtgctgcccacccagagcgcccacgacccccccgccgtgcacctgagcaacggccccggccaggagcccatcgccgtgatgaccttcgacctgaccaagatcaccaagaccagcagcagcttcgaggtgagaacctgggaccccgagggcgtgatcttctacggcgacaccaaccccaaggacgactggttcatgctgggcctgagagacggcagacccgagatccagctgcacaaccactgggcccagctgaccgtgggcgccggccccagactggacgacggcagatggcaccaggtggaggtgaagatggagggcgacagcgtgctgctggaggtggacggcgaggaggtgctgagactgagacaggtgagcggccccctgaccagcaagagacaccccatcatgagaatcgccctgggcggcctgctgttccccgccagcaacctgagactgcccgccgagatcagcgccagcgcccccaccagcctgagaagctgcgacgtggagagcaaccccggcatcttcctgccccccggcacccaggccgagttcaacctgagagacatcccccagccccacgccgagccctgggccttcagcctggacctgggcctgaagcaggccgccggcagcggccacctgctggccctgggcacccccgagaaccccagctggctgagcctgcacctgcaggaccagaaggtggtgctgagcagcggcagcggccccggcctggacctgcccctggtgctgggcctgcccctgcagctgaagctgagcatgagcagagtggtgctgagccagggcagcaagatgaaggccctggccctgccccccctgggcctggcccccctgctgaacctgtgggccaagccccagggcagactgttcctgggcgccctgcccggcgaggacagcagcaccagcttctgcctgaacggcctgtgggcccagggccagagactggacgtggaccaggccctgaacagaagccacgagatctggacccacagctgcccccagagccccggcaacggcaccgacgccagccactag

SEQ ID NO: 12860 - DNA, 1116 bp, synthetic construct
  misc_feature 1..1116: note = Description of Artificial Sequence: Synthetic coding sequence
  source 1..1116: mol_type = other DNA
atgagccccagcaccttccagatcaccgacatgaccagaagaagctgccagaacctgggctacaccgccgccagcccccaggcccccgaggccgccagcaacaccggcaacgccgagagagccgaggaggtgcccggcgagggcagcctgttcctgcaggccgagaccagagcctggttccagaagacccaggcccactggctgctgcagcacggcgccgcccccgcctggttccacggcttcatcaccagaagagaggccgagagactgctggagcccaagccccagggctgctacctggtgagattcagcgagagcgccgtgaccttcgtgctgacctacagaagcagaacctgctgcagacacttcctgctggcccagctgagagacggcagacacgtggtgctgggcgaggacagcgcccacgccagactgcaggacctgctgctgcactacaccgcccaccccctgagcccctacggcgagaccctgaccgagcccctggccagacagacccccgagcccgccggcctgagcctgagaaccgaggagagcaacttcggcagcaagagccaggaccccaacccccagtacagccccatcatcaagcagggccaggcccccgtgcccatgcagaaggagggcgccggcgagaaggagcccagccagctgctgagacccaagccccccatccccgccaagccccagctgccccccgaggtgtacaccatccccgtgcccagacacagacccgcccccagacccaagcccagcaaccccatctacaacgagcccgacgagcccatcgccttctacgccatgggcagaggcagccccggcgaggcccccagcaacatctacgtggaggtggaggacgagggcctgcccgccaccctgggccaccccgtgctgagaaagagctggagcagacccgtgcccggcggccagaacaccggcggcagccagctgcacagcgagaacagcgtgatcggccagggcccccccctgccccaccagcccccccccgcctggagacacaccctgccccacaacctgagcagacaggtgctgcaggacagaggccaggcctggctgcccctgggccccccccagtag

SEQ ID NO: 12861 - DNA, 1170 bp, synthetic construct
  misc_feature 1..1170: note = Description of Artificial Sequence: Synthetic coding sequence
  source 1..1170: mol_type = other DNA
atggagttccccctggcccagatctgcccccagggcagccacgaggcccccatccccaccttcagcaccttccagatcaccgacatgaccagaagaagctgccagaacctgggctacaccgccgccagcccccaggcccccgaggccgccagcaacaccggcaacgccgagagagccgaggaggtgcccggcgagggcagcctgttcctgcaggccgagaccagagcctggttccagaagacccaggcccactggctgctgcagcacggcgccgcccccgcctggttccacggcttcatcaccagaagagaggccgagagactgctggagcccaagccccagggctgctacctggtgagattcagcgagagcgccgtgaccttcgtgctgacctacagaagcagaacctgctgcagacacttcctgctggcccagctgagagacggcagacacgtggtgctgggcgaggacagcgcccacgccagactgcaggacctgctgctgcactacaccgcccaccccctgagcccctacggcgagaccctgaccgagcccctggccagacagacccccgagcccgccggcctgagcctgagaaccgaggagagcaacttcggcagcaagagccaggaccccaacccccagtacagccccatcatcaagcagggccaggcccccgtgcccatgcagaaggagggcgccggcgagaaggagcccagccagctgctgagacccaagccccccatccccgccaagccccagctgccccccgaggtgtacaccatccccgtgcccagacacagacccgcccccagacccaagcccagcaaccccatctacaacgagcccgacgagcccatcgccttctacgccatgggcagaggcagccccggcgaggcccccagcaacatctacgtggaggtggaggacgagggcctgcccgccaccctgggccaccccgtgctgagaaagagctggagcagacccgtgcccggcggccagaacaccggcggcagccagctgcacagcgagaacagcgtgatcggccagggcccccccctgccccaccagcccccccccgcctggagacacaccctgccccacaacctgagcagacaggtgctgcaggacagaggccaggcctggctgcccctgggccccccccagtag

SEQ ID NO: 12862 - DNA, 1200 bp, synthetic construct
  misc_feature 1..1200: note = Description of Artificial Sequence: Synthetic coding sequence
  source 1..1200: mol_type = other DNA
atggagttccccctggcccagatctgcccccagggcagccacgaggcccccatccccaccttcagcaccttccagatcaccgacatgaccagaagaagctgccagaacctgggctacaccgccgccagcccccaggcccccgaggccgccagcaacaccggcaacgccgagagagccgaggaggtgcccggcgagggcagcctgttcctgcaggccgagaccagagcctggttccagaagacccaggcccactggctgctgcagcacggcgccgcccccgcctggttccacggcttcatcaccagaagagtgagaccccccctgagcgtgacccacagagaggccgagagactgctggagcccaagccccagggctgctacctggtgagattcagcgagagcgccgtgaccttcgtgctgacctacagaagcagaacctgctgcagacacttcctgctggcccagctgagagacggcagacacgtggtgctgggcgaggacagcgcccacgccagactgcaggacctgctgctgcactacaccgcccaccccctgagcccctacggcgagaccctgaccgagcccctggccagacagacccccgagcccgccggcctgagcctgagaaccgaggagagcaacttcggcagcaagagccaggaccccaacccccagtacagccccatcatcaagcagggccaggcccccgtgcccatgcagaaggagggcgccggcgagaaggagcccagccagctgctgagacccaagccccccatccccgccaagccccagctgccccccgaggtgtacaccatccccgtgcccagacacagacccgcccccagacccaagcccagcaaccccatctacaacgagcccgacgagcccatcgccttctacgccatgggcagaggcagccccggcgaggcccccagcaacatctacgtggaggtggaggacgagggcctgcccgccaccctgggccaccccgtgctgagaaagagctggagcagacccgtgcccggcggccagaacaccggcggcagccagctgcacagcgagaacagcgtgatcggccagggcccccccctgccccaccagcccccccccgcctggagacacaccctgccccacaacctgagcagacaggtgctgcaggacagaggccaggcctggctgcccctgggccccccccagtag

SEQ ID NO: 12863 - DNA, 2823 bp, synthetic construct
  misc_feature 1..2823: note = Description of Artificial Sequence: Synthetic coding sequence
  source 1..2823: mol_type = other DNA
atgatcctggagcagtacgtggtggtgagcaactacaagaagcaggagaacagcgagctgagcctgcaggccggcgaggtggtggacgtgatcgagaagaacgagagcggctggtggttcgtgagcaccagcgaggagcagggctgggtgcccgccacctacctggaggcccagaacggcaccagagacgacagcgacatcaacaccagcaagaccggcgaggaggagaagtacgtgaccgtgcagccctacaccagccagagcaaggacgagatcggcttcgagaagggcgtgaccgtggaggtgatcagaaagaacctggagggctggtggtacatcagatacctgggcaaggagggctgggcccccgccagctacctgaagaaggccaaggacgacctgcccaccagaaagaagaacctggccggccccgtggagatcatcggcaacatcatggagatcagcaacctgctgaacaagaaggccagcggcgacaaggagaccccccccgccgagggcgagggccacgaggcccccatcgccaagaaggagatcagcctgcccatcctgtgcaacgccagcaacggcagcgccgtgggcgtgcccgacagaaccgtgagcagactggcccagggcagccccgccgtggccagaatcgccccccagagagcccagatcagcagccccaacctgagaaccagacccccccccagaagagagagcagcctgggcttccagctgcccaagccccccgagccccccagcgtggaggtggagtactacaccatcgccgagttccagagctgcatcagcgacggcatcagcttcagaggcggccagaaggccgaggtgatcgacaagaacagcggcggctggtggtacgtgcagatcggcgagaaggagggctgggcccccgccagctacatcgacaagagaaagaagcccaacctgagcagaagaaccagcaccctgaccagacccaaggtgcccccccccgccccccccagcaagcccaaggaggccgaggagggccccaccggcgccagcgagagccaggacagccccagaaagctgaagtacgaggagcccgagtacgacatccccgccttcggcttcgacagcgagcccgagctgagcgaggagcccgtggaggacagagccagcggcgagagaagacccgcccagccccacagacccagccccgccagcagcctgcagagagccagattcaaggtgggcgagagcagcgaggacgtggccctggaggaggagaccatctacgagaacgagggcttcagaccctacgccgaggacaccctgagcgccagaggcagcagcggcgacagcgacagccccggcagcagcagcctgagcctgaccagaaagaacagccccaagagcggcagccccaagagcagcagcctgctgaagctgaaggccgagaagaacgcccaggccgagatgggcaagaaccacagcagcgccagcttcagcagcagcatcaccatcaacaccacctgctgcagcagcagcagcagcagcagcagcagcctgagcaagaccagcggcgacctgaagcccagaagcgccagcgacgccggcatcagaggcacccccaaggtgagagccaagaaggacgccgacgccaacgccggcctgaccagctgccccagagccaagcccagcgtgagacccaagcccttcctgaacagagccgagagccagagccaggagaagatggacatcagcaccctgagaagacagctgagacccaccggccagctgagaggcggcctgaagggcagcaagagcgaggacagcgagctgcccccccagaccgccagcgaggcccccagcgagggcagcagaagaagcagcagcgacctgatcaccctgcccgccaccacccccccctgccccaccaagaaggagtgggagggccccgccaccagctacatgacctgcagcgcctaccagaaggtgcaggacagcgagatcagcttccccgccggcgtggaggtgcaggtgctggagaagcaggagagcggctggtggtacgtgagattcggcgagctggagggctgggcccccagccactacctggtgctggacgagaacgagcagcccgaccccagcggcaaggagctggacaccgtgcccgccaagggcagacagaacgagggcaagagcgacagcctggagaagatcgagagaagagtgcaggccctgaacaccgtgaaccagagcaagaaggccaccccccccatccccagcaagccccccggcggcttcggcaagaccagcggcacccccgccgtgaagatgagaaacggcgtgagacaggtggccgtgagaccccagagcgtgttcgtgagccccccccccaaggacaacaacctgagctgcgccctgagaagaaacgagagcctgaccgccaccgacggcctgagaggcgtgagaagaaacagcagcttcagcaccgccagaagcgccgccgccgaggccaagggcagactggccgagagagccgccagccagggcagcgacagccccctgctgcccgcccagagaaacagcatccccgtgagccccgtgagacccaagcccatcgagaagagccagttcatccacaacaacctgaaggacgtgtacgtgagcatcgccgactacgagggcgacgaggagaccgccggcttccaggagggcgtgagcatggaggtgctggagagaaaccccaacggctggtggtactgccagatcctggacggcgtgaagcccttcaagggctgggtgcccagcaactacctggagaagaagaactag

SEQ ID NO: 12864 - DNA, 3318 bp, synthetic construct
  misc_feature 1..3318: note = Description of Artificial Sequence: Synthetic coding sequence
  source 1..3318: mol_type = other DNA
atgctggcctactgcgtgcaggacgccaccgtggtggacgtggagaagagaagaaaccccagcaagcactacgtgtacatcatcaacgtgacctggagcgacagcaccagccagaccatctacagaagatacagcaagttcttcgacctgcagatgcagctgctggacaagttccccatcgagggcggccagaaggaccccaagcagagaatcatccccttcctgcccggcaagatcctgttcagaagaagccacatcagagacgtggccgtgaagagactgaagcccatcgacgagtactgcagagccctggtgagactgcccccccacatcagccagtgcgacgaggtgttcagattcttcgaggccagacccgaggacgtgaacccccccaaggaggactacggcagcagcaagagaaagagcgtgtggctgagcagctgggccgagagccccaagaaggacgtgaccggcgccgacgccaccgccgagcccatgatcctggagcagtacgtggtggtgagcaactacaagaagcaggagaacagcgagctgagcctgcaggccggcgaggtggtggacgtgatcgagaagaacgagagcggctggtggttcgtgagcaccagcgaggagcagggctgggtgcccgccacctacctggaggcccagaacggcaccagagacgacagcgacatcaacaccagcaagaccggcgaggaggagaagtacgtgaccgtgcagccctacaccagccagagcaaggacgagatcggcttcgagaagggcgtgaccgtggaggtgatcagaaagaacctggagggctggtggtacatcagatacctgggcaaggagggctgggcccccgccagctacctgaagaaggccaaggacgacctgcccaccagaaagaagaacctggccggccccgtggagatcatcggcaacatcatggagatcagcaacctgctgaacaagaaggccagcggcgacaaggagaccccccccgccgagggcgagggccacgaggcccccatcgccaagaaggagatcagcctgcccatcctgtgcaacgccagcaacggcagcgccgtgggcgtgcccgacagaaccgtgagcagactggcccagggcagccccgccgtggccagaatcgccccccagagagcccagatcagcagccccaacctgagaaccagacccccccccagaagagagagcagcctgggcttccagctgcccaagccccccgagccccccagcgtggaggtggagtactacaccatcgccgagttccagagctgcatcagcgacggcatcagcttcagaggcggccagaaggccgaggtgatcgacaagaacagcggcggctggtggtacgtgcagatcggcgagaaggagggctgggcccccgccagctacatcgacaagagaaagaagcccaacctgagcagaagaaccagcaccctgaccagacccaaggtgcccccccccgccccccccagcaagcccaaggaggccgaggagggccccaccggcgccagcgagagccaggacagccccagaaagctgaagtacgaggagcccgagtacgacatccccgccttcggcttcgacagcgagcccgagctgagcgaggagcccgtggaggacagagccagcggcgagagaagacccgcccagccccacagacccagccccgccagcagcctgcagagagccagattcaaggtgggcgagagcagcgaggacgtggccctggaggaggagaccatctacgagaacgagggcttcagaccctacgccgaggacaccctgagcgccagaggcagcagcggcgacagcgacagccccggcagcagcagcctgagcctgaccagaaagaacagccccaagagcggcagccccaagagcagcagcctgctgaagctgaaggccgagaagaacgcccaggccgagatgggcaagaaccacagcagcgccagcttcagcagcagcatcaccatcaacaccacctgctgcagcagcagcagcagcagcagcagcagcctgagcaagaccagcggcgacctgaagcccagaagcgccagcgacgccggcatcagaggcacccccaaggtgagagccaagaaggacgccgacgccaacgccggcctgaccagctgccccagagccaagcccagcgtgagacccaagcccttcctgaacagagccgagagccagagccaggagaagatggacatcagcaccctgagaagacagctgagacccaccggccagctgagaggcggcctgaagggcagcaagagcgaggacagcgagctgcccccccagaccgccagcgaggcccccagcgagggcagcagaagaagcagcagcgacctgatcaccctgcccgccaccacccccccctgccccaccaagaaggagtgggagggccccgccaccagctacatgacctgcagcgcctaccagaaggtgcaggacagcgagatcagcttccccgccggcgtggaggtgcaggtgctggagaagcaggagagcggctggtggtacgtgagattcggcgagctggagggctgggcccccagccactacctggtgctggacgagaacgagcagcccgaccccagcggcaaggagctggacaccgtgcccgccaagggcagacagaacgagggcaagagcgacagcctggagaagatcgagagaagagtgcaggccctgaacaccgtgaaccagagcaagaaggccaccccccccatccccagcaagccccccggcggcttcggcaagaccagcggcacccccgccgtgaagatgagaaacggcgtgagacaggtggccgtgagaccccagagcgtgttcgtgagccccccccccaaggacaacaacctgagctgcgccctgagaagaaacgagagcctgaccgccaccgacggcctgagaggcgtgagaagaaacagcagcttcagcaccgccagaagcgccgccgccgaggccaagggcagactggccgagagagccgccagccagggcagcgacagccccctgctgcccgcccagagaaacagcatccccgtgagccccgtgagacccaagcccatcgagaagagccagttcatccacaacaacctgaaggacgtgtacgtgagcatcgccgactacgagggcgacgaggagaccgccggcttccaggagggcgtgagcatggaggtgctggagagaaaccccaacggctggtggtactgccagatcctggacggcgtgaagcccttcaagggctgggtgcccagcaactacctggagaagaagaactag

SEQ ID NO: 12865 - DNA, 3402 bp, synthetic construct
  misc_feature 1..3402: note = Description of Artificial Sequence: Synthetic coding sequence
  source 1..3402: mol_type = other DNA
atgctggcctactgcgtgcaggacgccaccgtggtggacgtggagaagagaagaaaccccagcaagcactacgtgtacatcatcaacgtgacctggagcgacagcaccagccagaccatctacagaagatacagcaagttcttcgacctgcagatgcagctgctggacaagttccccatcgagggcggccagaaggaccccaagcagagaatcatccccttcctgcccggcaagatcctgttcagaagaagccacatcagagacgtggccgtgaagagactgaagcccatcgacgagtactgcagagccctggtgagactgcccccccacatcagccagtgcgacgaggtgttcagattcttcgaggccagacccgaggacgtgaacccccccaaggaggactacggcagcagcaagagaaagagcgtgtggctgagcagctgggccgagagccccaagaaggacgtgaccggcgccgacgccaccgccgagcccatgatcctggagcagtacgtggtggtgagcaactacaagaagcaggagaacagcgagctgagcctgcaggccggcgaggtggtggacgtgatcgagaagaacgagagcggctggtggttcgtgagcaccagcgaggagcagggctgggtgcccgccacctacctggaggcccagaacggcaccagagacgacagcgacatcaacaccagcaagaccggcgaggtgagcaagagaagaaaggcccacctgagaagactggacagaagatggaccctgggcggcatggtgaacagacagcacagcagagaggagaagtacgtgaccgtgcagccctacaccagccagagcaaggacgagatcggcttcgagaagggcgtgaccgtggaggtgatcagaaagaacctggagggctggtggtacatcagatacctgggcaaggagggctgggcccccgccagctacctgaagaaggccaaggacgacctgcccaccagaaagaagaacctggccggccccgtggagatcatcggcaacatcatggagatcagcaacctgctgaacaagaaggccagcggcgacaaggagaccccccccgccgagggcgagggccacgaggcccccatcgccaagaaggagatcagcctgcccatcctgtgcaacgccagcaacggcagcgccgtgggcgtgcccgacagaaccgtgagcagactggcccagggcagccccgccgtggccagaatcgccccccagagagcccagatcagcagccccaacctgagaaccagacccccccccagaagagagagcagcctgggcttccagctgcccaagccccccgagccccccagcgtggaggtggagtactacaccatcgccgagttccagagctgcatcagcgacggcatcagcttcagaggcggccagaaggccgaggtgatcgacaagaacagcggcggctggtggtacgtgcagatcggcgagaaggagggctgggcccccgccagctacatcgacaagagaaagaagcccaacctgagcagaagaaccagcaccctgaccagacccaaggtgcccccccccgccccccccagcaagcccaaggaggccgaggagggccccaccggcgccagcgagagccaggacagccccagaaagctgaagtacgaggagcccgagtacgacatccccgccttcggcttcgacagcgagcccgagctgagcgaggagcccgtggaggacagagccagcggcgagagaagacccgcccagccccacagacccagccccgccagcagcctgcagagagccagattcaaggtgggcgagagcagcgaggacgtggccctggaggaggagaccatctacgagaacgagggcttcagaccctacgccgaggacaccctgagcgccagaggcagcagcggcgacagcgacagccccggcagcagcagcctgagcctgaccagaaagaacagccccaagagcggcagccccaagagcagcagcctgctgaagctgaaggccgagaagaacgcccaggccgagatgggcaagaaccacagcagcgccagcttcagcagcagcatcaccatcaacaccacctgctgcagcagcagcagcagcagcagcagcagcctgagcaagaccagcggcgacctgaagcccagaagcgccagcgacgccggcatcagaggcacccccaaggtgagagccaagaaggacgccgacgccaacgccggcctgaccagctgccccagagccaagcccagcgtgagacccaagcccttcctgaacagagccgagagccagagccaggagaagatggacatcagcaccctgagaagacagctgagacccaccggccagctgagaggcggcctgaagggcagcaagagcgaggacagcgagctgcccccccagaccgccagcgaggcccccagcgagggcagcagaagaagcagcagcgacctgatcaccctgcccgccaccacccccccctgccccaccaagaaggagtgggagggccccgccaccagctacatgacctgcagcgcctaccagaaggtgcaggacagcgagatcagcttccccgccggcgtggaggtgcaggtgctggagaagcaggagagcggctggtggtacgtgagattcggcgagctggagggctgggcccccagccactacctggtgctggacgagaacgagcagcccgaccccagcggcaaggagctggacaccgtgcccgccaagggcagacagaacgagggcaagagcgacagcctggagaagatcgagagaagagtgcaggccctgaacaccgtgaaccagagcaagaaggccaccccccccatccccagcaagccccccggcggcttcggcaagaccagcggcacccccgccgtgaagatgagaaacggcgtgagacaggtggccgtgagaccccagagcgtgttcgtgagccccccccccaaggacaacaacctgagctgcgccctgagaagaaacgagagcctgaccgccaccgacggcctgagaggcgtgagaagaaacagcagcttcagcaccgccagaagcgccgccgccgaggccaagggcagactggccgagagagccgccagccagggcagcgacagccccctgctgcccgcccagagaaacagcatccccgtgagccccgtgagacccaagcccatcgagaagagccagttcatccacaacaacctgaaggacgtgtacgtgagcatcgccgactacgagggcgacgaggagaccgccggcttccaggagggcgtgagcatggaggtgctggagagaaaccccaacggctggtggtactgccagatcctggacggcgtgaagcccttcaagggctgggtgcccagcaactacctggagaagaagaactag

SEQ ID NO: 12866 - DNA, 3183 bp, synthetic construct
  misc_feature 1..3183: note = Description of Artificial Sequence: Synthetic coding sequence
  source 1..3183: mol_type = other DNA
tgattcttcgacctgcagatgcagctgctggacaagttccccatcgagggcggccagaaggaccccaagcagagaatcatccccttcctgcccggcaagatcctgttcagaagaagccacatcagagacgtggccgtgaagagactgaagcccatcgacgagtactgcagagccctggtgagactgcccccccacatcagccagtgcgacgaggtgttcagattcttcgaggccagacccgaggacgtgaacccccccaaggaggactacggcagcagcaagagaaagagcgtgtggctgagcagctgggccgagagccccaagaaggacgtgaccggcgccgacgccaccgccgagcccatgatcctggagcagtacgtggtggtgagcaactacaagaagcaggagaacagcgagctgagcctgcaggccggcgaggtggtggacgtgatcgagaagaacgagagcggctggtggttcgtgagcaccagcgaggagcagggctgggtgcccgccacctacctggaggcccagaacggcaccagagacgacagcgacatcaacaccagcaagaccggcgaggaggagaagtacgtgaccgtgcagccctacaccagccagagcaaggacgagatcggcttcgagaagggcgtgaccgtggaggtgatcagaaagaacctggagggctggtggtacatcagatacctgggcaaggagggctgggcccccgccagctacctgaagaaggccaaggacgacctgcccaccagaaagaagaacctggccggccccgtggagatcatcggcaacatcatggagatcagcaacctgctgaacaagaaggccagcggcgacaaggagaccccccccgccgagggcgagggccacgaggcccccatcgccaagaaggagatcagcctgcccatcctgtgcaacgccagcaacggcagcgccgtgggcgtgcccgacagaaccgtgagcagactggcccagggcagccccgccgtggccagaatcgccccccagagagcccagatcagcagccccaacctgagaaccagacccccccccagaagagagagcagcctgggcttccagctgcccaagccccccgagccccccagcgtggaggtggagtactacaccatcgccgagttccagagctgcatcagcgacggcatcagcttcagaggcggccagaaggccgaggtgatcgacaagaacagcggcggctggtggtacgtgcagatcggcgagaaggagggctgggcccccgccagctacatcgacaagagaaagaagcccaacctgagcagaagaaccagcaccctgaccagacccaaggtgcccccccccgccccccccagcaagcccaaggaggccgaggagggccccaccggcgccagcgagagccaggacagccccagaaagctgaagtacgaggagcccgagtacgacatccccgccttcggcttcgacagcgagcccgagctgagcgaggagcccgtggaggacagagccagcggcgagagaagacccgcccagccccacagacccagccccgccagcagcctgcagagagccagattcaaggtgggcgagagcagcgaggacgtggccctggaggaggagaccatctacgagaacgagggcttcagaccctacgccgaggacaccctgagcgccagaggcagcagcggcgacagcgacagccccggcagcagcagcctgagcctgaccagaaagaacagccccaagagcggcagccccaagagcagcagcctgctgaagctgaaggccgagaagaacgcccaggccgagatgggcaagaaccacagcagcgccagcttcagcagcagcatcaccatcaacaccacctgctgcagcagcagcagcagcagcagcagcagcctgagcaagaccagcggcgacctgaagcccagaagcgccagcgacgccggcatcagaggcacccccaaggtgagagccaagaaggacgccgacgccaacgccggcctgaccagctgccccagagccaagcccagcgtgagacccaagcccttcctgaacagagccgagagccagagccaggagaagatggacatcagcaccctgagaagacagctgagacccaccggccagctgagaggcggcctgaagggcagcaagagcgaggacagcgagctgcccccccagaccgccagcgaggcccccagcgagggcagcagaagaagcagcagcgacctgatcaccctgcccgccaccacccccccctgccccaccaagaaggagtgggagggccccgccaccagctacatgacctgcagcgcctaccagaaggtgcaggacagcgagatcagcttccccgccggcgtggaggtgcaggtgctggagaagcaggagagcggctggtggtacgtgagattcggcgagctggagggctgggcccccagccactacctggtgctggacgagaacgagcagcccgaccccagcggcaaggagctggacaccgtgcccgccaagggcagacagaacgagggcaagagcgacagcctggagaagatcgagagaagagtgcaggccctgaacaccgtgaaccagagcaagaaggccaccccccccatccccagcaagccccccggcggcttcggcaagaccagcggcacccccgccgtgaagatgagaaacggcgtgagacaggtggccgtgagaccccagagcgtgttcgtgagccccccccccaaggacaacaacctgagctgcgccctgagaagaaacgagagcctgaccgccaccgacggcctgagaggcgtgagaagaaacagcagcttcagcaccgccagaagcgccgccgccgaggccaagggcagactggccgagagagccgccagccagggcagcgacagccccctgctgcccgcccagagaaacagcatccccgtgagccccgtgagacccaagcccatcgagaagagccagttcatccacaacaacctgaaggacgtgtacgtgagcatcgccgactacgagggcgacgaggagaccgccggcttccaggagggcgtgagcatggaggtgctggagagaaaccccaacggctggtggtactgccagatcctggacggcgtgaagcccttcaagggctgggtgcccagcaactacctggagaagaagaactag

SEQ ID NO: 12867 - DNA, 1110 bp, synthetic construct
  misc_feature 1..1110: note = Description of Artificial Sequence: Synthetic coding sequence
  source 1..1110: mol_type = other DNA
atgagcatctgctgctgcttcttcttcagagactacggcagcagcaagagaaagagcggcgccgacgccaccgccgagcccatgatcctggagcagtacgtggtggtgagcaactacaagaagcaggagaacagcgagctgagcctgcaggccggcgaggtggtggacgtgatcgagaagaacgagagcggctggtggttcgtgagcaccagcgaggagcagggctgggtgcccgccacctacctggaggcccagaacggcaccagagacgacagcgacatcaacaccagcaagaccggcgaggtgagcaagagaagaaaggcccacctgagaagactggacagaagatggaccctgggcggcatggtgaacagacagcacagcagagaggagaagtacgtgaccgtgcagccctacaccagccagagcaaggacgagatcggcttcgagaagggcgtgaccgtggaggtgatcagaaagaacctggagggctggtggtacatcagatacctgggcaaggagggctgggcccccgccagctacctgaagaaggccaaggacgacctgcccaccagaaagaagaacctggccggccccgtggagatcatcggcaacatcatggagatcagcaacctgctgaacaagaaggccagcggcgacaaggagaccccccccgccgagggcgagggccacgaggcccccatcgccaagaaggagatcagcctgcccatcctgtgcaacgccagcaacggcagcgccgtgggcgtgcccgacagaaccgtgagcagactggcccagggcagccccgccgtggccagaatcgccccccagagagcccagatcagcagccccaacctgagaaccagacccccccccagaagagagagcagcctgaccgagagcagatgcagacaggccggcgtgcagtggcacgacctgggcagcctgcagagcccccaccccagattcaagagattcagctgcctgagcctgctgagcagctgggaccacagacacatgcccccccaccccgccaacttcctgatcttcctgatcgagaccggcttccaccacgtgggccaggacggcctgcacctgctgaccagctag

SEQ ID NO: 12868 - DNA, 2898 bp, synthetic construct
  misc_feature 1..2898: note = Description of Artificial Sequence: Synthetic coding sequence
  source 1..2898: mol_type = other DNA
atgcccgtgaccgccaccggcaagatcctgttcagaagaagccacatcagagacgtggccgtgaagagactgaagcccatcgacgagtactgcagagccctggtgagactgcccccccacatcagccagtgcgacgaggtgttcagattcttcgaggccagacccgaggacgtgaacccccccaaggaggactacggcagcagcaagagaaagagcggcgccgacgccaccgccgagcccatgatcctggagcagtacgtggtggtgagcaactacaagaagcaggagaacagcgagctgagcctgcaggccggcgaggtggtggacgtgatcgagaagaacgagagcggctggtggttcgtgagcaccagcgaggagcagggctgggtgcccgccacctacctggaggcccagaacggcaccagagacgacagcgacatcaacaccagcaagaccggcgaggtgagcaagagaagaaaggcccacctgagaagactggacagaagatggaccctgggcggcatggtgaacagacagcacagcagagaggagaagtacgtgaccgtgcagccctacaccagccagagcaaggacgagatcggcttcgagaagggcgtgaccgtggaggtgatcagaaagaacctggagggctggtggtacatcagatacctgggcaaggagggctgggcccccgccagctacctgaagaaggccaaggacgacctgcccaccagaaagaagaacctggccggccccgtggagatcatcggcaacatcatggagatcagcaacctgctgaacaagaaggccagcggcgacaaggagaccccccccgccgagggcgagggccacgaggcccccatcgccaagaaggagatcagcctgcccatcctgtgcaacgccagcaacggcagcgccgtgggcgtgcccgacagaaccgtgagcagactggcccagggcagccccgccgtggccagaatcgccccccagagagcccagatcagcagccccaacctgagaaccagacccccccccagaagagagagcagcctgggcttccagctgcccaagccccccgagccccccagcgtggaggtggagtactacaccatcgccgagttccagagctgcatcagcgacggcatcagcttcagaggcggccagaaggccgaggtgatcgacaagaacagcggcggctggtggtacgtgcagatcggcgagaaggagggctgggcccccgccagctacatcgacaagagaaagaagcccaacctgagcagaagaaccagcaccctgaccagacccaaggtgcccccccccgccccccccagcaagcccaaggaggccgaggagggccccaccggcgccagcgagagccaggacagccccagaaagctgaagtacgaggagcccgagtacgacatccccgccttcggcttcgacagcgagcccgagctgagcgaggagcccgtggaggacagagccagcggcgagagaagacccgcccagccccacagacccagccccgccagcagcctgcagagagccagattcaaggtgggcgagagcagcgaggacgtggccctggaggaggagaccatctacgagaacgagggcttcagaccctacgccgaggacaccctgagcgccagaggcagcagcggcgacagcgacagccccggcagcagcagcctgagcctgaccagaaagaacagccccaagagcggcagccccaagagcagcagcctgctgaagctgaaggccgagaagaacgcccaggccgagatgggcaagaaccacagcagcgccagcttcagcagcagcatcaccatcaacaccacctgctgcagcagcagcagcagcagcagcagcagcctgagcaagaccagcggcgacctgaagcccagaagcgccagcgacgccggcatcagaggcacccccaaggtgagagccaagaaggacgccgacgccaacgccggcctgaccagctgccccagagccaagcccagcgtgagacccaagcccttcctgaacagagccgagagccagagccaggagaagatggacatcagcaccctgagaagacagctgagacccaccggccagctgagaggcggcctgaagggcagcaagagcgaggacagcgagctgcccccccagaccgccagcgaggcccccagcgagggcagcagaagaagcagcagcgacctgatcaccctgcccgccaccacccccccctgccccaccaagaaggagtgggagggccccgccaccagctacatgacctgcagcgcctaccagaaggtgcaggacagcgagatcagcttccccgccggcgtggaggtgcaggtgctggagaagcaggagagcggctggtggtacgtgagattcggcgagctggagggctgggcccccagccactacctggtgctggacgagaacgagcagcccgaccccagcggcaaggagctggacaccgtgcccgccaagggcagacagaacgagggcaagagcgacagcctggagaagatcgagagaagagtgcaggccctgaacaccgtgaaccagagcaagaaggccaccccccccatccccagcaagccccccggcggcttcggcaagaccagcggcacccccgccgtgaagatgagaaacggcgtgagacaggtggccgtgagacccatcgagaagagccagttcatccacaacaacctgaaggacgtgtacgtgagcatcgccgactacgagggcgacgaggagaccgccggcttccaggagggcgtgagcatggaggtgctggagagaaaccccaacggctggtggtactgccagatcctggacggcgtgaagcccttcaagggctgggtgcccagcaactacctggagaagaagaactag

SEQ ID NO: 12869 - DNA, 2907 bp, synthetic construct
  misc_feature 1..2907: note = Description of Artificial Sequence: Synthetic coding sequence
  source 1..2907: mol_type = other DNA
atgatcctggagcagtacgtggtggtgagcaactacaagaagcaggagaacagcgagctgagcctgcaggccggcgaggtggtggacgtgatcgagaagaacgagagcggctggtggttcgtgagcaccagcgaggagcagggctgggtgcccgccacctacctggaggcccagaacggcaccagagacgacagcgacatcaacaccagcaagaccggcgaggtgagcaagagaagaaaggcccacctgagaagactggacagaagatggaccctgggcggcatggtgaacagacagcacagcagagaggagaagtacgtgaccgtgcagccctacaccagccagagcaaggacgagatcggcttcgagaagggcgtgaccgtggaggtgatcagaaagaacctggagggctggtggtacatcagatacctgggcaaggagggctgggcccccgccagctacctgaagaaggccaaggacgacctgcccaccagaaagaagaacctggccggccccgtggagatcatcggcaacatcatggagatcagcaacctgctgaacaagaaggccagcggcgacaaggagaccccccccgccgagggcgagggccacgaggcccccatcgccaagaaggagatcagcctgcccatcctgtgcaacgccagcaacggcagcgccgtgggcgtgcccgacagaaccgtgagcagactggcccagggcagccccgccgtggccagaatcgccccccagagagcccagatcagcagccccaacctgagaaccagacccccccccagaagagagagcagcctgggcttccagctgcccaagccccccgagccccccagcgtggaggtggagtactacaccatcgccgagttccagagctgcatcagcgacggcatcagcttcagaggcggccagaaggccgaggtgatcgacaagaacagcggcggctggtggtacgtgcagatcggcgagaaggagggctgggcccccgccagctacatcgacaagagaaagaagcccaacctgagcagaagaaccagcaccctgaccagacccaaggtgcccccccccgccccccccagcaagcccaaggaggccgaggagggccccaccggcgccagcgagagccaggacagccccagaaagctgaagtacgaggagcccgagtacgacatccccgccttcggcttcgacagcgagcccgagctgagcgaggagcccgtggaggacagagccagcggcgagagaagacccgcccagccccacagacccagccccgccagcagcctgcagagagccagattcaaggtgggcgagagcagcgaggacgtggccctggaggaggagaccatctacgagaacgagggcttcagaccctacgccgaggacaccctgagcgccagaggcagcagcggcgacagcgacagccccggcagcagcagcctgagcctgaccagaaagaacagccccaagagcggcagccccaagagcagcagcctgctgaagctgaaggccgagaagaacgcccaggccgagatgggcaagaaccacagcagcgccagcttcagcagcagcatcaccatcaacaccacctgctgcagcagcagcagcagcagcagcagcagcctgagcaagaccagcggcgacctgaagcccagaagcgccagcgacgccggcatcagaggcacccccaaggtgagagccaagaaggacgccgacgccaacgccggcctgaccagctgccccagagccaagcccagcgtgagacccaagcccttcctgaacagagccgagagccagagccaggagaagatggacatcagcaccctgagaagacagctgagacccaccggccagctgagaggcggcctgaagggcagcaagagcgaggacagcgagctgcccccccagaccgccagcgaggcccccagcgagggcagcagaagaagcagcagcgacctgatcaccctgcccgccaccacccccccctgccccaccaagaaggagtgggagggccccgccaccagctacatgacctgcagcgcctaccagaaggtgcaggacagcgagatcagcttccccgccggcgtggaggtgcaggtgctggagaagcaggagagcggctggtggtacgtgagattcggcgagctggagggctgggcccccagccactacctggtgctggacgagaacgagcagcccgaccccagcggcaaggagctggacaccgtgcccgccaagggcagacagaacgagggcaagagcgacagcctggagaagatcgagagaagagtgcaggccctgaacaccgtgaaccagagcaagaaggccaccccccccatccccagcaagccccccggcggcttcggcaagaccagcggcacccccgccgtgaagatgagaaacggcgtgagacaggtggccgtgagaccccagagcgtgttcgtgagccccccccccaaggacaacaacctgagctgcgccctgagaagaaacgagagcctgaccgccaccgacggcctgagaggcgtgagaagaaacagcagcttcagcaccgccagaagcgccgccgccgaggccaagggcagactggccgagagagccgccagccagggcagcgacagccccctgctgcccgcccagagaaacagcatccccgtgagccccgtgagacccaagcccatcgagaagagccagttcatccacaacaacctgaaggacgtgtacgtgagcatcgccgactacgagggcgacgaggagaccgccggcttccaggagggcgtgagcatggaggtgctggagagaaaccccaacggctggtggtactgccagatcctggacggcgtgaagcccttcaagggctgggtgcccagcaactacctggagaagaagaactag

SEQ ID NO: 12870 - DNA, 3003 bp, synthetic construct
  misc_feature 1..3003: note = Description of Artificial Sequence: Synthetic coding sequence
  source 1..3003: mol_type = other DNA
atgaacggcagcttcctgctgagactgctgttccccgtggccagcatcctgcccgagaccgtgctgctgagaggcgccgacgccaccgccgagcccatgatcctggagcagtacgtggtggtgagcaactacaagaagcaggagaacagcgagctgagcctgcaggccggcgaggtggtggacgtgatcgagaagaacgagagcggctggtggttcgtgagcaccagcgaggagcagggctgggtgcccgccacctacctggaggcccagaacggcaccagagacgacagcgacatcaacaccagcaagaccggcgaggtgagcaagagaagaaaggcccacctgagaagactggacagaagatggaccctgggcggcatggtgaacagacagcacagcagagaggagaagtacgtgaccgtgcagccctacaccagccagagcaaggacgagatcggcttcgagaagggcgtgaccgtggaggtgatcagaaagaacctggagggctggtggtacatcagatacctgggcaaggagggctgggcccccgccagctacctgaagaaggccaaggacgacctgcccaccagaaagaagaacctggccggccccgtggagatcatcggcaacatcatggagatcagcaacctgctgaacaagaaggccagcggcgacaaggagaccccccccgccgagggcgagggccacgaggcccccatcgccaagaaggagatcagcctgcccatcctgtgcaacgccagcaacggcagcgccgtgggcgtgcccgacagaaccgtgagcagactggcccagggcagccccgccgtggccagaatcgccccccagagagcccagatcagcagccccaacctgagaaccagacccccccccagaagagagagcagcctgggcttccagctgcccaagccccccgagccccccagcgtggaggtggagtactacaccatcgccgagttccagagctgcatcagcgacggcatcagcttcagaggcggccagaaggccgaggtgatcgacaagaacagcggcggctggtggtacgtgcagatcggcgagaaggagggctgggcccccgccagctacatcgacaagagaaagaagcccaacctgagcagaagaaccagcaccctgaccagacccaaggtgcccccccccgccccccccagcaagcccaaggaggccgaggagggccccaccggcgccagcgagagccaggacagccccagaaagctgaagtacgaggagcccgagtacgacatccccgccttcggcttcgacagcgagcccgagctgagcgaggagcccgtggaggacagagccagcggcgagagaagacccgcccagccccacagacccagccccgccagcagcctgcagagagccagattcaaggtgggcgagagcagcgaggacgtggccctggaggaggagaccatctacgagaacgagggcttcagaccctacgccgaggacaccctgagcgccagaggcagcagcggcgacagcgacagccccggcagcagcagcctgagcctgaccagaaagaacagccccaagagcggcagccccaagagcagcagcctgctgaagctgaaggccgagaagaacgcccaggccgagatgggcaagaaccacagcagcgccagcttcagcagcagcatcaccatcaacaccacctgctgcagcagcagcagcagcagcagcagcagcctgagcaagaccagcggcgacctgaagcccagaagcgccagcgacgccggcatcagaggcacccccaaggtgagagccaagaaggacgccgacgccaacgccggcctgaccagctgccccagagccaagcccagcgtgagacccaagcccttcctgaacagagccgagagccagagccaggagaagatggacatcagcaccctgagaagacagctgagacccaccggccagctgagaggcggcctgaagggcagcaagagcgaggacagcgagctgcccccccagaccgccagcgaggcccccagcgagggcagcagaagaagcagcagcgacctgatcaccctgcccgccaccacccccccctgccccaccaagaaggagtgggagggccccgccaccagctacatgacctgcagcgcctaccagaaggtgcaggacagcgagatcagcttccccgccggcgtggaggtgcaggtgctggagaagcaggagagcggctggtggtacgtgagattcggcgagctggagggctgggcccccagccactacctggtgctggacgagaacgagcagcccgaccccagcggcaaggagctggacaccgtgcccgccaagggcagacagaacgagggcaagagcgacagcctggagaagatcgagagaagagtgcaggccctgaacaccgtgaaccagagcaagaaggccaccccccccatccccagcaagccccccggcggcttcggcaagaccagcggcacccccgccgtgaagatgagaaacggcgtgagacaggtggccgtgagaccccagagcgtgttcgtgagccccccccccaaggacaacaacctgagctgcgccctgagaagaaacgagagcctgaccgccaccgacggcctgagaggcgtgagaagaaacagcagcttcagcaccgccagaagcgccgccgccgaggccaagggcagactggccgagagagccgccagccagggcagcgacagccccctgctgcccgcccagagaaacagcatccccgtgagccccgtgagacccaagcccatcgagaagagccagttcatccacaacaacctgaaggacgtgtacgtgagcatcgccgactacgagggcgacgaggagaccgccggcttccaggagggcgtgagcatggaggtgctggagagaaaccccaacggctggtggtactgccagatcctggacggcgtgaagcccttcaagggctgggtgcccagcaactacctggagaagaagaactag

SEQ ID NO: 12871 - DNA, 414 bp, synthetic construct
  misc_feature 1..414: note = Description of Artificial Sequence: Synthetic coding sequence
  source 1..414: mol_type = other DNA
atgaacaagctgagcggcggcggcggcagaagaaccagagtggagggcggccagctgggcggcgaggagtggaccagacacggcagcttcgtgaacaagcccaccagaggctggctgcaccccaacgacaaggtgatgggccccggcgtgagctacctggtgagatacatgggctgcgtggaggtgctgcagagcatgagagccctggacttcaacaccagaacccaggtgaccagagaggccatcagcctggtgtgcgaggccgtgcccggcgccaagggcgccaccagaagaagaaagccctgcagcagacccctgagcagcatcctgggcagaagcaacctgaagttcgccggcatgcccatcaccctgaccgtgagcaccagcagcctgaacctgatggccgccgactag

SEQ ID NO: 12872 - DNA, 918 bp, synthetic construct
  misc_feature 1..918: note = Description of Artificial Sequence: Synthetic coding sequence
  source 1..918: mol_type = other DNA
atggccggcttcgacggcagcgcctgggacgaggaggaggaggagccccccgaccaccagtactacaacgacttccccggcaaggagccccccctgggcggcgtggtggacatgagactgagagagggcgccgcccccggcgccgccagacccaccgcccccaacgcccagacccccagccacctgggcgccaccctgcccgtgggccagcccgtgggcggcgaccccgaggtgagaaagcagatgccccccccccccccctgccccggcagagagctgttcgacgaccccagctacgtgaacgtgcagaacctggacaaggccagacaggccgtgggcggcgccggcccccccaaccccgccatcaacggcagcgcccccagagacctgttcgacatgaagcccttcgaggacgccctgagagtgcccccccccccccagagcgtgagcatggccgagcagctgagaggcgagccctggttccacggcaagctgagcagaagagaggccgaggccctgctgcagctgaacggcgacttcctggtgagagagagcaccaccacccccggccagtacgtgctgaccggcctgcagagcggccagcccaagcacctgctgctggtggaccccgagggcgtgagatggggcttcgccatgctgcccaagctgttcctgaacagcagagcccaggtgatcagactgcccagaccccccagagtgctgggcctgcaggccagaaccaccatgcccagcctgcacatcttcttctgcaccgtgtacaccctgctgagacacgccaacttcctgcaggtgaagaagggcgtgtacagcagccagctgcacagcttcagagccgacgtggccttcgccttcagccacttcaccgacctgagcatccccaccaccgtgagcttctag

SEQ ID NO: 12873 - DNA, 1563 bp, synthetic construct
  misc_feature 1..1563: note = Description of Artificial Sequence: Synthetic coding sequence
  source 1..1563: mol_type = other DNA
atgagcaacctgagactggccaaccccgccggcggcagacccggcagcaagggcgagcccggcagagccgccgacgacggcgagggcatcgtgggcgccgccatgcccgacagcggccccctgcccctgctgcaggacatgaacaagctgagcggcggcggcggcagaagaaccagagtggagggcggccagctgggcggcgaggagtggaccagacacggcagcttcgtgaacaagcccaccagaggctggctgcaccccaacgacaaggtgatgggccccggcgtgagctacctggtgagatacatgggctgcgtggaggtgctgcagagcatgagagccctggacttcaacaccagaacccaggtgaccagagaggccatcagcctggtgtgcgaggccgtgcccggcgccaagggcgccaccagaagaagaaagccctgcagcagacccctgagcagcatcctgggcagaagcaacctgaagttcgccggcatgcccatcaccctgaccgtgagcaccagcagcctgaacctgatggccgccgactgcaagcagatcatcgccaaccaccacatgcagagcatcagcttcgccagcggcggcgaccccgacaccgccgagtacgtggcctacgtggccaaggaccccgtgaaccagagagcctgccacatcctggagtgccccgagggcctggcccaggacgtgatcagcaccatcggccaggccttcgagctgagattcaagcagtacctgagaaacccccccaagctggtgaccccccacgacagaatggccggcttcgacggcagcgcctgggacgaggaggaggaggagccccccgaccaccagtactacaacgacttccccggcaaggagccccccctgggcggcgtggtggacatgagactgagagagggcgccgcccccggcgccgccagacccaccgcccccaacgcccagacccccagccacctgggcgccaccctgcccgtgggccagcccgtgggcggcgaccccgaggtgagaaagcagatgccccccccccccccctgccccgccggcagagagctgttcgacgaccccagctacgtgaacgtgcagaacctggacaaggccagacaggccgtgggcggcgccggcccccccaaccccgccatcaacggcagcgcccccagagacctgttcgacatgaagcccttcgaggacgccctgagagtgcccccccccccccagagcgtgagcatggccgagcagctgagaggcgagccctggttccacggcaagctgagcagaagagaggccgaggccctgctgcagctgaacggcgacttcctggtgagagagagcaccaccacccccggccagtacgtgctgaccggcctgcagagcggccagcccaagcacctgctgctggtggaccccgagggcgtggtgagaaccaaggaccacagattcgagagcgtgagccacctgatcagctaccacatggacaaccacctgcccatcatcagcgccggcagcgagctgtgcctgcagcagcccgtggagagaaagctgtag

SEQ ID NO: 12874 - DNA, 1752 bp, synthetic construct
  misc_feature 1..1752: note = Description of Artificial Sequence: Synthetic coding sequence
  source 1..1752: mol_type = other DNA
atggacctgctgccccccaagcccaagtacaaccccctgagaaacgagagcctgagcagcctggaggagggcgccagcggcagcaccccccccgaggagctgcccagccccagcgccagcagcctgggccccatcctgccccccctgcccggcgacgacagccccaccaccctgtgcagcttcttccccagaatgagcaacctgagactggccaaccccgccggcggcagacccggcagcaagggcgagcccggcagagccgccgacgacggcgagggcatcgtgggcgccgccatgcccgacagcggccccctgcccctgctgcaggacatgaacaagctgagcggcggcggcggcagaagaaccagagtggagggcggccagctgggcggcgaggagtggaccagacacggcagcttcgtgaacaagcccaccagaggctggctgcaccccaacgacaaggtgatgggccccggcgtgagctacctggtgagatacatgggctgcgtggaggtgctgcagagcatgagagccctggacttcaacaccagaacccaggtgaccagagaggccatcagcctggtgtgcgaggccgtgcccggcgccaagggcgccaccagaagaagaaagccctgcagcagacccctgagcagcatcctgggcagaagcaacctgaagttcgccggcatgcccatcaccctgaccgtgagcaccagcagcctgaacctgatggccgccgactgcaagcagatcatcgccaaccaccacatgcagagcatcagcttcgccagcggcggcgaccccgacaccgccgagtacgtggcctacgtggccaaggaccccgtgaaccagagagcctgccacatcctggagtgccccgagggcctggcccaggacgtgatcagcaccatcggccaggccttcgagctgagattcaagcagtacctgagaaacccccccaagctggtgaccccccacgacagaatggccggcttcgacggcagcgcctgggacgaggaggaggaggagccccccgaccaccagtactacaacgacttccccggcaaggagccccccctgggcggcgtggtggacatgagactgagagagggcgccgcccccggcgccgccagacccaccgcccccaacgcccagacccccagccacctgggcgccaccctgcccgtgggccagcccgtgggcggcgaccccgaggtgagaaagcagatgccccccccccccccctgccccggcagagagctgttcgacgaccccagctacgtgaacgtgcagaacctggacaaggccagacaggccgtgggcggcgccggcccccccaaccccgccatcaacggcagcgcccccagagacctgttcgacatgaagcccttcgaggacgccctgagagtgcccccccccccccagagcgtgagcatggccgagcagctgagaggcgagccctggttccacggcaagctgagcagaagagaggccgaggccctgctgcagctgaacggcgacttcctggtgagagagagcaccaccacccccggccagtacgtgctgaccggcctgcagagcggccagcccaagcacctgctgctggtggaccccgagggcgtggtgagaaccaaggaccacagattcgagagcgtgagccacctgatcagctaccacatggacaaccacctgcccatcatcagcgccggcagcgagctgtgcctgcagcagcccgtggagagaaagctgtag

SEQ ID NO: 12875 - DNA, 1155 bp, synthetic construct
  misc_feature 1..1155: note = Description of Artificial Sequence: Synthetic coding sequence
  source 1..1155: mol_type = other DNA
atggacctgctgccccccaagcccaagtacaaccccctgagaaacgagagcctgagcatcctgggcagaagcaacctgaagttcgccggcatgcccatcaccctgaccgtgagcaccagcagcctgaacctgatggccgccgactgcaagcagatcatcgccaaccaccacatgcagagcatcagcttcgccagcggcggcgaccccgacaccgccgagtacgtggcctacgtggccaaggaccccgtgaaccagagagcctgccacatcctggagtgccccgagggcctggcccaggacgtgatcagcaccatcggccaggccttcgagctgagattcaagcagtacctgagaaacccccccaagctggtgaccccccacgacagaatggccggcttcgacggcagcgcctgggacgaggaggaggaggagccccccgaccaccagtactacaacgacttccccggcaaggagccccccctgggcggcgtggtggacatgagactgagagagggcgccgcccccggcgccgccagacccaccgcccccaacgcccagacccccagccacctgggcgccaccctgcccgtgggccagcccgtgggcggcgaccccgaggtgagaaagcagatgccccccccccccccctgccccggcagagagctgttcgacgaccccagctacgtgaacgtgcagaacctggacaaggccagacaggccgtgggcggcgccggcccccccaaccccgccatcaacggcagcgcccccagagacctgttcgacatgaagcccttcgaggacgccctgagagtgcccccccccccccagagcgtgagcatggccgagcagctgagaggcgagccctggttccacggcaagctgagcagaagagaggccgaggccctgctgcagctgaacggcgacttcctggtgagagagagcaccaccacccccggccagtacgtgctgaccggcctgcagagcggccagcccaagcacctgctgctggtggaccccgagggcgtggtgagaaccaaggaccacagattcgagagcgtgagccacctgatcagctaccacatggacaaccacctgcccatcatcagcgccggcagcgagctgtgcctgcagcagcccgtggagagaaagctgtag

SEQ ID NO: 12876 - DNA, 1422 bp, synthetic construct
  misc_feature 1..1422: note = Description of Artificial Sequence: Synthetic coding sequence
  source 1..1422: mol_type = other DNA
atgaacaagctgagcggcggcggcggcagaagaaccagagtggagggcggccagctgggcggcgaggagtggaccagacacggcagcttcgtgaacaagcccaccagaggctggctgcaccccaacgacaaggtgatgggccccggcgtgagctacctggtgagatacatgggctgcgtggaggtgctgcagagcatgagagccctggacttcaacaccagaacccaggtgaccagagaggccatcagcctggtgtgcgaggccgtgcccggcgccaagggcgccaccagaagaagaaagccctgcagcagacccctgagcagcatcctgggcagaagcaacctgaagttcgccggcatgcccatcaccctgaccgtgagcaccagcagcctgaacctgatggccgccgactgcaagcagatcatcgccaaccaccacatgcagagcatcagcttcgccagcggcggcgaccccgacaccgccgagtacgtggcctacgtggccaaggaccccgtgaaccagagagcctgccacatcctggagtgccccgagggcctggcccaggacgtgatcagcaccatcggccaggccttcgagctgagattcaagcagtacctgagaaacccccccaagctggtgaccccccacgacagaatggccggcttcgacggcagcgcctgggacgaggaggaggaggagccccccgaccaccagtactacaacgacttccccggcaaggagccccccctgggcggcgtggtggacatgagactgagagagggcgccgcccccggcgccgccagacccaccgcccccaacgcccagacccccagccacctgggcgccaccctgcccgtgggccagcccgtgggcggcgaccccgaggtgagaaagcagatgccccccccccccccctgccccggcagagagctgttcgacgaccccagctacgtgaacgtgcagaacctggacaaggccagacaggccgtgggcggcgccggcccccccaaccccgccatcaacggcagcgcccccagagacctgttcgacatgaagcccttcgaggacgccctgagagtgcccccccccccccagagcgtgagcatggccgagcagctgagaggcgagccctggttccacggcaagctgagcagaagagaggccgaggccctgctgcagctgaacggcgacttcctggtgagagagagcaccaccacccccggccagtacgtgctgaccggcctgcagagcggccagcccaagcacctgctgctggtggaccccgagggcgtggtgagaaccaaggaccacagattcgagagcgtgagccacctgatcagctaccacatggacaaccacctgcccatcatcagcgccggcagcgagctgtgcctgcagcagcccgtggagagaaagctgtag

SEQ ID NO: 12877 - DNA, 1425 bp, synthetic construct
  misc_feature 1..1425: note = Description of Artificial Sequence: Synthetic coding sequence
  source 1..1425: mol_type = other DNA
atgaacaagctgagcggcggcggcggcagaagaaccagagtggagggcggccagctgggcggcgaggagtggaccagacacggcagcttcgtgaacaagcccaccagaggctggctgcaccccaacgacaaggtgatgggccccggcgtgagctacctggtgagatacatgggctgcgtggaggtgctgcagagcatgagagccctggacttcaacaccagaacccaggtgaccagagaggccatcagcctggtgtgcgaggccgtgcccggcgccaagggcgccaccagaagaagaaagccctgcagcagacccctgagcagcatcctgggcagaagcaacctgaagttcgccggcatgcccatcaccctgaccgtgagcaccagcagcctgaacctgatggccgccgactgcaagcagatcatcgccaaccaccacatgcagagcatcagcttcgccagcggcggcgaccccgacaccgccgagtacgtggcctacgtggccaaggaccccgtgaaccagagagcctgccacatcctggagtgccccgagggcctggcccaggacgtgatcagcaccatcggccaggccttcgagctgagattcaagcagtacctgagaaacccccccaagctggtgaccccccacgacagaatggccggcttcgacggcagcgcctgggacgaggaggaggaggagccccccgaccaccagtactacaacgacttccccggcaaggagccccccctgggcggcgtggtggacatgagactgagagagggcgccgcccccggcgccgccagacccaccgcccccaacgcccagacccccagccacctgggcgccaccctgcccgtgggccagcccgtgggcggcgaccccgaggtgagaaagcagatgccccccccccccccctgccccgccggcagagagctgttcgacgaccccagctacgtgaacgtgcagaacctggacaaggccagacaggccgtgggcggcgccggcccccccaaccccgccatcaacggcagcgcccccagagacctgttcgacatgaagcccttcgaggacgccctgagagtgcccccccccccccagagcgtgagcatggccgagcagctgagaggcgagccctggttccacggcaagctgagcagaagagaggccgaggccctgctgcagctgaacggcgacttcctggtgagagagagcaccaccacccccggccagtacgtgctgaccggcctgcagagcggccagcccaagcacctgctgctggtggaccccgagggcgtggtgagaaccaaggaccacagattcgagagcgtgagccacctgatcagctaccacatggacaaccacctgcccatcatcagcgccggcagcgagctgtgcctgcagcagcccgtggagagaaagctgtag

SEQ ID NO: 12878 - DNA, 603 bp, synthetic construct
  misc_feature 1..603: note = Description of Artificial Sequence: Synthetic coding sequence
  source 1..603: mol_type = other DNA
atgaacaagctgagcggcggcggcggcagaagaaccagagtggagggcggccagctgggcggcgaggagtggaccagacacggcagcttcgtgaacaagcccaccagaggctggctgcaccccaacgacaaggtgatgggccccggcgtgagctacctggtgagatacatgggctgcgtggaggtgctgcagagcatgagagccctggacttcaacaccagaacccaggtgaccagagaggccatcagcctggtgtgcgaggccgtgcccggcgccaagggcgccaccagaagaagaaagccctgcagcagacccctgagcagcatcctgggcagaagcaacctgaagttcgccggcatgcccatcaccctgaccgtgagcaccagcagcctgaacctgatggccgccgactgcaagcaggacaccgccgagtacgtggcctacgtggccaaggaccccgtgaaccagagagcctgccacatcctggagtgccccgagggcctggcccaggacgtgatcagcaccatcggccaggccttcgagctgagattcaagcagtacctgagaaacccccccaagctggtgaccccccacgacagatag

SEQ ID NO: 12879 - DNA, 603 bp, synthetic construct
  misc_feature 1..603: note = Description of Artificial Sequence: Synthetic coding sequence
  source 1..603: mol_type = other DNA
atgcccatcaccctgaccgtgagcaccagcagcctgaacctgatggccgccgactgcaagcaggacaccgccgagtacgtggcctacgtggccaaggaccccgtgaaccagagagcctgccacatcctggagtgccccgagggcctggcccaggacgtgatcagcaccatcggccaggccttcgagctgagattcaagcagtacctgagaaacccccccaagctggtgaccccccacgacagaatggccggcttcgacggcagcgcctgggacgaggaggaggaggagccccccgaccaccagtactacaacgacttccccggcaaggagccccccctgggcggcgtggtggacatgagactgagagagggcgccgcccccggcgccgccagacccaccgcccccaacgcccagacccccagccacctgggcgccaccctgcccgtgggccagcccgtgggcggcgaccccgaggtgagaaagcagatgccccccccccccccctgccccgccggcagagagctgttcgacgaccccagctacgtgaacgtgcagaacctggacaaggccagacaggccgtgggcggcgccggccccccctag

SEQ ID NO: 12880 - DNA, 393 bp, synthetic construct
  misc_feature 1..393: note = Description of Artificial Sequence: Synthetic coding sequence
  source 1..393: mol_type = other DNA
atgcccatcaccctgaccgtgagcaccagcagcctgaacctgatggccgccgactgcaagcagatcatcgccaaccaccacatgcagagcatcagcttcgccagcggcggcgaccccgacaccgccgagtacgtggcctacgtggccaaggaccccgtgaaccagagagcctgccacatcctggagtgccccgagggcctggcccaggacgtgatcagcaccatcggccaggccttcgagctgagattcaagcagtacctgagaaacccccccaagctggtgaccccccacgacagaatggccggcttcgacggcagcgcctgggacgaggaggaggaggagccccccgaccaccagtactacaacgacttccccggcaaggagcccccctag

SEQ ID NO: 12881 - DNA, 894 bp, synthetic construct
  misc_feature 1..894: note = Description of Artificial Sequence: Synthetic coding sequence
  source 1..894: mol_type = other DNA
tgagacgaggaggaggaggagccccccgaccaccagtactacaacgacttccccggcaaggagccccccctgggcggcgtggtggacatgagactgagagagggcgccgcccccggcgccgccagacccaccgcccccaacgcccagacccccagccacctgggcgccaccctgcccgtgggccagcccgtgggcggcgaccccgaggtgagaaagcagatgccccccccccccccctgccccggcagagagctgttcgacgaccccagctacgtgaacgtgcagaacctggacaaggccagacaggccgtgggcggcgccggcccccccaaccccgccatcaacggcagcgcccccagagacctgttcgacatgaagcccttcgaggacgccctgagagtgcccccccccccccagagcgtgagcatggccgagcagctgagaggcgagccctggttccacggcaagctgagcagaagagaggccgaggccctgctgcagctgaacggcgacttcctggtgagagagagcaccaccacccccggccagtacgtgctgaccggcctgcagagcggccagcccaagcacctgctgctggtggaccccgagggcgtgagatggggcttcgccatgctgcccaagctgttcctgaacagcagagcccaggtgatcagactgcccagaccccccagagtgctgggcctgcaggccagaaccaccatgcccagcctgcacatcttcttctgcaccgtgtacaccctgctgagacacgccaacttcctgcaggtgaagaagggcgtgtacagcagccagctgcacagcttcagagccgacgtggccttcgccttcagccacttcaccgacctgagcatccccaccaccgtgagcttctag

SEQ ID NO: 12882 - DNA, 1755 bp, synthetic construct
  misc_feature 1..1755: note = Description of Artificial Sequence: Synthetic coding sequence
  source 1..1755: mol_type = other DNA
atggacctgctgccccccaagcccaagtacaaccccctgagaaacgagagcctgagcagcctggaggagggcgccagcggcagcaccccccccgaggagctgcccagccccagcgccagcagcctgggccccatcctgccccccctgcccggcgacgacagccccaccaccctgtgcagcttcttccccagaatgagcaacctgagactggccaaccccgccggcggcagacccggcagcaagggcgagcccggcagagccgccgacgacggcgagggcatcgtgggcgccgccatgcccgacagcggccccctgcccctgctgcaggacatgaacaagctgagcggcggcggcggcagaagaaccagagtggagggcggccagctgggcggcgaggagtggaccagacacggcagcttcgtgaacaagcccaccagaggctggctgcaccccaacgacaaggtgatgggccccggcgtgagctacctggtgagatacatgggctgcgtggaggtgctgcagagcatgagagccctggacttcaacaccagaacccaggtgaccagagaggccatcagcctggtgtgcgaggccgtgcccggcgccaagggcgccaccagaagaagaaagccctgcagcagacccctgagcagcatcctgggcagaagcaacctgaagttcgccggcatgcccatcaccctgaccgtgagcaccagcagcctgaacctgatggccgccgactgcaagcagatcatcgccaaccaccacatgcagagcatcagcttcgccagcggcggcgaccccgacaccgccgagtacgtggcctacgtggccaaggaccccgtgaaccagagagcctgccacatcctggagtgccccgagggcctggcccaggacgtgatcagcaccatcggccaggccttcgagctgagattcaagcagtacctgagaaacccccccaagctggtgaccccccacgacagaatggccggcttcgacggcagcgcctgggacgaggaggaggaggagccccccgaccaccagtactacaacgacttccccggcaaggagccccccctgggcggcgtggtggacatgagactgagagagggcgccgcccccggcgccgccagacccaccgcccccaacgcccagacccccagccacctgggcgccaccctgcccgtgggccagcccgtgggcggcgaccccgaggtgagaaagcagatgccccccccccccccctgccccgccggcagagagctgttcgacgaccccagctacgtgaacgtgcagaacctggacaaggccagacaggccgtgggcggcgccggcccccccaaccccgccatcaacggcagcgcccccagagacctgttcgacatgaagcccttcgaggacgccctgagagtgcccccccccccccagagcgtgagcatggccgagcagctgagaggcgagccctggttccacggcaagctgagcagaagagaggccgaggccctgctgcagctgaacggcgacttcctggtgagagagagcaccaccacccccggccagtacgtgctgaccggcctgcagagcggccagcccaagcacctgctgctggtggaccccgagggcgtggtgagaaccaaggaccacagattcgagagcgtgagccacctgatcagctaccacatggacaaccacctgcccatcatcagcgccggcagcgagctgtgcctgcagcagcccgtggagagaaagctgtag

SEQ ID NO: 12883 - DNA, 1749 bp, synthetic construct
  misc_feature 1..1749: note = Description of Artificial Sequence: Synthetic coding sequence
  source 1..1749: mol_type = other DNA
atgacccagggccccggcggcagagccccccccgccccccccgccccccccgagcccgaggcccccaccaccttctgcgccctgctgcccagaatgccccagtggaagttcgccgcccccggcggcttcctgggcagaggccccgccgccgccagagccgccggcgccagcggcggcgccgacccccagcccgagcccgccggccccggcggcgtgcccgccctggccgccgccgtgctgggcgcctgcgagcccagatgcgccgccccctgccccctgcccgccctgagcagatgcagaggcgccggcagcagaggcagcagaggcggcagaggcgccgccggcagcggcgacgccgccgccgccgccgagtggatcagaaagggcagcttcatccacaagcccgcccacggctggctgcaccccgacgccagagtgctgggccccggcgtgagctacgtggtgagatacatgggctgcatcgaggtgctgagaagcatgagaagcctggacttcaacaccagaacccaggtgaccagagaggccatcaacagactgcacgaggccgtgcccggcgtgagaggcagctggaagaagaaggcccccaacaaggccctggccagcgtgctgggcaagagcaacctgagattcgccggcatgagcatcagcatccacatcagcaccgacggcctgagcctgagcgtgcccgccaccagacaggtgatcgccaaccaccacatgcccagcatcagcttcgccagcggcggcgacaccgacatgaccgactacgtggcctacgtggccaaggaccccatcaaccagagagcctgccacatcctggagtgctgcgagggcctggcccagagcatcatcagcaccgtgggccaggccttcgagctgagattcaagcagtacctgcacagcccccccaaggtggccctgccccccgagagactggccggccccgaggagagcgcctggggcgacgaggaggacagcctggagcacaactactacaacagcatccccggcaaggagccccccctgggcggcctggtggacagcagactggccctgacccagccctgcgccctgaccgccctggaccagggccccagccccagcctgagagacgcctgcagcctgccctgggacgtgggcagcaccggcaccgccccccccggcgacggctacgtgcaggccgacgccagaggcccccccgaccacgaggagcacctgtacgtgaacacccagggcctggacgcccccgagcccgaggacagccccaagaaggacctgttcgacatgagacccttcgaggacgccctgaagctgcacgagtgcagcgtggccgccggcgtgaccgccgcccccctgcccctggaggaccagtggcccagcccccccaccagaagagcccccgtggcccccaccgaggagcagctgagacaggagccctggtaccacggcagaatgagcagaagagccgccgagagaatgctgagagccgacggcgacttcctggtgagagacagcgtgaccaaccccggccagtacgtgctgaccggcatgcacgccggccagcccaagcacctgctgctggtggaccccgagggcgtggtgagaaccaaggacgtgctgttcgagagcatcagccacctgatcgaccaccacctgcagaacggccagcccatcgtggccgccgagagcgagctgcacctgagaggcgtggtgagcagagagccctag

SEQ ID NO: 12884 - DNA, 1833 bp, synthetic construct
  misc_feature 1..1833: note = Description of Artificial Sequence: Synthetic coding sequence
  source 1..1833: mol_type = other DNA
atgctggacttcttcaccatcttcagcaagggcggcctggtgctgtggtgcttccagggcgtgagcgacagctgcaccggccccgtgaacgccctgatcagaagcgtgctgctgcaggtgggcttccagaagatcctgaccctgacctacgtggacaagctgatcgacgacgtgcacagactgttcagagacaagtacagaaccgagatccagcagcagagcgccctgagcctgctgaacggcaccttcgacttccagaacgacttcctgagactgctgagagaggccgaggagagcagcaagatcagagcccccaccaccatgaagaagttcgaggacagcgagaaggccaagaagcccgtgagaagcatgatcgagaccagaggcgagaagcccaaggagaaggccaagaacagcaagaagaagggcgccaagaaggagggcagcgacggccccctggccaccagcaagcccgtgcccgccgagaagagcggcctgcccgtgggccccgagaacggcgtggagctgagcaaggaggagctgatcagaagaaagagagaggagttcatccagaagcacggcagaggcatggagaagagcaacaagagcaccaagagcgacgcccccaaggagaagggcaagaaggcccccagagtgtgggagctgggcggctgcgccaacaaggaggtgctggactacagcacccccaccaccaacggcacccccgaggccgccctgagcgaggacatcaacctgatcagaggcaccggcagcggcggccagctgcaggacctggactgcagcagcagcgacgacgagggcgccgcccagaacagcaccaagcccagcgccaccaagggcaccctgggcggcatgttcggcatgctgaagggcctggtgggcagcaagagcctgagcagagaggacatggagagcgtgctggacaagatgagagaccacctgatcgccaagaacgtggccgccgacatcgccgtgcagctgtgcgagagcgtggccaacaagctggagggcaaggtgatgggcaccttcagcaccgtgaccagcaccgtgaagcaggccctgcaggagagcctggtgcagatcctgcagccccagagaagagtggacatgctgagagacatcatggacgcccagagaagacagagaccctacgtggtgaccttctgcggcgtgaacggcgtgggcaagagcaccaacctggccaagatcagcttctggctgctggagaacggcttcagcgtgctgatcgccgcctgcgacaccttcagagccggcgccgtggagcagctgagaacccacaccagaagactgagcgccctgcacccccccgagaagcacggcggcagaaccatggtgcagctgttcgagaagggctacggcaaggacgccgccggcatcgccatggaggccatcgccttcgccagaaaccagggcttcgacgtggtgctggtggacaccgccggcagaatgcaggacaacgcccccctgatgaccgccctggccaagctgatcaccgtgaacacccccgacctggtgctgttcgtgggcgaggccctggtgggcaacgaggccgtggaccagctggtgaagttcaacagagccctggccgaccacagcatggcccagacccccagactgatcgacggcatcgtgctgaccaagttcgacaccatcgacgacaaggtgggcgccgccatcagcatgacctacatcaccagcaagcccatcgtgttcgtgggcaccggccagacctactgcgacctgagaagcctgaacgccaaggccgtggtggccgccctgatgaaggcctag

SEQ ID NO: 12885 - DNA, 2253 bp, synthetic construct
  misc_feature 1..2253: note = Description of Artificial Sequence: Synthetic coding sequence
  source 1..2253: mol_type = other DNA
atgagccagtggtacgagctgcagcagctggacagcaagttcctggagcaggtgcaccagctgtacgacgacagcttccccatggagatcagacagtacctggcccagtggctggagaagcaggactgggagcacgccgccaacgacgtgagcttcgccaccatcagattccacgacctgctgagccagctggacgaccagtacagcagattcagcctggagaacaacttcctgctgcagcacaacatcagaaagagcaagagaaacctgcaggacaacttccaggaggaccccatccagatgagcatgatcatctacagctgcctgaaggaggagagaaagatcctggagaacgcccagagattcaaccaggcccagagcggcaacatccagagcaccgtgatgctggacaagcagaaggagctggacagcaaggtgagaaacgtgaaggacaaggtgatgtgcatcgagcacgagatcaagagcctggaggacctgcaggacgagtacgacttcaagtgcaagaccctgcagaacagagagcacgagaccaacggcgtggccaagagcgaccagaagcaggagcagctgctgctgaagaagatgtacctgatgctggacaacaagagaaaggaggtggtgcacaagatcatcgagctgctgaacgtgaccgagctgacccagaacgccctgatcaacgacgagctggtggagtggaagagaagacagcagagcgcctgcatcggcggcccccccaacgcctgcctggaccagctgcagaactggttcaccatcgtggccgagagcctgcagcaggtgagacagcagctgaagaagctggaggagctggagcagaagtacacctacgagcacgaccccatcaccaagaacaagcaggtgctgtgggacagaaccttcagcctgttccagcagctgatccagagcagcttcgtggtggagagacagccctgcatgcccacccacccccagagacccctggtgctgaagaccggcgtgcagttcaccgtgaagctgagactgctggtgaagctgcaggagctgaactacaacctgaaggtgaaggtgctgttcgacaaggacgtgaacgagagaaacaccgtgaagggcttcagaaagttcaacatcctgggcacccacaccaaggtgatgaacatggaggagagcaccaacggcagcctggccgccgagttcagacacctgcagctgaaggagcagaagaacgccggcaccagaaccaacgagggccccctgatcgtgaccgaggagctgcacagcctgagcttcgagacccagctgtgccagcccggcctggtgatcgacctggagaccaccagcctgcccgtggtggtgatcagcaacgtgagccagctgcccagcggctgggccagcatcctgtggtacaacatgctggtggccgagcccagaaacctgagcttcttcctgacccccccctgcgccagatgggcccagctgagcgaggtgctgagctggcagttcagcagcgtgaccaagagaggcctgaacgtggaccagctgaacatgctgggcgagaagctgctgggccccaacgccagccccgacggcctgatcccctggaccagattctgcaaggagaacatcaacgacaagaacttccccttctggctgtggatcgagagcatcctggagctgatcaagaagcacctgctgcccctgtggaacgacggctgcatcatgggcttcatcagcaaggagagagagagagccctgctgaaggaccagcagcccggcaccttcctgctgagattcagcgagagcagcagagagggcgccatcaccttcacctgggtggagagaagccagaacggcggcgagcccgacttccacgccgtggagccctacaccaagaaggagctgagcgccgtgaccttccccgacatcatcagaaactacaaggtgatggccgccgagaacatccccgagaaccccctgaagtacctgtaccccaacatcgacaaggaccacgccttcggcaagtactacagcagacccaaggaggcccccgagcccatggagctggacggccccaagggcaccggctacatcaagaccgagctgatcagcgtgagcgaggtgcaccccagcagactgcagaccaccgacaacctgctgcccatgagccccgaggagttcgacgaggtgagcagaatcgtgggcagcgtggagttcgacagcatgatgaacaccgtgtag

SEQ ID NO: 12886 - DNA, 2139 bp, synthetic construct
  misc_feature 1..2139: note = Description of Artificial Sequence: Synthetic coding sequence
  source 1..2139: mol_type = other DNA
atgagccagtggtacgagctgcagcagctggacagcaagttcctggagcaggtgcaccagctgtacgacgacagcttccccatggagatcagacagtacctggcccagtggctggagaagcaggactgggagcacgccgccaacgacgtgagcttcgccaccatcagattccacgacctgctgagccagctggacgaccagtacagcagattcagcctggagaacaacttcctgctgcagcacaacatcagaaagagcaagagaaacctgcaggacaacttccaggaggaccccatccagatgagcatgatcatctacagctgcctgaaggaggagagaaagatcctggagaacgcccagagattcaaccaggcccagagcggcaacatccagagcaccgtgatgctggacaagcagaaggagctggacagcaaggtgagaaacgtgaaggacaaggtgatgtgcatcgagcacgagatcaagagcctggaggacctgcaggacgagtacgacttcaagtgcaagaccctgcagaacagagagcacgagaccaacggcgtggccaagagcgaccagaagcaggagcagctgctgctgaagaagatgtacctgatgctggacaacaagagaaaggaggtggtgcacaagatcatcgagctgctgaacgtgaccgagctgacccagaacgccctgatcaacgacgagctggtggagtggaagagaagacagcagagcgcctgcatcggcggcccccccaacgcctgcctggaccagctgcagaactggttcaccatcgtggccgagagcctgcagcaggtgagacagcagctgaagaagctggaggagctggagcagaagtacacctacgagcacgaccccatcaccaagaacaagcaggtgctgtgggacagaaccttcagcctgttccagcagctgatccagagcagcttcgtggtggagagacagccctgcatgcccacccacccccagagacccctggtgctgaagaccggcgtgcagttcaccgtgaagctgagactgctggtgaagctgcaggagctgaactacaacctgaaggtgaaggtgctgttcgacaaggacgtgaacgagagaaacaccgtgaagggcttcagaaagttcaacatcctgggcacccacaccaaggtgatgaacatggaggagagcaccaacggcagcctggccgccgagttcagacacctgcagctgaaggagcagaagaacgccggcaccagaaccaacgagggccccctgatcgtgaccgaggagctgcacagcctgagcttcgagacccagctgtgccagcccggcctggtgatcgacctggagaccaccagcctgcccgtggtggtgatcagcaacgtgagccagctgcccagcggctgggccagcatcctgtggtacaacatgctggtggccgagcccagaaacctgagcttcttcctgacccccccctgcgccagatgggcccagctgagcgaggtgctgagctggcagttcagcagcgtgaccaagagaggcctgaacgtggaccagctgaacatgctgggcgagaagctgctgggccccaacgccagccccgacggcctgatcccctggaccagattctgcaaggagaacatcaacgacaagaacttccccttctggctgtggatcgagagcatcctggagctgatcaagaagcacctgctgcccctgtggaacgacggctgcatcatgggcttcatcagcaaggagagagagagagccctgctgaaggaccagcagcccggcaccttcctgctgagattcagcgagagcagcagagagggcgccatcaccttcacctgggtggagagaagccagaacggcggcgagcccgacttccacgccgtggagccctacaccaagaaggagctgagcgccgtgaccttccccgacatcatcagaaactacaaggtgatggccgccgagaacatccccgagaaccccctgaagtacctgtaccccaacatcgacaaggaccacgccttcggcaagtactacagcagacccaaggaggcccccgagcccatggagctggacggccccaagggcaccggctacatcaagaccgagctgatcagcgtgagcgaggtgtag

SEQ ID NO: 12887 - DNA, 2145 bp, synthetic construct
  misc_feature 1..2145: note = Description of Artificial Sequence: Synthetic coding sequence
  source 1..2145: mol_type = other DNA
atgtggatgagccagtggtacgagctgcagcagctggacagcaagttcctggagcaggtgcaccagctgtacgacgacagcttccccatggagatcagacagtacctggcccagtggctggagaagcaggactgggagcacgccgccaacgacgtgagcttcgccaccatcagattccacgacctgctgagccagctggacgaccagtacagcagattcagcctggagaacaacttcctgctgcagcacaacatcagaaagagcaagagaaacctgcaggacaacttccaggaggaccccatccagatgagcatgatcatctacagctgcctgaaggaggagagaaagatcctggagaacgcccagagattcaaccaggcccagagcggcaacatccagagcaccgtgatgctggacaagcagaaggagctggacagcaaggtgagaaacgtgaaggacaaggtgatgtgcatcgagcacgagatcaagagcctggaggacctgcaggacgagtacgacttcaagtgcaagaccctgcagaacagagagcacgagaccaacggcgtggccaagagcgaccagaagcaggagcagctgctgctgaagaagatgtacctgatgctggacaacaagagaaaggaggtggtgcacaagatcatcgagctgctgaacgtgaccgagctgacccagaacgccctgatcaacgacgagctggtggagtggaagagaagacagcagagcgcctgcatcggcggcccccccaacgcctgcctggaccagctgcagaactggttcaccatcgtggccgagagcctgcagcaggtgagacagcagctgaagaagctggaggagctggagcagaagtacacctacgagcacgaccccatcaccaagaacaagcaggtgctgtgggacagaaccttcagcctgttccagcagctgatccagagcagcttcgtggtggagagacagccctgcatgcccacccacccccagagacccctggtgctgaagaccggcgtgcagttcaccgtgaagctgagactgctggtgaagctgcaggagctgaactacaacctgaaggtgaaggtgctgttcgacaaggacgtgaacgagagaaacaccgtgaagggcttcagaaagttcaacatcctgggcacccacaccaaggtgatgaacatggaggagagcaccaacggcagcctggccgccgagttcagacacctgcagctgaaggagcagaagaacgccggcaccagaaccaacgagggccccctgatcgtgaccgaggagctgcacagcctgagcttcgagacccagctgtgccagcccggcctggtgatcgacctggagaccaccagcctgcccgtggtggtgatcagcaacgtgagccagctgcccagcggctgggccagcatcctgtggtacaacatgctggtggccgagcccagaaacctgagcttcttcctgacccccccctgcgccagatgggcccagctgagcgaggtgctgagctggcagttcagcagcgtgaccaagagaggcctgaacgtggaccagctgaacatgctgggcgagaagctgctgggccccaacgccagccccgacggcctgatcccctggaccagattctgcaaggagaacatcaacgacaagaacttccccttctggctgtggatcgagagcatcctggagctgatcaagaagcacctgctgcccctgtggaacgacggctgcatcatgggcttcatcagcaaggagagagagagagccctgctgaaggaccagcagcccggcaccttcctgctgagattcagcgagagcagcagagagggcgccatcaccttcacctgggtggagagaagccagaacggcggcgagcccgacttccacgccgtggagccctacaccaagaaggagctgagcgccgtgaccttccccgacatcatcagaaactacaaggtgatggccgccgagaacatccccgagaaccccctgaagtacctgtaccccaacatcgacaaggaccacgccttcggcaagtactacagcagacccaaggaggcccccgagcccatggagctggacggccccaagggcaccggctacatcaagaccgagctgatcagcgtgagcgaggtgtag

SEQ ID NO: 12888 - DNA, 2253 bp, synthetic construct; identical to SEQ ID NO: 12885
  misc_feature 1..2253: note = Description of Artificial Sequence: Synthetic coding sequence
  source 1..2253: mol_type = other DNA

SEQ ID NO: 12889 - DNA, 543 bp, synthetic construct
  misc_feature 1..543: note = Description of Artificial Sequence: Synthetic coding sequence
  source 1..543: mol_type = other DNA
atgagccagtggtacgagctgcagcagctggacagcaagttcctggagcaggtgcaccagctgtacgacgacagcttccccatggagatcagacagtacctggcccagtggctggagaagcaggactgggagcacgccgccaacgacgtgagcttcgccaccatcagattccacgacctgctgagccagctggacgaccagtacagcagattcagcctggagaacaacttcctgctgcagcacaacatcagaaagagcaagagaaacctgcaggacaacttccaggaggaccccatccagatgagcatgatcatctacagctgcctgaaggaggagagaaagatcctggagaacgcccagagattcaaccaggcccagagcggcaacatccagagcaccgtgatgctggacaagcagaaggagctggacagcaaggtgagaaacgtgaaggacaaggtgatgtgcatcgagcacgagatcaagagcctggaggacctgcaggacgagtacgacttcaagtgcaagaccctgcagaacagatag

SEQ ID NO: 12890 - DNA, 213 bp, synthetic construct
  misc_feature 1..213: note = Description of Artificial Sequence: Synthetic coding sequence
  source 1..213: mol_type = other DNA
atgagccagtggtacgagctgcagcagctggacagcaagttcctggagcaggtgcaccagctgtacgacgacagcttccccatggagatcagacagtacctggcccagtggctggagaagcaggactgggagcacgccgccaacgacgtgagcttcgccaccatcagattccacgacctgctgagccagctggacgaccagtacagcagatag

SEQ ID NO: 12891 - DNA, 582 bp, synthetic construct
  misc_feature 1..582: note = Description of Artificial Sequence: Synthetic coding sequence
  source 1..582: mol_type = other DNA
atgagccagtggtacgagctgcagcagctggacagcaagttcctggagcaggtgcaccagctgtacgacgacagcttccccatggagatcagacagtacctggcccagtggctggagaagcaggactgggagcacgccgccaacgacgtgagcttcgccaccatcagattccacgacctgctgagccagctggacgaccagtacagcagattcagcctggagaacaacttcctgctgcagcacaacatcagaaagagcaagagaaacctgcaggacaacttccaggaggaccccatccagatgagcatgatcatctacagctgcctgaaggaggagagaaagatcctggagaacgcccagagattcaaccaggcccagagcggcaacatccagagcaccgtgatgctggacaagcagaaggagctggacagcaaggtgagaaacgtgaaggacaaggtgatgtgcatcgagcacgagatcaagagcctggaggacctgcaggacgagtacgacttcaagtgcaagaccctgcagaacagaggcagcagcagccagaacaacagagtggccgagtgccactag

SEQ ID NO: 12892 - DNA, 453 bp, synthetic construct
  misc_feature 1..453: note = Description of Artificial Sequence: Synthetic coding sequence
  source 1..453: mol_type = other DNA
atgagccagtggtacgagctgcagcagctggacagcaagttcctggagcaggtgcaccagctgtacgacgacagcttccccatggagatcagacagtacctggcccagtggctggagaagcaggactgggagcacgccgccaacgacgtgagcttcgccaccatcagattccacgacctgctgagccagctggacgaccagtacagcagattcagcctggagaacaacttcctgctgcagcacaacatcagaaagagcaagagaaacctgcaggacaacttccaggaggaccccatccagatgagcatgatcatctacagctgcctgaaggaggagagaaagatcctggagaacgcccagagattcaaccaggcccagagcggcaacatccagagcaccgtgatgctggacaagcagaaggagctggacagcaaggtgagaaacgtgaagtag

SEQ ID NO: 12893 - DNA, 582 bp, synthetic construct; identical to SEQ ID NO: 12891
  misc_feature 1..582: note = Description of Artificial Sequence: Synthetic coding sequence
  source 1..582: mol_type = other DNA

SEQ ID NO: 12894 - DNA, 483 bp, synthetic construct
  misc_feature 1..483: note = Description of Artificial Sequence: Synthetic coding sequence
  source 1..483: mol_type = other DNA
gagtgccacgaggaccccatccagatgagcatgatcatctacagctgcctgaaggaggagagaaagatcctggagaacgcccagagattcaaccaggcccagagcggcaacatccagagcaccgtgatgctggacaagcagaaggagctggacagcaaggtgagaaacgtgaaggacaaggtgatgtgcatcgagcacgagatcaagagcctggaggacctgcaggacgagtacgacttcaagtgcaagaccctgcagaacagagagcacgagaccaacggcgtggccaagagcgaccagaagcaggagcagctgctgctgaagaagatgtacctgatgctggacaacaagagaaaggaggtggtgcacaagatcatcgagctgctgaacgtgaccgagctgacccagaacgccctgatcaacgacgagctggtggagtggaagagaagacagcagagcgcctgcatcggcggccccccctag

SEQ ID NO: 12895 - DNA, 2556 bp, synthetic construct
  misc_feature 1..2556: note = Description of Artificial Sequence: Synthetic coding sequence
  source 1..2556: mol_type = other DNA
atggcccagtgggagatgctgcagaacctggacagccccttccaggaccagctgcaccagctgtacagccacagcctgctgcccgtggacatcagacagtacctggccgtgtggatcgaggaccagaactggcaggaggccgccctgggcagcgacgacagcaaggccaccatgctgttcttccacttcctggaccagctgaactacgagtgcggcagatgcagccaggaccccgagagcctgctgctgcagcacaacctgagaaagttctgcagagacatccagcccttcagccaggaccccacccagctggccgagatgatcttcaacctgctgctggaggagaagagaatcctgatccaggcccagagagcccagctggagcagggcgagcccgtgctggagacccccgtggagagccagcagcacgagatcgagagcagaatcctggacctgagagccatgatggagaagctggtgaagagcatcagccagctgaaggaccagcaggacgtgttctgcttcagatacaagatccaggccaagggcaagacccccagcctggacccccaccagaccaaggagcagaagatcctgcaggagaccctgaacgagctggacaagagaagaaaggaggtgctggacgccagcaaggccctgctgggcagactgaccaccctgatcgagctgctgctgcccaagctggaggagtggaaggcccagcagcagaaggcctgcatcagagcccccatcgaccacggcctggagcagctggagacctggttcaccgccggcgccaagctgctgttccacctgagacagctgctgaaggagctgaagggcctgagctgcctggtgagctaccaggacgaccccctgaccaagggcgtggacctgagaaacgcccaggtgaccgagctgctgcagagactgctgcacagagccttcgtggtggagacccagccctgcatgccccagaccccccacagacccctgatcctgaagaccggcagcaagttcaccgtgagaaccagactgctggtgagactgcaggagggcaacgagagcctgaccgtggaggtgagcatcgacagaaaccccccccagctgcagggcttcagaaagttcaacatcctgaccagcaaccagaagaccctgacccccgagaagggccagagccagggcctgatctgggacttcggctacctgaccctggtggagcagagaagcggcggcagcggcaagggcagcaacaagggccccctgggcgtgaccgaggagctgcacatcatcagcttcaccgtgaagtacacctaccagggcctgaagcaggagctgaagaccgacaccctgcccgtggtgatcatcagcaacatgaaccagctgagcatcgcctgggccagcgtgctgtggttcaacctgctgagccccaacctgcagaaccagcagttcttcagcaacccccccaaggccccctggagcctgctgggccccgccctgagctggcagttcagcagctacgtgggcagaggcctgaacagcgaccagctgagcatgctgagaaacaagctgttcggccagaactgcagaaccgaggaccccctgctgagctgggccgacttcaccaagagagagagcccccccggcaagctgcccttctggacctggctggacaagatcctggagctggtgcacgaccacctgaaggacctgtggaacgacggcagaatcatgggcttcgtgagcagaagccaggagagaagactgctgaagaagaccatgagcggcaccttcctgctgagattcagcgagagcagcgagggcggcatcacctgcagctgggtggagcaccaggacgacgacaaggtgctgatctacagcgtgcagccctacaccaaggaggtgctgcagagcctgcccctgaccgagatcatcagacactaccagctgctgaccgaggagaacatccccgagaaccccctgagattcctgtaccccagaatccccagagacgaggccttcggctgctactaccaggagaaggtgaacctgcaggagagaagaaagtacctgaagcacagactgatcgtggtgagcaacagacaggtggacgagctgcagcagcccctggagctgaagcccgagcccgagctggagagcctggagctggagctgggcctggtgcccgagcccgagctgagcctggacctggagcccctgctgaaggccggcctggacctgggccccgagctggagagcgtgctggagagcaccctggagcccgtgatcgagcccaccctgtgcatggtgagccagaccgtgcccgagcccgaccagggccccgtgagccagcccgtgcccgagcccgacctgccctgcgacctgagacacctgaacaccgagcccatggagatcttcagaaactgcgtgaagatcgaggagatcatgcccaacggcgaccccctgctggccggccagaacaccgtggacgaggtgtacgtgagcagacccagccacttctacaccgacggccccctgatgcccagcgacttctag

SEQ ID NO: 12896 - DNA, 1383 bp, synthetic construct
  misc_feature 1..1383: note = Description of Artificial Sequence: Synthetic coding sequence
  source 1..1383: mol_type = other DNA
atggcccagtgggagatgctgcagaacctggacagccccttccaggaccagctgcaccagctgtacagccacagcctgctgcccgtggacatcagacagtacctggccgtgtggatcgaggaccagaactggcaggaggccgccctgggcagcgacgacagcaaggccaccatgctgttcttccacttcctggaccagctgaactacgagtgcggcagatgcagccaggaccccgagagcctgctgctgcagcacaacctgagaaagttctgcagagacatccaggaccccacccagctggccgagatgatcttcaacctgctgctggaggagaagagaatcctgatccaggcccagagagcccagctggagcagggcgagcccgtgctggagacccccgtggagagccagcagcacgagatcgagagcagaatcctggacctgagagccatgatggagaagctggtgaagagcatcagccagctgaaggaccagcaggacgtgttctgcttcagatacaagatccaggccaagggcaagacccccagcctggacccccaccagaccaaggagcagaagatcctgcaggagaccctgaacgagctggacaagagaagaaaggaggtgctggacgccagcaaggccctgctgggcagactgaccaccctgatcgagctgctgctgcccaagctggaggagtggaaggcccagcagcagaaggcctgcatcagagcccccatcgaccacggcctggagcagctggagacctggttcaccgccggcgccaagctgctgttccacctgagacagctgctgaaggagctgaagggcctgagctgcctggtgagctaccaggacgaccccctgaccaagggcgtggacctgagaaacgcccaggtgaccgagctgctgcagagactgctgcacagagccttcgtggtggagacccagccctgcatgccccagaccccccacagacccctgatcctgaagaccggcagcaagttcaccgtgagaaccagactgctggtgagactgcaggagggcaacgagagcctgaccgtggaggtgagcatcgacagaaaccccccccagctgcagggcttcagaaagttcaacatcctgaccagcaaccagaagaccctgacccccgagaagggccagagccagggcctgatctgggacttcggctacctgaccctggtggagcagagaagcggcggcagcggcaagggcagcaacaagggccccctgggcgtgaccgaggagctgcacatcatcagcttcaccgtgaagtacacctaccagggcctgaagcaggagctgaaggtgagcgagaacggcggccagggcgagagaaagcagctgtggaagaaggcctag

SEQ ID NO: 12897 - DNA, 2544 bp, synthetic construct
  misc_feature 1..2544: note = Description of Artificial Sequence: Synthetic coding sequence
  source 1..2544: mol_type = other DNA
atggcccagtgggagatgctgcagaacctggacagccccttccaggaccagctgcaccagctgtacagccacagcctgctgcccgtggacatcagacagtacctggccgtgtggatcgaggaccagaactggcaggaggccgccctgggcagcgacgacagcaaggccaccatgctgttcttccacttcctggaccagctgaactacgagtgcggcagatgcagccaggaccccgagagcctgctgctgcagcacaacctgagaaagttctgcagagacatccaggaccccacccagctggccgagatgatcttcaacctgctgctggaggagaagagaatcctgatccaggcccagagagcccagctggagcagggcgagcccgtgctggagacccccgtggagagccagcagcacgagatcgagagcagaatcctggacctgagagccatgatggagaagctggtgaagagcatcagccagctgaaggaccagcaggacgtgttctgcttcagatacaagatccaggccaagggcaagacccccagcctggacccccaccagaccaaggagcagaagatcctgcaggagaccctgaacgagctggacaagagaagaaaggaggtgctggacgccagcaaggccctgctgggcagactgaccaccctgatcgagctgctgctgcccaagctggaggagtggaaggcccagcagcagaaggcctgcatcagagcccccatcgaccacggcctggagcagctggagacctggttcaccgccggcgccaagctgctgttccacctgagacagctgctgaaggagctgaagggcctgagctgcctggtgagctaccaggacgaccccctgaccaagggcgtggacctgagaaacgcccaggtgaccgagctgctgcagagactgctgcacagagccttcgtggtggagacccagccctgcatgccccagaccccccacagacccctgatcctgaagaccggcagcaagttcaccgtgagaaccagactgctggtgagactgcaggagggcaacgagagcctgaccgtggaggtgagcatcgacagaaaccccccccagctgcagggcttcagaaagttcaacatcctgaccagcaaccagaagaccctgacccccgagaagggccagagccagggcctgatctgggacttcggctacctgaccctggtggagcagagaagcggcggcagcggcaagggcagcaacaagggccccctgggcgtgaccgaggagctgcacatcatcagcttcaccgtgaagtacacctaccagggcctgaagcaggagctgaagaccgacaccctgcccgtggtgatcatcagcaacatgaaccagctgagcatcgcctgggccagcgtgctgtggttcaacctgctgagccccaacctgcagaaccagcagttcttcagcaacccccccaaggccccctggagcctgctgggccccgccctgagctggcagttcagcagctacgtgggcagaggcctgaacagcgaccagctgagcatgctgagaaacaagctgttcggccagaactgcagaaccgaggaccccctgctgagctgggccgacttcaccaagagagagagcccccccggcaagctgcccttctggacctggctggacaagatcctggagctggtgcacgaccacctgaaggacctgtggaacgacggcagaatcatgggcttcgtgagcagaagccaggagagaagactgctgaagaagaccatgagcggcaccttcctgctgagattcagcgagagcagcgagggcggcatcacctgcagctgggtggagcaccaggacgacgacaaggtgctgatctacagcgtgcagccctacaccaaggaggtgctgcagagcctgcccctgaccgagatcatcagacactaccagctgctgaccgaggagaacatccccgagaaccccctgagattcctgtaccccagaatccccagagacgaggccttcggctgctactaccaggagaaggtgaacctgcaggagagaagaaagtacctgaagcacagactgatcgtggtgagcaacagacaggtggacgagctgcagcagcccctggagctgaagcccgagcccgagctggagagcctggagctggagctgggcctggtgcccgagcccgagctgagcctggacctggagcccctgctgaaggccggcctggacctgggccccgagctggagagcgtgctggagagcaccctggagcccgtgatcgagcccaccctgtgcatggtgagccagaccgtgcccgagcccgaccagggccccgtgagccagcccgtgcccgagcccgacctgccctgcgacctgagacacctgaacaccgagcccatggagatcttcagaaactgcgtgaagatcgaggagatcatgcccaacggcgaccccctgctggccggccagaacaccgtggacgaggtgtacgtgagcagacccagccacttctacaccgacggccccctgatgcccagcgacttctag

SEQ ID NO: 12898 - DNA, 2313 bp, synthetic construct
  misc_feature 1..2313: note = Description of Artificial Sequence: Synthetic coding sequence
  source 1..2313: mol_type = other DNA
atggcccagtggaaccagctgcagcagctggacaccagatacctggagcagctgcaccagctgtacagcgacagcttccccatggagctgagacagttcctggccccctggatcgagagccaggactgggcctacgccgccagcaaggagagccacgccaccctggtgttccacaacctgctgggcgagatcgaccagcagtacagcagattcctgcaggagagcaacgtgctgtaccagcacaacctgagaagaatcaagcagttcctgcagagcagatacctggagaagcccatggagatcgccagaatcgtggccagatgcctgtgggaggagagcagactgctgcagaccgccgccaccgccgcccagcagggcggccaggccaaccaccccaccgccgccgtggtgaccgagaagcagcagatgctggagcagcacctgcaggacgtgagaaagagagtgcaggacctggagcagaagatgaaggtggtggagaacctgcaggacgacttcgacttcaactacaagaccctgaagagccagggcgacatgcaggacctgaacggcaacaaccagagcgtgaccagacagaagatgcagcagctggagcagatgctgaccgccctggaccagatgagaagaagcatcgtgagcgagctggccggcctgctgagcgccatggagtacgtgcagaagaccctgaccgacgaggagctggccgactggaagagaagacagcagatcgcctgcatcggcggcccccccaacatctgcctggacagactggagaactggatcaccagcctggccgagagccagctgcagaccagacagcagatcaagaagctggaggagctgcagcagaaggtgagctacaagggcgaccccatcgtgcagcacagacccatgctggaggagagaatcgtggagctgttcagaaacctgatgaagagcgccttcgtggtggagagacagccctgcatgcccatgcaccccgacagacccctggtgatcaagaccggcgtgcagttcaccaccaaggtgagactgctggtgaagttccccgagctgaactaccagctgaagatcaaggtgtgcatcgacaaggacagcggcgacgtggccgccctgagaggcagcagaaagttcaacatcctgggcaccaacaccaaggtgatgaacatggaggagagcaacaacggcagcctgagcgccgagttcaagcacctgaccctgagagagcagagatgcggcaacggcggcagagccaactgcgacgccagcctgatcgtgaccgaggagctgcacctgatcaccttcgagaccgaggtgtaccaccagggcctgaagatcgacctggagacccacagcctgcccgtggtggtgatcagcaacatctgccagatgcccaacgcctgggccagcatcctgtggtacaacatgctgaccaacaaccccaagaacgtgaacttcttcaccaagccccccatcggcacctgggaccaggtggccgaggtgctgagctggcagttcagcagcaccaccaagagaggcctgagcatcgagcagctgaccaccctggccgagaagctgctgggccccggcgtgaactacagcggctgccagatcacctgggccaagttctgcaaggagaacatggccggcaagggcttcagcttctgggtgtggctggacaacatcatcgacctggtgaagaagtacatcctggccctgtggaacgagggctacatcatgggcttcatcagcaaggagagagagagagccatcctgagcaccaagccccccggcaccttcctgctgagattcagcgagagcagcaaggagggcggcgtgaccttcacctgggtggagaaggacatcagcggcaagacccagatccagagcgtggagccctacaccaagcagcagctgaacaacatgagcttcgccgagatcatcatgggctacaagatcatggacgccaccaacatcctggtgagccccctggtgtacctgtaccccgacatccccaaggaggaggccttcggcaagtactgcagacccgagagccaggagcaccccgaggccgaccccggcagcgccgccccctacctgaagaccaagttcatctgcgtgacccccaccacctgcagcaacaccatcgacctgcccatgagccccagaaccctggacagcctgatgcagttcggcaacaacggcgagggcgccgagcccagcgccggcggccagttcgagagcctgaccttcgacatggagctgaccagcgagtgcgccaccagccccatgtag

SEQ ID NO: 12899 - DNA, 2019 bp, synthetic construct
  misc_feature 1..2019: note = Description of Artificial Sequence: Synthetic coding sequence
  source 1..2019: mol_type = other DNA
atggagatcgccagaatcgtggccagatgcctgtgggaggagagcagactgctgcagaccgccgccaccgccgcccagcagggcggccaggccaaccaccccaccgccgccgtggtgaccgagaagcagcagatgctggagcagcacctgcaggacgtgagaaagagagtgcaggacctggagcagaagatgaaggtggtggagaacctgcaggacgacttcgacttcaactacaagaccctgaagagccagggcgacatgcaggacctgaacggcaacaaccagagcgtgaccagacagaagatgcagcagctggagcagatgctgaccgccctggaccagatgagaagaagcatcgtgagcgagctggccggcctgctgagcgccatggagtacgtgcagaagaccctgaccgacgaggagctggccgactggaagagaagacagcagatcgcctgcatcggcggcccccccaacatctgcctggacagactggagaactggatcaccagcctggccgagagccagctgcagaccagacagcagatcaagaagctggaggagctgcagcagaaggtgagctacaagggcgaccccatcgtgcagcacagacccatgctggaggagagaatcgtggagctgttcagaaacctgatgaagagcgccttcgtggtggagagacagccctgcatgcccatgcaccccgacagacccctggtgatcaagaccggcgtgcagttcaccaccaaggtgagactgctggtgaagttccccgagctgaactaccagctgaagatcaaggtgtgcatcgacaaggacagcggcgacgtggccgccctgagaggcagcagaaagttcaacatcctgggcaccaacaccaaggtgatgaacatggaggagagcaacaacggcagcctgagcgccgagttcaagcacctgaccctgagagagcagagatgcggcaacggcggcagagccaactgcgacgccagcctgatcgtgaccgaggagctgcacctgatcaccttcgagaccgaggtgtaccaccagggcctgaagatcgacctggagacccacagcctgcccgtggtggtgatcagcaacatctgccagatgcccaacgcctgggccagcatcctgtggtacaacatgctgaccaacaaccccaagaacgtgaacttcttcaccaagccccccatcggcacctgggaccaggtggccgaggtgctgagctggcagttcagcagcaccaccaagagaggcctgagcatcgagcagctgaccaccctggccgagaagctgctgggccccggcgtgaactacagcggctgccagatcacctgggccaagttctgcaaggagaacatggccggcaagggcttcagcttctgggtgtggctggacaacatcatcgacctggtgaagaagtacatcctggccctgtggaacgagggctacatcatgggcttcatcagcaaggagagagagagagccatcctgagcaccaagccccccggcaccttcctgctgagattcagcgagagcagcaaggagggcggcgtgaccttcacctgggtggagaaggacatcagcggcaagacccagatccagagcgtggagccctacaccaagcagcagctgaacaacatgagcttcgccgagatcatcatgggctacaagatcatggacgccaccaacatcctggtgagccccctggtgtacctgtaccccgacatccccaaggaggaggccttcggcaagtactgcagacccgagagccaggagcaccccgaggccgaccccggcagcgccgccccctacctgaagaccaagttcatctgcgtgacccccaccacctgcagcaacaccatcgacctgcccatgagccccagaaccctggacagcctgatgcagttcggcaacaacggcgagggcgccgagcccagcgccggcggccagttcgagagcctgaccttcgacatggagctgaccagcgagtgcgccaccagccccatgtag

SEQ ID NO: 12900 - DNA, 2310 bp, synthetic construct
  misc_feature 1..2310: note = Description of Artificial Sequence: Synthetic coding sequence
  source 1..2310: mol_type = other DNA
atggcccagtggaaccagctgcagcagctggacaccagatacctggagcagctgcaccagctgtacagcgacagcttccccatggagctgagacagttcctggccccctggatcgagagccaggactgggcctacgccgccagcaaggagagccacgccaccctggtgttccacaacctgctgggcgagatcgaccagcagtacagcagattcctgcaggagagcaacgtgctgtaccagcacaacctgagaagaatcaagcagttcctgcagagcagatacctggagaagcccatggagatcgccagaatcgtggccagatgcctgtgggaggagagcagactgctgcagaccgccgccaccgccgcccagcagggcggccaggccaaccaccccaccgccgccgtggtgaccgagaagcagcagatgctggagcagcacctgcaggacgtgagaaagagagtgcaggacctggagcagaagatgaaggtggtggagaacctgcaggacgacttcgacttcaactacaagaccctgaagagccagggcgacatgcaggacctgaacggcaacaaccagagcgtgaccagacagaagatgcagcagctggagcagatgctgaccgccctggaccagatgagaagaagcatcgtgagcgagctggccggcctgctgagcgccatggagtacgtgcagaagaccctgaccgacgaggagctggccgactggaagagaagacagcagatcgcctgcatcggcggcccccccaacatctgcctggacagactggagaactggatcaccagcctggccgagagccagctgcagaccagacagcagatcaagaagctggaggagctgcagcagaaggtgagctacaagggcgaccccatcgtgcagcacagacccatgctggaggagagaatcgtggagctgttcagaaacctgatgaagagcgccttcgtggtggagagacagccctgcatgcccatgcaccccgacagacccctggtgatcaagaccggcgtgcagttcaccaccaaggtgagactgctggtgaagttccccgagctgaactaccagctgaagatcaaggtgtgcatcgacaaggacagcggcgacgtggccgccctgagaggcagcagaaagttcaacatcctgggcaccaacaccaaggtgatgaacatggaggagagcaacaacggcagcctgagcgccgagttcaagcacctgaccctgagagagcagagatgcggcaacggcggcagagccaactgcgacgccagcctgatcgtgaccgaggagctgcacctgatcaccttcgagaccgaggtgtaccaccagggcctgaagatcgacctggagacccacagcctgcccgtggtggtgatcagcaacatctgccagatgcccaacgcctgggccagcatcctgtggtacaacatgctgaccaacaaccccaagaacgtgaacttcttcaccaagccccccatcggcacctgggaccaggtggccgaggtgctgagctggcagttcagcagcaccaccaagagaggcctgagcatcgagcagctgaccaccctggccgagaagctgctgggccccggcgtgaactacagcggctgccagatcacctgggccaagttctgcaaggagaacatggccggcaagggcttcagcttctgggtgtggctggacaacatcatcgacctggtgaagaagtacatcctggccctgtggaacgagggctacatcatgggcttcatcagcaaggagagagagagagccatcctgagcaccaagccccccggcaccttcctgctgagattcagcgagagcagcaaggagggcggcgtgaccttcacctgggtggagaaggacatcagcggcaagacccagatccagagcgtggagccctacaccaagcagcagctgaacaacatgagcttcgccgagatcatcatgggctacaagatcatggacgccaccaacatcctggtgagccccctggtgtacctgtaccccgacatccccaaggaggaggccttcggcaagtactgcagacccgagagccaggagcaccccgaggccgaccccggcgccgccccctacctgaagaccaagttcatctgcgtgacccccaccacctgcagcaacaccatcgacctgcccatgagccccagaaccctggacagcctgatgcagttcggcaacaacggcgagggcgccgagcccagcgccggcggccagttcgagagcctgaccttcgacatggagctgaccagcgagtgcgccaccagccccatgtag

SEQ ID NO: 12901 - DNA, 2169 bp, synthetic construct
  misc_feature 1..2169: note = Description of Artificial Sequence: Synthetic coding sequence
  source 1..2169: mol_type = other DNA
atggcccagtggaaccagctgcagcagctggacaccagatacctggagcagctgcaccagctgtacagcgacagcttccccatggagctgagacagttcctggccccctggatcgagagccaggactgggcctacgccgccagcaaggagagccacgccaccctggtgttccacaacctgctgggcgagatcgaccagcagtacagcagattcctgcaggagagcaacgtgctgtaccagcacaacctgagaagaatcaagcagttcctgcagagcagatacctggagaagcccatggagatcgccagaatcgtggccagatgcctgtgggaggagagcagactgctgcagaccgccgccaccgccgcccagcagggcggccaggccaaccaccccaccgccgccgtggtgaccgagaagcagcagatgctggagcagcacctgcaggacgtgagaaagagagtgcaggacctggagcagaagatgaaggtggtggagaacctgcaggacgacttcgacttcaactacaagaccctgaagagccagggcgacatgcaggacctgaacggcaacaaccagagcgtgaccagacagaagatgcagcagctggagcagatgctgaccgccctggaccagatgagaagaagcatcgtgagcgagctggccggcctgctgagcgccatggagtacgtgcagaagaccctgaccgacgaggagctggccgactggaagagaagacagcagatcgcctgcatcggcggcccccccaacatctgcctggacagactggagaactggatcaccagcctggccgagagccagctgcagaccagacagcagatcaagaagctggaggagctgcagcagaaggtgagctacaagggcgaccccatcgtgcagcacagacccatgctggaggagagaatcgtggagctgttcagaaacctgatgaagagcgccttcgtggtggagagacagccctgcatgcccatgcaccccgacagacccctggtgatcaagaccggcgtgcagttcaccaccaaggtgagactgctggtgaagttccccgagctgaactaccagctgaagatcaaggtgtgcatcgacaaggacagcggcgacgtggccgccctgagaggcagcagaaagttcaacatcctgggcaccaacaccaaggtgatgaacatggaggagagcaacaacggcagcctgagcgccgagttcaagcacctgaccctgagagagcagagatgcggcaacggcggcagagccaactgcgacgccagcctgatcgtgaccgaggagctgcacctgatcaccttcgagaccgaggtgtaccaccagggcctgaagatcgacctggagacccacagcctgcccgtggtggtgatcagcaacatctgccagatgcccaacgcctgggccagcatcctgtggtacaacatgctgaccaacaaccccaagaacgtgaacttcttcaccaagccccccatcggcacctgggaccaggtggccgaggtgctgagctggcagttcagcagcaccaccaagagaggcctgagcatcgagcagctgaccaccctggccgagaagctgctgggccccggcgtgaactacagcggctgccagatcacctgggccaagttctgcaaggagaacatggccggcaagggcttcagcttctgggtgtggctggacaacatcatcgacctggtgaagaagtacatcctggccctgtggaacgagggctacatcatgggcttcatcagcaaggagagagagagagccatcctgagcaccaagccccccggcaccttcctgctgagattcagcgagagcagcaaggagggcggcgtgaccttcacctgggtggagaaggacatcagcggcaagacccagatccagagcgtggagccctacaccaagcagcagctgaacaacatgagcttcgccgagatcatcatgggctacaagatcatggacgccaccaacatcctggtgagccccctggtgtacctgtaccccgacatccccaaggaggaggccttcggcaagtactgcagacccgagagccaggagcaccccgaggccgaccccggcagcgccgccccctacctgaagaccaagttcatctgcgtgacccccttcatcgacgccgtgtggaagtag

SEQ ID NO: 12902 - DNA, 2247 bp, synthetic construct
  misc_feature 1..2247: note = Description of Artificial Sequence: Synthetic coding sequence
  source 1..2247: mol_type = other DNA
atgagccagtggaaccaggtgcagcagctggagatcaagttcctggagcaggtggaccagttctacgacgacaacttccccatggagatcagacacctgctggcccagtggatcgagaaccaggactgggaggccgccagcaacaacgagaccatggccaccatcctgctgcagaacctgctgatccagctggacgagcagctgggcagagtgagcaaggagaagaacctgctgctgatccacaacctgaagagaatcagaaaggtgctgcagggcaagttccacggcaaccccatgcacgtggccgtggtgatcagcaactgcctgagagaggagagaagaatcctggccgccgccaacatgcccgtgcagggccccctggagaagagcctgcagagcagcagcgtgagcgagagacagagaaacgtggagcacaaggtggccgccatcaagaacagcgtgcagatgaccgagcaggacaccaagtacctggaggacctgcaggacgagttcgactacagatacaagaccatccagaccatggaccagagcgacaagaacagcgccatggtgaaccaggaggtgctgaccctgcaggagatgctgaacagcctggacttcaagagaaaggaggccctgagcaagatgacccagatcatccacgagaccgacctgctgatgaacaccatgctgatcgaggagctgcaggactggaagagaagacagcagatcgcctgcatcggcggccccctgcacaacggcctggaccagctgcagaactgcttcaccctgctggccgagagcctgttccagctgagaagacagctggagaagctggaggagcagagcaccaagatgacctacgagggcgaccccatccccatgcagagaacccacatgctggagagagtgaccttcctgatctacaacctgttcaagaacagcttcgtggtggagagacagccctgcatgcccacccacccccagagacccctggtgctgaagaccctgatccagttcaccgtgaagctgagactgctgatcaagctgcccgagctgaactaccaggtgaaggtgaaggccagcatcgacaagaacgtgagcaccctgagcaacagaagattcgtgctgtgcggcaccaacgtgaaggccatgagcatcgaggagagcagcaacggcagcctgagcgtggagttcagacacctgcagcccaaggagatgaagagcagcgccggcggcaagggcaacgagggctgccacatggtgaccgaggagctgcacagcatcaccttcgagacccagatctgcctgtacggcctgaccatcgacctggagaccagcagcctgcccgtggtgatgatcagcaacgtgagccagctgcccaacgcctgggccagcatcatctggtacaacgtgagcaccaacgacagccagaacctggtgttcttcaacaaccccccccccgccaccctgagccagctgctggaggtgatgagctggcagttcagcagctacgtgggcagaggcctgaacagcgaccagctgcacatgctggccgagaagctgaccgtgcagagcagctacagcgacggccacctgacctgggccaagttctgcaaggagcacctgcccggcaagagcttcaccttctggacctggctggaggccatcctggacctgatcaagaagcacatcctgcccctgtggatcgacggctacgtgatgggcttcgtgagcaaggagaaggagagactgctgctgaaggacaagatgcccggcaccttcctgctgagattcagcgagagccacctgggcggcatcaccttcacctgggtggaccacagcgagagcggcgaggtgagattccacagcgtggagccctacaacaagggcagactgagcgccctgcccttcgccgacatcctgagagactacaaggtgatcatggccgagaacatccccgagaaccccctgaagtacctgtaccccgacatccccaaggacaaggccttcggcaagcactacagcagccagccctgcgaggtgagcagacccaccgagagaggcgacaagggctacgtgcccagcgtgttcatccccatcagcaccatcagaagcgacagcaccgagccccacagccccagcgacctgctgcccatgagccccagcgtgtacgccgtgctgagagagaacctgagccccaccaccatcgagaccgccatgaagagcccctacagcgccgagtag

SEQ ID NO: 12903 - DNA, 2247 bp, synthetic construct; identical to SEQ ID NO: 12902
  misc_feature 1..2247: note = Description of Artificial Sequence: Synthetic coding sequence
  source 1..2247: mol_type = other DNA

SEQ ID NO: 12904 - DNA, 354 bp, synthetic construct
  misc_feature 1..354: note = Description of Artificial Sequence: Synthetic coding sequence
  source 1..354: mol_type = other DNA
atgagccagtggaaccaggtgcagcagctggagatcaagttcctggagcaggtggaccagttctacgacgacaacttccccatggagatcagacacctgctggcccagtggatcgagaaccaggactgggaggccgccagcaacaacgagaccatggccaccatcctgctgcagaacctgctgatccagctggacgagcagctgggcagagtgagcaaggagaagaacctgctgctgatccacaacctgaagagaatcagaaaggtgctgcagagccccggcctggccaccgcccagctgcccctggacagacacggcgagacctgcatccagagaagcaagagctgcccctag

SEQ ID NO: 12905 - DNA, 78 bp, synthetic construct
  misc_feature 1..78: note = Description of Artificial Sequence: Synthetic coding sequence
  source 1..78: mol_type = other DNA
atgagccagtggaaccaggtgcagcagctggagatcaagttcctggagcaggtggaccagttctacgacgacaactag

SEQ ID NO: 12906 - DNA, 240 bp, synthetic construct
  misc_feature 1..240: note = Description of Artificial Sequence: Synthetic coding sequence
  source 1..240: mol_type = other DNA
atgagccagtggaaccaggtgcagcagctggagatcaagttcctggagcaggtggaccagttctacgacgacaacttccccatggagatcagacacctgctggcccagtggatcgagaaccaggactgggaggccgccagcaacaacgagaccatggccaccatcctgctgcagaacctgctgatccagctggacgagcagctgggcagagtgagcaaggagaagaacctgctgctgtag

SEQ ID NO: 12907 - DNA, 2385 bp, synthetic construct
  misc_feature 1..2385: note = Description of Artificial Sequence: Synthetic coding sequence
  source 1..2385: mol_type = other DNA
atggccggctggatccaggcccagcagctgcagggcgacgccctgagacagatgcaggtgctgtacggccagcacttccccatcgaggtgagacactacctggcccagtggatcgagagccagccctgggacgccatcgacctggacaacccccaggacagagcccaggccacccagctgctggagggcctggtgcaggagctgcagaagaaggccgagcaccaggtgggcgaggacggcttcctgctgaagatcaagctgggccactacgccacccagctgcagaagacctacgacagatgccccctggagctggtgagatgcatcagacacatcctgtacaacgagcagagactggtgagagaggccaacaactgcagcagccccgccggcatcctggtggacgccatgagccagaagcacctgcagatcaaccagaccttcgaggagctgagactggtgacccaggacaccgagaacgagctgaagaagctgcagcagacccaggagtacttcatcatccagtaccaggagagcctgagaatccaggcccagttcgcccagctggcccagctgagcccccaggagagactgagcagagagaccgccctgcagcagaagcaggtgagcctggaggcctggctgcagagagaggcccagaccctgcagcagtacagagtggagctggccgagaagcaccagaagaccctgcagctgctgagaaagcagcagaccatcatcctggacgacgagctgatccagtggaagagaagacagcagctggccggcaacggcggcccccccgagggcagcctggacgtgctgcagagctggtgcgagaagctggccgagatcatctggcagaacagacagcagatcagaagagccgagcacctgtgccagcagctgcccatccccggccccgtggaggagatgctggccgaggtgaacgccaccatcaccgacatcatcagcgccctggtgaccagcaccttcatcatcgagaagcagcccccccaggtgctgaagacccagaccaagttcgccgccaccgtgagactgctggtgggcggcaagctgaacgtgcacatgaaccccccccaggtgaaggccaccatcatcagcgagcagcaggccaagagcctgctgaagaacgagaacaccagaaacgagtgcagcggcgagatcctgaacaactgctgcgtgatggagtaccaccaggccaccggcaccctgagcgcccacttcagaaacatgagcctgaagagaatcaagagagccgacagaagaggcgccgagagcgtgaccgaggagaagttcaccgtgctgttcgagagccagttcagcgtgggcagcaacgagctggtgttccaggtgaagaccctgagcctgcccgtggtggtgatcgtgcacggcagccaggaccacaacgccaccgccaccgtgctgtgggacaacgccttcgccgagcccggcagagtgcccttcgccgtgcccgacaaggtgctgtggccccagctgtgcgaggccctgaacatgaagttcaaggccgaggtgcagagcaacagaggcctgaccaaggagaacctggtgttcctggcccagaagctgttcaacaacagcagcagccacctggaggactacagcggcctgagcgtgagctggagccagttcaacagagagaacctgcccggctggaactacaccttctggcagtggttcgacggcgtgatggaggtgctgaagaagcaccacaagccccactggaacgacggcgccatcctgggcttcgtgaacaagcagcaggcccacgacctgctgatcaacaagcccgacggcaccttcctgctgagattcagcgacagcgagatcggcggcatcaccatcgcctggaagttcgacagccccgagagaaacctgtggaacctgaagcccttcaccaccagagacttcagcatcagaagcctggccgacagactgggcgacctgagctacctgatctacgtgttccccgacagacccaaggacgaggtgttcagcaagtactacacccccgtgctggccaaggccgtggacggctacgtgaagccccagatcaagcaggtggtgcccgagttcgtgaacgccagcgccgacgccggcggcagcagcgccacctacatggaccaggcccccagccccgccgtgtgcccccaggccccctacaacatgtacccccagaaccccgaccacgtgctggaccaggacggcgagttcgacctggacgagaccatggacgtggccagacacgtggaggagctgctgagaagacccatggacagcctggacagcagactgagcccccccgccggcctgttcaccagcgccagaggcagcctgagctag

SEQ ID NO: 12908 - DNA, 378 bp, synthetic construct
  misc_feature 1..378: note = Description of Artificial Sequence: Synthetic coding sequence
  source 1..378: mol_type = other DNA
atggccggctggatccaggcccagcagctgcagggcgacgccctgagacagatgcaggtgctgtacggccagcacttccccatcgaggtgagacactacctggcccagtggatcgagagccagccctgggacgccatcgacctggacaacccccaggacagagcccaggccacccagctgctggagggcctggtgcaggagctgcagaagaaggccgagcaccaggtgggcgaggacggcttcctgctgaagatcaagctgggccactacgccacccagctgcagaagacctacgacagatgccccctggagctggtgagatgcatcagacacatcctgtacaacgagcagagactggtgagagaggccaacaactag

SEQ ID NO: 12909 - DNA, 2376 bp, synthetic construct
  misc_feature 1..2376: note = Description of Artificial Sequence: Synthetic coding sequence
  source 1..2376: mol_type = other DNA
atggccggctggatccaggcccagcagctgcagggcgacgccctgagacagatgcaggtgctgtacggccagcacttccccatcgaggtgagacactacctggcccagtggatcgagagccagccctgggacgccatcgacctggacaacccccaggacagagcccaggccacccagctgctggagggcctggtgcaggagctgcagaagaaggccgagcaccaggtgggcgaggacggcttcctgctgaagatcaagctgggccactacgccacccagctgcagaagacctacgacagatgccccctggagctggtgagatgcatcagacacatcctgtacaacgagcagagactggtgagagaggccaacaactgcagcagccccgccggcatcctggtggacgccatgagccagaagcacctgcagatcaaccagaccttcgaggagctgagactggtgacccaggacaccgagaacgagctgaagaagctgcagcagacccaggagtacttcatcatccagtaccaggagagcctgagaatccaggcccagttcgcccagctggcccagctgagcccccaggagagactgagcagagagaccgccctgcagcagaagcaggtgagcctggaggcctggctgcagagagaggcccagaccctgcagcagtacagagtggagctggccgagaagcaccagaagaccctgcagctgctgagaaagcagcagaccatcatcctggacgacgagctgatccagtggaagagaagacagcagctggccggcaacggcggcccccccgagggcagcctggacgtgctgcagagctggtgcgagaagctggccgagatcatctggcagaacagacagcagatcagaagagccgagcacctgtgccagcagctgcccatccccggccccgtggaggagatgctggccgaggtgaacgccaccatcaccgacatcatcagcgccctggtgaccagcaccttcatcatcgagaagcagcccccccaggtgctgaagacccagaccaagttcgccgccaccgtgagactgctggtgggcggcaagctgaacgtgcacatgaaccccccccaggtgaaggccaccatcatcagcgagcagcaggccaagagcctgctgaagaacgagaacaccagaaacgagtgcagcggcgagatcctgaacaactgctgcgtgatggagtaccaccaggccaccggcaccctgagcgcccacttcagaaacatgagcctgaagagaatcaagagagccgacagaagaggcgccgagagcgtgaccgaggagaagttcaccgtgctgttcgagagccagttcagcgtgggcagcaacgagctggtgttccaggtgaagaccctgagcctgcccgtggtggtgatcgtgcacggcagccaggaccacaacgccaccgccaccgtgctgtgggacaacgccttcgccgagcccggcagagtgcccttcgccgtgcccgacaaggtgctgtggccccagctgtgcgaggccctgaacatgaagttcaaggccgaggtgcagagcaacagaggcctgaccaaggagaacctggtgttcctggcccagaagctgttcaacaacagcagcagccacctggaggactacagcggcctgagcgtgagctggagccagttcaacagagagaacctgcccggctggaactacaccttctggcagtggttcgacggcgtgatggaggtgctgaagaagcaccacaagccccactggaacgacggcggcttcgtgaacaagcagcaggcccacgacctgctgatcaacaagcccgacggcaccttcctgctgagattcagcgacagcgagatcggcggcatcaccatcgcctggaagttcgacagccccgagagaaacctgtggaacctgaagcccttcaccaccagagacttcagcatcagaagcctggccgacagactgggcgacctgagctacctgatctacgtgttccccgacagacccaaggacgaggtgttcagcaagtactacacccccgtgctggccaaggccgtggacggctacgtgaagccccagatcaagcaggtggtgcccgagttcgtgaacgccagcgccgacgccggcggcagcagcgccacctacatggaccaggcccccagccccgccgtgtgcccccaggccccctacaacatgtacccccagaaccccgaccacgtgctggaccaggacggcgagttcgacctggacgagaccatggacgtggccagacacgtggaggagctgctgagaagacccatggacagcctggacagcagactgagcccccccgccggcctgttcaccagcgccagaggcagcctgagctag

SEQ ID NO: 12910 - DNA, 2298 bp, synthetic construct
  misc_feature 1..2298: note = Description of Artificial Sequence: Synthetic coding sequence
  source 1..2298: mol_type = other DNA
accgccatggccggctggatccaggcccagcagctgcagggcgacgccctgagacagatgcaggtgctgtacggccagcacttccccatcgaggtgagacactacctggcccagtggatcgagagccagccctgggacgccatcgacctggacaacccccaggacagagcccaggccacccagctgctggagggcctggtgcaggagctgcagaagaaggccgagcaccaggtgggcgaggacggcttcctgctgaagatcaagctgggccactacgccacccagctgcagaagacctacgacagatgccccctggagctggtgagatgcatcagacacatcctgtacaacgagcagagactggtgagagaggccaacaactgcagcagccccgccggcatcctggtggacgccatgagccagaagcacctgcagatcaaccagaccttcgaggagctgagactggtgacccaggacaccgagaacgagctgaagaagctgcagcagacccaggagtacttcatcatccagtaccaggagagcctgagaatccaggcccagttcgcccagctggcccagctgagcccccaggagagactgagcagagagaccgccctgcagcagaagcaggtgagcctggaggcctggctgcagagagaggcccagaccctgcagcagtacagagtggagctggccgagaagcaccagaagaccctgcagctgctgagaaagcagcagaccatcatcctggacgacgagctgatccagtggaagagaagacagcagctggccggcaacggcggcccccccgagggcagcctggacgtgctgcagagctggtgcgagaagctggccgagatcatctggcagaacagacagcagatcagaagagccgagcacctgtgccagcagctgcccatccccggccccgtggaggagatgctggccgaggtgaacgccaccatcaccgacatcatcagcgccctggtgaccagcaccttcatcatcgagaagcagcccccccaggtgctgaagacccagaccaagttcgccgccaccgtgagactgctggtgggcggcaagctgaacgtgcacatgaaccccccccaggtgaaggccaccatcatcagcgagcagcaggccaagagcctgctgaagaacgagaacaccagaaacgagtgcagcggcgagatcctgaacaactgctgcgtgatggagtaccaccaggccaccggcaccctgagcgcccacttcagaaacatgagcctgaagagaatcaagagagccgacagaagaggcgccgagagcgtgaccgaggagaagttcaccgtgctgttcgagagccagttcagcgtgggcagcaacgagctggtgttccaggtgaagggcagagtgcccttcgccgtgcccgacaaggtgctgtggccccagctgtgcgaggccctgaacatgaagttcaaggccgaggtgcagagcaacagaggcctgaccaaggagaacctggtgttcctggcccagaagctgttcaacaacagcagcagccacctggaggactacagcggcctgagcgtgagctggagccagttcaacagagagaacctgcccggctggaactacaccttctggcagtggttcgacggcgtgatggaggtgctgaagaagcaccacaagccccactggaacgacggcgccatcctgggcttcgtgaacaagcagcaggcccacgacctgctgatcaacaagcccgacggcaccttcctgctgagattcagcgacagcgagatcggcggcatcaccatcgcctggaagttcgacagccccgagagaaacctgtggaacctgaagcccttcaccaccagagacttcagcatcagaagcctggccgacagactgggcgacctgagctacctgatctacgtgttccccgacagacccaaggacgaggtgttcagcaagtactacacccccgtgctggccaaggccgtggacggctacgtgaagccccagatcaagcaggtggtgcccgagttcgtgaacgccagcgccgacgccggcggcagcagcgccacctacatggaccaggcccccagccccgccgtgtgcccccaggccccctacaacatgtacccccagaaccccgaccacgtgctggaccaggacggcgagttcgacctggacgagaccatggacgtggccagacacgtggaggagctgctgagaagacccatggacagcctggacagcagactgagcccccccgccggcctgttcaccagcgccagaggcagcctgagctag

SEQ ID NO: 12911 - DNA, 2295 bp, synthetic construct
  misc_feature 1..2295: note = Description of Artificial Sequence: Synthetic coding sequence
  source 1..2295: mol_type = other DNA
atggccggctggatccaggcccagcagctgcagggcgacgccctgagacagatgcaggtgctgtacggccagcacttccccatcgaggtgagacactacctggcccagtggatcgagagccagccctgggacgccatcgacctggacaacccccaggacagagcccaggccacccagctgctggagggcctggtgcaggagctgcagaagaaggccgagcaccaggtgggcgaggacggcttcctgctgaagatcaagctgggccactacgccacccagctgcagtgcagcagccccgccggcatcctggtggacgccatgagccagaagcacctgcagatcaaccagaccttcgaggagctgagactggtgacccaggacaccgagaacgagctgaagaagctgcagcagacccaggagtacttcatcatccagtaccaggagagcctgagaatccaggcccagttcgcccagctggcccagctgagcccccaggagagactgagcagagagaccgccctgcagcagaagcaggtgagcctggaggcctggctgcagagagaggcccagaccctgcagcagtacagagtggagctggccgagaagcaccagaagaccctgcagctgctgagaaagcagcagaccatcatcctggacgacgagctgatccagtggaagagaagacagcagctggccggcaacggcggcccccccgagggcagcctggacgtgctgcagagctggtgcgagaagctggccgagatcatctggcagaacagacagcagatcagaagagccgagcacctgtgccagcagctgcccatccccggccccgtggaggagatgctggccgaggtgaacgccaccatcaccgacatcatcagcgccctggtgaccagcaccttcatcatcgagaagcagcccccccaggtgctgaagacccagaccaagttcgccgccaccgtgagactgctggtgggcggcaagctgaacgtgcacatgaaccccccccaggtgaaggccaccatcatcagcgagcagcaggccaagagcctgctgaagaacgagaacaccagaaacgagtgcagcggcgagatcctgaacaactgctgcgtgatggagtaccaccaggccaccggcaccctgagcgcccacttcagaaacatgagcctgaagagaatcaagagagccgacagaagaggcgccgagagcgtgaccgaggagaagttcaccgtgctgttcgagagccagttcagcgtgggcagcaacgagctggtgttccaggtgaagaccctgagcctgcccgtggtggtgatcgtgcacggcagccaggaccacaacgccaccgccaccgtgctgtgggacaacgccttcgccgagcccggcagagtgcccttcgccgtgcccgacaaggtgctgtggccccagctgtgcgaggccctgaacatgaagttcaaggccgaggtgcagagcaacagaggcctgaccaaggagaacctggtgttcctggcccagaagctgttcaacaacagcagcagccacctggaggactacagcggcctgagcgtgagctggagccagttcaacagagagaacctgcccggctggaactacaccttctggcagtggttcgacggcgtgatggaggtgctgaagaagcaccacaagccccactggaacgacggcgccatcctgggcttcgtgaacaagcagcaggcccacgacctgctgatcaacaagcccgacggcaccttcctgctgagattcagcgacagcgagatcggcggcatcaccatcgcctggaagttcgacagccccgagagaaacctgtggaacctgaagcccttcaccaccagagacttcagcatcagaagcctggccgacagactgggcgacctgagctacctgatctacgtgttccccgacagacccaaggacgaggtgttcagcaagtactacacccccgtgctggccaaggccgtggacggctacgtgaagccccagatcaagcaggtggtgcccgagttcgtgaacgccagcgccgacgccggcggcagcagcgccacctacatggaccaggcccccagccccgccgtgtgcccccaggccccctacaacatgtacccccagaaccccgaccacgtgctggaccaggacggcgagttcgacctggacgagaccatggacgtggccagacacgtggaggagctgctgagaagacccatggacagcctggacagcagactgagcccccccgccggcctgttcaccagcgccagaggcagcctgagctag

SEQ ID NO: 12912 - DNA, 2295 bp, synthetic construct; identical to SEQ ID NO: 12911
  misc_feature 1..2295: note = Description of Artificial Sequence: Synthetic coding sequence
  source 1..2295: mol_type = other DNA

SEQ ID NO: 12913 - DNA, 2364 bp, synthetic construct
  misc_feature 1..2364: note = Description of Artificial Sequence: Synthetic coding sequence
  source 1..2364: mol_type = other DNA
atggccgtgtggatccaggcccagcagctgcagggcgaggccctgcaccagatgcaggccctgtacggccagcacttccccatcgaggtgagacactacctgagccagtggatcgagagccaggcctgggacagcgtggacctggacaacccccaggagaacatcaaggccacccagctgctggagggcctggtgcaggagctgcagaagaaggccgagcaccaggtgggcgaggacggcttcctgctgaagatcaagctgggccactacgccacccagctgcagaacacctacgacagatgccccatggagctggtgagatgcatcagacacatcctgtacaacgagcagagactggtgagagaggccaacaacggcagcagccccgccggcagcctggccgacgccatgagccagaagcacctgcagatcaaccagaccttcgaggagctgagactggtgacccaggacaccgagaacgagctgaagaagctgcagcagacccaggagtacttcatcatccagtaccaggagagcctgagaatccaggcccagttcggccccctggcccagctgagcccccaggagagactgagcagagagaccgccctgcagcagaagcaggtgagcctggaggcctggctgcagagagaggcccagaccctgcagcagtacagagtggagctggccgagaagcaccagaagaccctgcagctgctgagaaagcagcagaccatcatcctggacgacgagctgatccagtggaagagaagacagcagctggccggcaacggcggcccccccgagggcagcctggacgtgctgcagagctggtgcgagaagctggccgagatcatctggcagaacagacagcagatcagaagagccgagcacctgtgccagcagctgcccatccccggccccgtggaggagatgctggccgaggtgaacgccaccatcaccgacatcatcagcgccctggtgaccagcaccttcatcatcgagaagcagcccccccaggtgctgaagacccagaccaagttcgccgccaccgtgagactgctggtgggcggcaagctgaacgtgcacatgaaccccccccaggtgaaggccaccatcatcagcgagcagcaggccaagagcctgctgaagaacgagaacaccagaaacgactacagcggcgagatcctgaacaactgctgcgtgatggagtaccaccaggccaccggcaccctgagcgcccacttcagaaacatgagcctgaagagaatcaagagaagcgacagaagaggcgccgagagcgtgaccgaggagaagttcaccatcctgttcgagagccagttcagcgtgggcggcaacgagctggtgttccaggtgaagaccctgagcctgcccgtggtggtgatcgtgcacggcagccaggacaacaacgccaccgccaccgtgctgtgggacaacgccttcgccgagcccggcagagtgcccttcgccgtgcccgacaaggtgctgtggccccagctgtgcgaggccctgaacatgaagttcaaggccgaggtgcagagcaacagaggcctgaccaaggagaacctggtgttcctggcccagaagctgttcaacaacagcagcagccacctggaggactacagcggcctgagcgtgagctggagccagttcaacagagagaacctgcccggcagaaactacaccttctggcagtggttcgacggcgtgatggaggtgctgaagaagcacctgaagccccactggaacgacggcgccatcctgggcttcgtgaacaagcagcaggcccacgacctgctgatcaacaagcccgacggcaccttcctgctgagattcagcgacagcgagatcggcggcatcaccatcgcctggaagttcgacagccaggagagaatgttctggaacctgatgcccttcaccaccagagacttcagcatcagaagcctggccgacagactgggcgacctgaactacctgatctacgtgttccccgacagacccaaggacgaggtgtacagcaagtactacacccccgtgccctgcgagagcgccaccgccaaggccgtggacggctacgtgaagccccagatcaagcaggtggtgcccgagttcgtgaacgccagcgccgacgccggcggcggcagcgccacctacatggaccaggcccccagccccgccgtgtgcccccaggcccactacaacatgtacccccagaaccccgacagcgtgctggacaccgacggcgacttcgacctggaggacaccatggacgtggccagaagagtggaggagctgctgggcagacccatggacagccagtggatcccccacgcccagagctag

SEQ ID NO: 12914 - DNA, 471 bp, synthetic construct
  misc_feature 1..471: note = Description of Artificial Sequence: Synthetic coding sequence
  source 1..471: mol_type = other DNA
atggccgtgtggatccaggcccagcagctgcagggcgaggccctgcaccagatgcaggccctgtacggccagcacttccccatcgaggtgagacactacctgagccagtggatcgagagccaggcctgggacagcgtggacctggacaacccccaggagaacatcaaggccacccagctgctggagggcctggtgcaggagctgcagaagaaggccgagcaccaggtgggcgaggacggcttcctgctgaagatcaagctgggccactacgccacccagctgcagaacacctacgacagatgccccatggagctggtgagatgcatcagacacatcctgtacaacgagcagagactggtgagagaggccaacaacggcagcagccccgccggcagcctggccgacgccatgagccagaagcacctgcagatcaaccagaccttcgaggagctgagactggtgacccagtag

SEQ ID NO: 12915 - DNA, 534 bp, synthetic construct
  misc_feature 1..534: note = Description of Artificial Sequence: Synthetic coding sequence
  source 1..534: mol_type = other DNA
atgccccaggccttcctgctgggcagcatccacgagcccgccggcgccctgatggagccccagccctgccccggcagcctggccgagagcttcctggaggaggagctgagactgaacgccgagctgagccagctgcagttcagcgagcccgtgggcatcatctacaaccccgtggagtacgcctgggagccccacagaaactacgtgaccagatactgccagggccccaaggaggtgctgttcctgggcatgaaccccggccccttcggcatggcccagaccggcgtgcccttcggcgaggtgagcatggtgagagactggctgggcatcgtgggccccgtgctgacccccccccaggagcaccccaagagacccgtgctgggcctggagtgcccccagagcgagggccccagacagagcatgggccacgagatcaagagcgagctgctgatgggcggctgcagctggatcagaggcaagatccagtgcgacagagtgcaggtgagaagacccggcttcagcagccagctgtag

SEQ ID NO: 12916 - DNA, 813 bp, synthetic construct
  misc_feature 1..813: note = Description of Artificial Sequence: Synthetic coding sequence
  source 1..813: mol_type = other DNA
atgccccaggccttcctgctgggcagcatccacgagcccgccggcgccctgatggagccccagccctgccccggcagcctggccgagagcttcctggaggaggagctgagactgaacgccgagctgagccagctgcagttcagcgagcccgtgggcatcatctacaaccccgtggagtacgcctgggagccccacagaaactacgtgaccagatactgccagggccccaaggaggtgctgttcctgggcatgaaccccggccccttcggcatggcccagaccggcgtgcccttcggcgaggtgagcatggtgagagactggctgggcatcgtgggccccgtgctgacccccccccaggagcaccccaagagacccgtgctgggcctggagtgcccccagagcgaggtgagcggcgccagattctggggcttcttcagaaacctgtgcggccagcccgaggtgttcttccaccactgcttcgtgcacaacctgtgccccctgctgttcctggcccccagcggcagaaacctgacccccgccgagctgcccgccaagcagagagagcagctgctgggcatctgcgacgccgccctgtgcagacaggtgcagctgctgggcgtgagactggtggtgggcgtgggcagactggccgagcagagagccagaagagccctggccggcctgatgcccgaggtgcaggtggagggcctgctgcaccccagccccagaaacccccaggccaacaagggctgggaggccgtggccaaggagagactgaacgagctgggcctgctgcccctgctgctgaagtag

SEQ ID NO: 12917 - DNA, 813 bp, synthetic construct; identical to SEQ ID NO: 12916
  misc_feature 1..813: note = Description of Artificial Sequence: Synthetic coding sequence
  source 1..813: mol_type = other DNA

SEQ ID NO: 12918 - DNA, 249 bp, synthetic construct
  misc_feature 1..249: note = Description of Artificial Sequence: Synthetic coding sequence
  source 1..249: mol_type = other DNA
atgccccaggccttcctgctgggcagcatccacgagcccgccggcgccctgatggagccccagccctgccccggcagcctggccgagagcttcctggaggaggagctgagactgaacgccgagctgagccagctgcagttcagcgagcccgtgggcatcatctacaaccccgtggagtacgcctgggagccccacagaaactacgtgaccagatactgccagggccccaaggaggtgctgttcctgtag

SEQ ID NO: 12919 - DNA, 519 bp, synthetic construct
  misc_feature 1..519: note = Description of Artificial Sequence: Synthetic coding sequence
  source 1..519: mol_type = other DNA
atgccccaggccttcctgctgggcagcatccacgagcccgccggcgccctgatggagccccagccctgccccggcagcctggccgagagcttcctggaggaggagctgagactgaacgccgagctgagccagctgcagttcagcgagcccgtgggcatcatctacaaccccgtggagtacgcctgggagccccacagaaactacgtgaccagatactgccagggccccaaggaggtgctgttcctgggcatgaaccccggccccttcggcatggcccagaccggcgtgcccttcggcgaggtgagcatggtgagagactggctgggcatcgtgggccccgtgctgacccccccccaggagcaccccaagagacccgtgctgggcctggagtgcccccagagcgaggtgagcggcgccagattctggggcttcttcagaaacctgtgcggccagcccgaggtgttcttccaccactgcttcgtgcacaacctgtgccccctgctgttcctggccccctag

SEQ ID NO: 12920 - DNA, 291 bp, synthetic construct
  misc_feature 1..291: note = Description of Artificial Sequence: Synthetic coding sequence
  source 1..291: mol_type = other DNA
atgccccaggccttcctgctgggcagcatccacgagcccgccggcgccctgatggagccccagccctgccccggcagcctggccgagagcttcctggaggaggagctgagactgaacgccgagctgagccagctgcagttcagcgagcccgtgggcatcatctacaaccccgtggagtacgcctgggagccccacagaaactacgtgaccagatactgccagggccccaaggaggtgctgttcctgggcatgaaccccggccccttcggcatggcccagaccggcgtgtag

SEQ ID NO: 12921 - DNA, 273 bp, synthetic construct
  misc_feature 1..273: note = Description of Artificial Sequence: Synthetic coding sequence
  source 1..273: mol_type = other DNA
atgccccaggccttcctgctgggcagcatccacgagcccgccggcgccctgatggagccccagccctgccccggcagcctggccgagagcttcctggaggaggagctgagactgaacgccgagctgagccagctgcagttcagcgagcccgtgggcatcatctacaaccccgtggagtacgcctgggagccccacagaaactacgtgaccagatactgccagggccccaaggaggtgctgttcctgggcatgaaccccggccccttcggctag

SEQ ID NO: 12922 - DNA, 534 bp, synthetic construct; identical to SEQ ID NO: 12915
  misc_feature 1..534: note = Description of Artificial Sequence: Synthetic coding sequence
  source 1..534: mol_type = other DNA

SEQ ID NO: 12923 - DNA, 327 bp, synthetic construct
  misc_feature 1..327: note = Description of Artificial Sequence: Synthetic coding sequence
  source 1..327: mol_type = other DNA
atgccccaggccttcctgctgggcagcatccacgagcccgccggcgccctgatggagccccagccctgccccggcagcctggccgagagcttcctggaggaggagctgagactgaacgccgagctgagccagctgcagttcagcgagcccgtgggcatcatctacaaccccgtggagtacgcctgggagccccacagaaactacgtgaccagatactgccagggccccaaggaggtgctgttcctgggcatgaaccccggccccttcggcatggcccagaccggcgtgcccttcggcgaggtgagcatggtgagagactggctgtag

SEQ ID NO: 12924 - DNA, 813 bp, synthetic construct; identical to SEQ ID NO: 12916
  misc_feature 1..813: note = Description of Artificial Sequence: Synthetic coding sequence
  source 1..813: mol_type = other DNA

SEQ ID NO: 12925 - DNA, 534 bp, synthetic construct; identical to SEQ ID NO: 12915
  misc_feature 1..534: note = Description of Artificial Sequence: Synthetic coding sequence
  source 1..534: mol_type = other DNA

SEQ ID NO: 12926 - DNA, 534 bp, synthetic construct; identical to SEQ ID NO: 12915
  misc_feature 1..534: note = Description of Artificial Sequence: Synthetic coding sequence
  source 1..534: mol_type = other DNA

SEQ ID NO: 12927 - DNA, 1170 bp, synthetic construct
  misc_feature 1..1170: note = Description of Artificial Sequence: Synthetic coding sequence
  source 1..1170: mol_type = other DNA
atggccgagcccgaccccagccaccccctggagacccaggccggcaaggtgcaggaggcccaggacagcgacagcgacagcgagggcggcgccgccggcggcgaggccgacatggacttcctgagaaacctgttcagccagaccctgagcctgggcagccagaaggagagactgctggacgagctgaccctggagggcgtggccagatacatgcagagcgagagatgcagaagagtgatctgcctggtgggcgccggcatcagcaccagcgccggcatccccgacttcagaagccccagcaccggcctgtacgacaacctggagaagtaccacctgccctaccccgaggccatcttcgagatcagctacttcaagaagcaccccgagcccttcttcgccctggccaaggagctgtaccccggccagttcaagcccaccatctgccactacttcatgagactgctgaaggacaagggcctgctgctgagatgctacacccagaacatcgacaccctggagagaatcgccggcctggagcaggaggacctggtggaggcccacggcaccttctacaccagccactgcgtgagcgccagctgcagacacgagtaccccctgagctggatgaaggagaagatcttcagcgaggtgacccccaagtgcgaggactgccagagcctggtgaagcccgacatcgtgttcttcggcgagagcctgcccgccagattcttcagctgcatgcagagcgacttcctgaaggtggacctgctgctggtgatgggcaccagcctgcaggtgcagcccttcgccagcctgatcagcaaggcccccctgagcacccccagactgctgatcaacaaggagaaggccggccagagcgaccccttcctgggcatgatcatgggcctgggcggcggcatggacttcgacagcaagaaggcctacagagacgtggcctggctgggcgagtgcgaccagggctgcctggccctggccgagctgctgggctggaagaaggagctggaggacctggtgagaagagagcacgccagcatcgacgcccagagcggcgccggcgtgcccaaccccagcaccagcgccagccccaagaagagccccccccccgccaaggacgaggccagaaccaccgagagagagaagccccagtag

SEQ ID NO: 12928 - DNA, 816 bp, synthetic construct
  misc_feature 1..816: note = Description of Artificial Sequence: Synthetic coding sequence
  source 1..816: mol_type = other DNA
atggccgagcccgaccccagccaccccctggagacccaggccggcaaggtgcaggaggcccaggacagcgacagcgacagcgagggcggcgccgccggcggcgaggccgacatggacttcctgagaaacctgttcagccagaccctgagcctgggcagccagaaggagagactgctggacgagctgaccctggagggcgtggccagatacatgcagagcgagagatgcagaagagtgatctgcctggtgggcgccggcatcagcaccagcgccggcatccccgacttcagaagccccagcaccggcctgtacgacaacctggagaagtaccacctgccctaccccgaggccatcttcgagatcagctacttcaagaagcaccccgagcccttcttcgccctggccaaggagctgtaccccggccagttcaagcccaccatctgccactacttcatgagactgctgaaggacaagggcctgctgctgagatgctacacccagaacatcgacaccctggagagaatcgccggcctggagcaggaggacctggtggaggcccacggcaccttctacaccagccactgcgtgagcgccagctgcagacacgagtaccccctgagctggatgaaggagaagatcttcagcgaggtgacccccaagtgcgaggactgccagagcctggtgaagcccgacatcgtgttcttcggcgagagcctgcccgccagattcttcagctgcatgcagagcgacttcctgaaggtggacctgctgctggtgatgggcaccagcctgcagggcagaggcctggccggctag

SEQ ID NO: 12929 - DNA, 393 bp, synthetic construct
  misc_feature 1..393: note = Description of Artificial Sequence: Synthetic coding sequence
  source 1..393: mol_type = other DNA
atggacttcctgagaaacctgttcagccagaccctgagcctgggcagccagaaggagagactgctggacgagctgaccctggagggcgtggccagatacatgcagagcgagagatgcagaagagtgatctgcctggtgggcgccggcatcagcaccagcgccggcatccccgacttcagaagccccagcaccggcctgtacgacaacctggagaagtaccacctgccctaccccgaggccatcttcgagatcagctacttcaagaagcaccccgagcccttcttcgccctggccaaggagctgtaccccggccagttcaagcccaccatctgccactacttcatgagactgctgaaggacaagggcctgctgctgagatgctacacccagtag

SEQ ID NO: 12930 - DNA, 1059 bp, synthetic construct
  misc_feature 1..1059: note = Description of Artificial Sequence: Synthetic coding sequence
  source 1..1059: mol_type = other DNA
atggacttcctgagaaacctgttcagccagaccctgagcctgggcagccagaaggagagactgctggacgagctgaccctggagggcgtggccagatacatgcagagcgagagatgcagaagagtgatctgcctggtgggcgccggcatcagcaccagcgccggcatccccgacttcagaagccccagcaccggcctgtacgacaacctggagaagtaccacctgccctaccccgaggccatcttcgagatcagctacttcaagaagcaccccgagcccttcttcgccctggccaaggagctgtaccccggccagttcaagcccaccatctgccactacttcatgagactgctgaaggacaagggcctgctgctgagatgctacacccagaacatcgacaccctggagagaatcgccggcctggagcaggaggacctggtggaggcccacggcaccttctacaccagccactgcgtgagcgccagctgcagacacgagtaccccctgagctggatgaaggagaagatcttcagcgaggtgacccccaagtgcgaggactgccagagcctggtgaagcccgacatcgtgttcttcggcgagagcctgcccgccagattcttcagctgcatgcagagcgacttcctgaaggtggacctgctgctggtgatgggcaccagcctgcaggtgcagcccttcgccagcctgatcagcaaggcccccctgagcacccccagactgctgatcaacaaggagaaggccggccagagcgaccccttcctgggcatgatcatgggcctgggcggcggcatggacttcgacagcaagaaggcctacagagacgtggcctggctgggcgagtgcgaccagggctgcctggccctggccgagctgctgggctggaagaaggagctggaggacctggtgagaagagagcacgccagcatcgacgcccagagcggcgccggcgtgcccaaccccagcaccagcgccagccccaagaagagccccccccccgccaaggacgaggccagaaccaccgagagagagaagccccagtag

SEQ ID NO: 12931 - DNA, 510 bp, synthetic construct
  misc_feature 1..510: note = Description of Artificial Sequence: Synthetic coding sequence
  source 1..510: mol_type = other DNA
atggacttcctgagaaacctgttcagccagaccctgagcctgggcagccagaaggagagactgctggacgagctgaccctggagggcgtggccagatacatgcagagcgagagatgcagaagagtgatctgcctggtgggcgccggcatcagcaccagcgccggcatccccgacttcagaagccccagcaccggcctgtacgacaacctggagaagtaccacctgccctaccccgaggccatcttcgagatcagctacttcaagaagcaccccgagcccttcttcgccctggccaaggagctgtaccccggccagttcaagcccaccatctgccactacttcatgagactgctgaaggacaagggcctgctgctgagatgctacacccagaacatcgacaccctggagagaatcgccggcctggagcaggaggacctggtggaggcccacggcaccttctacaccagccactgcgtgagcgccagctgcagacacgagtaccccctgtag

SEQ ID NO: 12932 - DNA, 714 bp, synthetic construct
  misc_feature 1..714: note = Description of Artificial Sequence: Synthetic coding sequence
  source 1..714: mol_type = other DNA
atggacttcctgagaaacctgttcagccagaccctgagcctgggcagccagaaggagagactgctggacgagctgaccctggagggcgtggccagatacatgcagagcgagagatgcagaagagtgatctgcctggtgggcgccggcatcagcaccagcgccggcatccccgacttcagaagccccagcaccggcctgtacgacaacctggagaagtaccacctgccctaccccgaggccatcttcgagatcagctacttcaagaagcaccccgagcccttcttcgccctggccaaggagctgtaccccggccagttcaagcccaccatctgccactacttcatgagactgctgaaggacaagggcctgctgctgagatgctacacccagaacatcgacaccctggagagaatcgccggcctggagcaggaggacctggtggaggcccacggcaccttctacaccagccactgcgtgagcgccagctgcagacacgagtaccccctgagctggatgaaggagaagatcttcagcgaggtgacccccaagtgcgaggactgccagagcctggtgaagcccgacatcgtgttcttcggcgagagcctgcccgccagattcttcagctgcatgcagagcgacttcctgaaggtggacctgctgctggtgatgggcaccagcctgcaggtgcagcccttcgccagcctgatcagctag

SEQ ID NO: 12933 - DNA, 237 bp, synthetic construct
  misc_feature 1..237: note = Description of Artificial Sequence: Synthetic coding sequence
  source 1..237: mol_type = other DNA
atggacttcctgagaaacctgttcagccagaccctgagcctgggcagccagaaggagagactgctggacgagctgaccctggagggcgtggccagatacatgcagagcgagagatgcagaagagtgatctgcctggtgggcgccggcatcagcaccagcgccggcatccccgacttcagaagccccagcaccggcctgtacgacaacctggagaagtaccacctgccctacccctag

SEQ ID NO: 12934 - DNA, 222 bp, synthetic construct
  misc_feature 1..222: note = Description of Artificial Sequence: Synthetic coding sequence
  source 1..222: mol_type = other DNA
atggacttcctgagaaacctgttcagccagaccctgagcctgggcagccagaaggagagactgctggacgagctgaccctggagggcgtggccagatacatgcagagcgagagatgcagaagagtgatctgcctggtgggcgccggcatcagcaccagcgccggcatccccgacttcagaagccccagcaccggcctgtacgacaacctggagaagtactag

SEQ ID NO: 12935 - DNA, 1170 bp, synthetic construct
  misc_feature 1..1170: note = Description of Artificial Sequence: Synthetic coding sequence
  source 1..1170: mol_type = other DNA
atgagcgacgaggccgaggacagcgacagcgacagcgagggcggcgccgccggcggcgaggccgacatggacttcctgagaaacctgttcagccagaccctgagcctgggcagccagaaggagagactgctggacgagctgaccctggagggcgtggccagatacatgcagagcgagagatgcagaagagtgatctgcctggtgggcgccggcatcagcaccagcgccggcatccccgacttcagaagccccagcaccggcctgtacgacaacctggagaagtaccacctgccctaccccgaggccatcttcgagatcagctacttcaagaagcaccccgagcccttcttcgccctggccaaggagctgtaccccggccagttcaagcccaccatctgccactacttcatgagactgctgaaggacaagggcctgctgctgagatgctacacccagaacatcgacaccctggagagaatcgccggcctggagcaggaggacctggtggaggcccacggcaccttctacaccagccactgcgtgagcgccagctgcagacacgagtaccccctgagctggatgaaggagaagatcttcagcgaggtgacccccaagtgcgaggactgccagagcctggtgaagcccgacatcgtgttcttcggcgagagcctgcccgccagattcttcagctgcatgcagagcgacttcctgaaggtggacctgctgctggtgatgggcaccagcctgcaggtgcagcccttcgccagcctgatcagcaaggcccccctgagcacccccagactgctgatcaacaaggagaaggccggccagagcgaccccttcctgggcatgatcatgggcctgggcggcggcatggacttcgacagcaagaaggcctacagagacgtggcctggctgggcgagtgcgaccagggctgcctggccctggccgagctgctgggctggaagaaggagctggaggacctggtgagaagagagcacgccagcatcgacgcccagggcggcggcggcccccagccccagcacttcagcttcccccaggaggtgcccgccacctgccagggcagaggccaggacaacagagagggcgagacccccgtgaccgccgccagccccagaagagacgccgagctgctgagagacagctag

SEQ ID NO: 12936 - DNA, 1227 bp, synthetic construct
  misc_feature 1..1227: note = Description of Artificial Sequence: Synthetic coding sequence
  source 1..1227: mol_type = other DNA
atggccgagaacggcgacaacgagaagatggccgccctggaggccaagatctgccaccagatcgagtactacttcggcgacttcaacctgcccagagacaagttcctgaaggagcagatcaagctggacgagggctgggtgcccctggagatcatgatcaagttcaacagactgaacagactgaccaccgacttcaacgtgatcgtggaggccctgagcaagagcaaggccgagctgatggagatcagcgaggacaagaccaagatcagaagaagccccagcaagcccctgcccgaggtgaccgacgagtacaagaacgacgtgaagaacagaagcgtgtacatcaagggcttccccaccgacgccaccctggacgacatcaaggagtggctggaggacaagggccaggtgctgaacatccagatgagaagaaccctgcacaaggccttcaagggcagcatcttcgtggtgttcgacagcatcgagagcgccaagaagttcgtggagacccccggccagaagtacaaggagaccgacctgctgatcctgttcaaggacgactacttcgccaagaagaacgaggagagaaagcagaacaaggtggaggccaagctgagagccaagcaggagcaggaggccaagcagaagctggaggaggacgccgagatgaagagcctggaggagaagatcggctgcctgctgaagttcagcggcgacctggacgaccagacctgcagagaggacctgcacatcctgttcagcaaccacggcgagatcaagtggatcgacttcgtgagaggcgccaaggagggcatcatcctgttcaaggagaaggccaaggaggccctgggcaaggccaaggacgccaacaacggcaacctgcagctgagaaacaaggaggtgacctgggaggtgctggagggcgaggtggagaaggaggccctgaagaagatcatcgaggaccagcaggagagcctgaacaagtggaagagcaagggcagaagattcaagggcaagggcaagggcaacaaggccgcccagcccggcagcggcaagggcaaggtgcagttccagggcaagaagaccaagttcgccagcgacgacgagcacgacgagcacgacgagaacggcgccaccggccccgtgaagagagccagagaggagaccgacaaggaggagcccgccagcaagcagcagaagaccgagaacggcgccggcgaccagtag

SEQ ID NO: 12937 - DNA, 1086 bp, synthetic construct
  misc_feature 1..1086: note = Description of Artificial Sequence: Synthetic coding sequence
  source 1..1086: mol_type = other DNA
atggccgagaacggcgacaacgagaagatggccgccctggaggccaagatctgccaccagatcgagtactacttcggcgacttcaacctgcccagagacaagttcctgaaggagcagatcaagctggacgagggctgggtgcccctggagatcatgatcaagttcaacagactgaacagactgaccaccgacttcaacgtgatcgtggaggccctgagcaagagcaaggccgagctgatggagatcagcgaggacaagaccaagatcagaagaagccccagcaagcccctgcccgaggtgaccgacgagtacaagaacgacgtgaagaacagaagcgtgtacatcaagggcttccccaccgacgccaccctggacgacatcaaggagtggctggaggacaagggccaggtgctgaacatccagatgagaagaaccctgcacaaggccttcaagggcagcatcttcgtggtgttcgacagcatcgagagcgccaagaagttcgtggagacccccggccagaagtacaaggagaccgacctgctgatcctgttcaaggacgactacttcgccaagaagaacgaggagagaaagcagaacaaggtggaggccaagctgagagccaagcaggagcaggaggccaagcagaagctggaggaggacgccgagatgaagagcctggaggagaagatcggctgcctgctgaagttcagcggcgacctggacgaccagacctgcagagaggacctgcacatcctgttcagcaaccacggcgagatcaagtggatcgacttcgtgagaggcgccaaggagggcatcatcctgttcaaggagaaggccaaggaggccctgggcaaggccaaggacgccaacaacggcaacctgcagctgagaaacaaggaggtgacctgggaggtgctggagggcgaggtggagaaggaggccctgaagaagatcatcgaggaccagcaggagagcctgaacaagtggaagagcaagggccccgtgaagagagccagagaggagaccgacaaggaggagcccgccagcaagcagcagaagaccgagaacggcgccggcgaccagtag

SEQ ID NO: 12938 - DNA, 1227 bp, synthetic construct; identical to SEQ ID NO: 12936
  misc_feature 1..1227: note = Description of Artificial Sequence: Synthetic coding sequence
  source 1..1227: mol_type = other DNA

SEQ ID NO: 12939 - DNA, 405 bp, synthetic construct
  misc_feature 1..405: note = Description of Artificial Sequence: Synthetic coding sequence
  source 1..405: mol_type = other DNA
atggccgagaacggcgacaacgagaagatggccgccctggaggccaagatctgccaccagatcgagtactacttcggcgacttcaacctgcccagagacaagttcctgaaggagcagatcaagctggacgagggctgggtgcccctggagatcatgatcaagttcaacagactgaacagactgaccaccgacttcaacgtgatcgtggaggccctgagcaagagcaaggccgagctgatggagatcagcgaggacaagaccaagatcagaagaagccccagcaagcccctgcccgaggtgaccgacgagtacaagaacgacgtgaagaacagaagcgtgtacatcagccaccccgtggcccacgtgggcgtgcagtggtgcgaccacggccccctgcagagctag

SEQ ID NO: 12940 - DNA, 363 bp, synthetic construct
  misc_feature 1..363: note = Description of Artificial Sequence: Synthetic coding sequence
  source 1..363: mol_type = other DNA
atgatcaagttcaacagactgaacagactgaccaccgacttcaacgtgatcgtggaggccctgagcaagagcaaggccgagctgatggagatcagcgaggacaagaccaagatcagaagaagccccagcaagcccctgcccgaggtgaccgacgagtacaagaacgacgtgaagaacagaagcgtgtacatcaagggcttccccaccgacgccaccctggacgacatcaaggagtggctggaggacaagggccaggtgctgaacatccagatgagaagaaccctgcacaaggccttcaagggcagcatcttcgtggtgttcgacagcatcgagagcgccaagaagttcgtggagaccccctag

SEQ ID NO: 12941 - DNA, 555 bp, synthetic construct
  misc_feature 1..555: note = Description of Artificial Sequence: Synthetic coding sequence
  source 1..555: mol_type = other DNA
atggccgagaacggcgacaacgagaagatggccgccctggaggccaagatctgccaccagatcgagtactacttcggcgacttcaacctgcccagagacaagttcctgaaggagcagatcaagctggacgagggctgggtgcccctggagatcatgatcaagttcaacagactgaacagactgaccaccgacttcaacgtgatcgtggaggccctgagcaagagcaaggccgagctgatggagatcagcgaggacaagaccaagatcagaagaagccccagcaagcccctgcccgaggtgaccgacgagtacaagaacgacgtgaagaacagaagcgtgtacatcaagggcttccccaccgacgccaccctggacgacatcaaggagtggctggaggacaagggccaggtgctgaacatccagatgagaagaaccctgcacaaggccttcaagggcagcatcttcgtggtgttcgacagcatcgagagcgccaagaagttcgtggagacccccggccagaagtacaaggagaccgacctgctgatcctgttctag

SEQ ID NO: 12942 - DNA, 252 bp, synthetic construct
  misc_feature 1..252: note = Description of Artificial Sequence: Synthetic coding sequence
  source 1..252: mol_type = other DNA
atgagaagaaccctgcacaaggccttcaagggcagcatcttcgtggtgttcgacagcatcgagagcgccaagaagttcgtggagacccccggccagaagtacaaggagaccgacctgctgatcctgttcaaggacgactacttcgccaagaagaacgaggagagaaagcagaacaaggtggaggccaagctgagagccaagcaggagcaggaggccaagcagaagctggaggaggacgccgagatgaagtag

SEQ ID NO: 12943 - DNA, 5505 bp, synthetic construct
  misc_feature 1..5505: note = Description of Artificial Sequence: Synthetic coding sequence
  source 1..5505: mol_type = other DNA
atgaagctgagcgtgaacgaggcccagctgggcttctacctgggcagcctgagccacctgagcgcctgccccggcatcgaccccagaagcagcgaggaccagcccgagagcctgaagaccggccagatgatggacgagagcgacgaggacttcaaggagctgtgcgccagcttcttccagagagtgaagaagcacggcatcaaggaggtgagcggcgagagaaagacccagaaggccgccagcaacggcacccagatcagaagcaagctgaagagaaccaagcagaccgccaccaagaccaagaccctgcagggccccgccgagaagaagccccccagcggcagccaggcccccagaaccaagaagcagagagtgaccaagtggcaggccagcgagcccgcccacagcgtgaacggcgagggcggcgtgctggccagcgcccccgacccccccgtgctgagagagaccgcccagaacacccagaccggcaaccagcaggagcccagccccaacctgagcagagagaagaccagagagaacgtgcccaacagcgacagccagcccccccccagctgcctgaccaccgccgtgcccagccccagcaagcccagaaccgcccagctggtgctgcagagaatgcagcagttcaagagagccgaccccgagagactgagacacgccagcgaggagtgcagcctggaggccgccagagaggagaacgtgcccaaggacccccaggaggagatgatggccggcaacgtgtacggcctgggcccccccgcccccgagagcgacgccgccgtggccctgaccctgcagcaggagttcgccagagtgggcgccagcgcccacgacgacagcctggaggagaagggcctgttcttctgccagatctgccagaagaacctgagcgccatgaacgtgaccagaagagagcagcacgtgaacagatgcctggacgaggccgagaagaccctgagacccagcgtgccccagatccccgagtgccccatctgcggcaagcccttcctgaccctgaagagcagaaccagccacctgaagcagtgcgccgtgaagatggaggtgggcccccagctgctgctgcaggccgtgagactgcagaccgcccagcccgagggcagcagcagcccccccatgttcagcttcagcgaccacagcagaggcctgaagagaagaggccccaccagcaagaaggagcccagaaagagaagaaaggtggacgaggcccccagcgaggacctgctggtggccatggccctgagcagaagcgagatggagcccggcgccgccgtgcccgccctgagactggagagcgccttcagcgagagaatcagacccgaggccgagaacaagagcagaaagaagaagccccccgtgagcccccccctgctgctggtgcaggacagcgagaccaccggcagacagatcgaggacagagtggccctgctgctgagcgaggaggtggagctgagcagcaccccccccctgcccgccagcagaatcctgaaggagggctgggagagagccggccagtgcccccccccccccgagagaaagcagagcttcctgtgggagggcagcgccctgaccggcgcctgggccatggaggacttctacaccgccagactggtgccccccctggtgccccagagacccgcccagggcctgatgcaggagcccgtgccccccctggtgccccccgagcacagcgagctgagcgagagaagaagccccgccctgcacggcacccccaccgccggctgcggcagcagaggccccagccccagcgccagccagagagagcaccaggccctgcaggacctggtggacctggccagagagggcctgagcgccagcccctggcccggcagcggcggcctggccggcagcgagggcaccgccggcctggacgtggtgcccggcggcctgcccctgaccggcttcgtggtgcccagccaggacaagcaccccgacagaggcggcagaaccctgctgagcctgggcctgctggtggccgacttcggcgccatggtgaacaacccccacctgagcgacgtgcagttccagaccgacagcggcgaggtgctgtacgcccacaagttcgtgctgtacgccagatgccccctgctgatccagtacgtgaacaacgagggcttcagcgccgtggaggacggcgtgctgacccagagagtgctgctgggcgacgtgagcaccgaggccgccagaaccttcctgcactacctgtacaccgccgacaccggcctgccccccggcctgagcagcgagctgagcagcctggcccacagattcggcgtgagcgagctggtgcacctgtgcgagcaggtgcccatcgccaccgacagcgagggcaagccctgggaggagaaggaggccgagaactgcgagagcagagccgagaacttccaggagctgctgagaagcatgtgggccgacgaggaggaggaggccgagaccctgctgaagagcaaggaccacgaggaggaccaggagaacgtgaacgaggccgagatggaggagatctacgagttcgccgccacccagagaaagctgctgcaggaggagagagccgccggcgccggcgaggacgccgactggctggagggcggcagccccgtgagcggccagctgctggccggcgtgcaggtgcagaagcagtgggacaaggtggaggagatggagcccctggagcccggcagagacgaggccgccaccacctgggagaagatgggccagtgcgccctgccccccccccagggccagcacagcggcgccagaggcgccgaggcccccgagcaggaggcccccgaggaggccctgggccacagcagctgcagcagccccagcagagactgccaggccgagagaaaggagggcagcctgccccacagcgacgacgccggcgactacgagcagctgttcagcagcacccagggcgagatcagcgagcccagccagatcaccagcgagcccgaggagcagagcggcgccgtgagagagagaggcctggaggtgagccacagactggccccctggcaggccagccccccccacccctgcagattcctgctgggccccccccagggcggcagccccagaggcagccaccacaccagcggcagcagcctgagcacccccagaagcagaggcggcaccagccaggtgggcagccccaccctgctgagccccgccgtgcccagcaagcagaagagagacagaagcatcctgaccctgagcaaggagcccggccaccagaagggcaaggagagaagaagcgtgctggagtgcagaaacaagggcgtgctgatgttccccgagaagagccccagcatcgacctgacccagagcaaccccgaccacagcagcagcagaagccagaagagcagcagcaagctgaacgaggaggacgaggtgatcctgctgctggacagcgacgaggagctggagctggagcagaccaagatgaagagcatcagcagcgaccccctggaggagaagaaggccctggagatcagccccagaagctgcgagctgttcagcatcatcgacgtggacgccgaccaggagcccagccagagcccccccagaagcgaggccgtgctgcagcaggaggacgagggcgccctgcccgagaacagaggcagcctgggcagaagaggcgccccctggctgttctgcgacagagagagcagccccagcgaggccagcaccaccgacaccagctggctggtgcccgccacccccctggccagcagaagcagagactgcagcagccagacccagatcagcagcctgagaagcggcctggccgtgcaggccgtgacccagcacacccccagagccagcgtgggcaacagagagggcaacgaggtggcccagaagttcagcgtgatcagaccccagaccccccccccccagacccccagcagctgcctgacccccgtgagccccggcaccagcgacggcagaagacagggccacagaagccccagcagaccccaccccggcggccacccccacagcagccccctggccccccaccccatcagcggcgacagagcccacttcagcagaagattcctgaagcacagcccccccggccccagcttcctgaaccagacccccgccggcgaggtggtggaggtgggcgacagcgacgacgagcaggaggtggccagccaccaggccaacagaagcccccccctggacagcgacccccccatccccatcgacgactgctgctggcacatggagcccctgagccccatccccatcgaccactggaacctggagagaaccggccccctgagcaccagcagccccagcagaagaatgaacgaggccgccgacagcagagactgcagaagccccggcctgctggacaccacccccatcagaggcagctgcaccacccagagaaagctgcaggagaagagcagcggcgccggcagcctgggcaacagcagacccagcttcctgaacagcgccctgtgggacgtgtgggacggcgaggagcagagaccccccgagacccccccccccgcccagatgcccagcgccggcggcgcccagaagcccgagggcctggagacccccaagggcgccaacagaaagaagaacctgccccccaaggtgcccatcacccccatgccccagtacagcatcatggagacccccgtgctgaagaaggagctggacagattcggcgtgagacccctgcccaagagacagatggtgctgaagctgaaggagatcttccagtacacccaccagaccctggacagcgacagcgaggacgagagccagagcagccagcccctgctgcaggccccccactgccagaccctggccagccagacctacaagcccagcagagccggcgtgcacgcccagcaggaggccaccaccggccccggcgcccacagacccaagggccccgccaagaccaagggccccagacaccagagaaagcaccacgagagcatcaccccccccagcagaagccccaccaaggaggccccccccggcctgaacgacgacgcccagatccccgccagccaggagagcgtggccaccagcgtggacggcagcgacagcagcctgagcagccagagcagcagcagctgcgagttcggcgccgccttcgagagcgccggcgaggaggagggcgagggcgaggtgagcgccagccaggccgccgtgcaggccgccgacaccgacgaggccctgagatgctacatcagaagcaagcccgccctgtaccagaaggtgctgctgtaccagcccttcgagctgagagagctgcaggccgagctgagacagaacggcctgagagtgagcagcagaagactgctggacttcctggacacccactgcatcaccttcaccaccgccgccaccagaagagagaagctgcagggcagaagaagacagcccagaggcaagaagaaggtggagagaaactag

SEQ ID NO: 12944 - DNA, 1404 bp, synthetic construct
  misc_feature 1..1404: note = Description of Artificial Sequence: Synthetic coding sequence
  source 1..1404: mol_type = other DNA
atgagcagcatcctgcccttcaccccccccgtggtgaagagactgctgggctggaagaagagcgccggcggcagcggcggcgccggcggcggcgagcagaacggccaggaggagaagtggtgcgagaaggccgtgaagagcctggtgaagaagctgaagaagaccggcagactggacgagctggagaaggccatcaccacccagaactgcaacaccaagtgcgtgaccatccccagcacctgcagcgagatctggggcctgagcacccccaacaccatcgaccagtgggacaccaccggcctgtacagcttcagcgagcagaccagaagcctggacggcagactgcaggtgagccacagaaagggcctgccccacgtgatctactgcagactgtggagatggcccgacctgcacagccaccacgagctgaaggccatcgagaactgcgagtacgccttcaacctgaagaaggacgaggtgtgcgtgaacccctaccactaccagagagtggagacccccgtgctgccccccgtgctggtgcccagacacaccgagatcctgaccgagctgccccccctggacgactacacccacagcatccccgagaacaccaacttccccgccggcatcgagccccagagcaactacatccccgagacccccccccccggctacatcagcgaggacggcgagaccagcgaccagcagctgaaccagagcatggacaccggcagccccgccgagctgagccccaccaccctgagccccgtgaaccacagcctggacctgcagcccgtgacctacagcgagcccgccttctggtgcagcatcgcctactacgagctgaaccagagagtgggcgagaccttccacgccagccagcccagcctgaccgtggacggcttcaccgaccccagcaacagcgagagattctgcctgggcctgctgagcaacgtgaacagaaacgccaccgtggagatgaccagaagacacatcggcagaggcgtgagactgtactacatcggcggcgaggtgttcgccgagtgcctgagcgacagcgccatcttcgtgcagagccccaactgcaaccagagatacggctggcaccccgccaccgtgtgcaagatcccccccggctgcaacctgaagatcttcaacaaccaggagttcgccgccctgctggcccagagcgtgaaccagggcttcgaggccgtgtaccagctgaccagaatgtgcaccatcagaatgagcttcgtgaagggctggggcgccgagtacagaagacagaccgtgaccagcaccccctgctggatcgagctgcacctgaacggccccctgcagtggctggacaaggtgctgacccagatgggcagccccagcgtgagatgcagcagcatgagctag

SEQ ID NO: 12945 - DNA, 1314 bp, synthetic construct
  misc_feature 1..1314: note = Description of Artificial Sequence: Synthetic coding sequence
  source 1..1314: mol_type = other DNA
atgagcagcatcctgcccttcaccccccccgtggtgaagagactgctgggctggaagaagagcgccggcggcagcggcggcgccggcggcggcgagcagaacggccaggaggagaagtggtgcgagaaggccgtgaagagcctggtgaagaagctgaagaagaccggcagactggacgagctggagaaggccatcaccacccagaactgcaacaccaagtgcgtgaccatccccagaagcctggacggcagactgcaggtgagccacagaaagggcctgccccacgtgatctactgcagactgtggagatggcccgacctgcacagccaccacgagctgaaggccatcgagaactgcgagtacgccttcaacctgaagaaggacgaggtgtgcgtgaacccctaccactaccagagagtggagacccccgtgctgccccccgtgctggtgcccagacacaccgagatcctgaccgagctgccccccctggacgactacacccacagcatccccgagaacaccaacttccccgccggcatcgagccccagagcaactacatccccgagacccccccccccggctacatcagcgaggacggcgagaccagcgaccagcagctgaaccagagcatggacaccggcagccccgccgagctgagccccaccaccctgagccccgtgaaccacagcctggacctgcagcccgtgacctacagcgagcccgccttctggtgcagcatcgcctactacgagctgaaccagagagtgggcgagaccttccacgccagccagcccagcctgaccgtggacggcttcaccgaccccagcaacagcgagagattctgcctgggcctgctgagcaacgtgaacagaaacgccaccgtggagatgaccagaagacacatcggcagaggcgtgagactgtactacatcggcggcgaggtgttcgccgagtgcctgagcgacagcgccatcttcgtgcagagccccaactgcaaccagagatacggctggcaccccgccaccgtgtgcaagatcccccccggctgcaacctgaagatcttcaacaaccaggagttcgccgccctgctggcccagagcgtgaaccagggcttcgaggccgtgtaccagctgaccagaatgtgcaccatcagaatgagcttcgtgaagggctggggcgccgagtacagaagacagaccgtgaccagcaccccctgctggatcgagctgcacctgaacggccccctgcagtggctggacaaggtgctgacccagatgggcagccccagcgtgagatgcagcagcatgagctag

SEQ ID NO: 12946 - DNA, 1404 bp, synthetic construct; identical to SEQ ID NO: 12944
  misc_feature 1..1404: note = Description of Artificial Sequence: Synthetic coding sequence
  source 1..1404: mol_type = other DNA

SEQ ID NO: 12947 - DNA, 1278 bp, synthetic construct
  misc_feature 1..1278: note = Description of Artificial Sequence: Synthetic coding sequence
  source 1..1278: mol_type = other DNA
atgagcagcatcctgcccttcaccccccccatcgtgaagagactgctgggctggaagaagggcgagcagaacggccaggaggagaagtggtgcgagaaggccgtgaagagcctggtgaagaagctgaagaagaccggccagctggacgagctggagaaggccatcaccacccagaacgtgaacaccaagtgcatcaccatccccagaagcctggacggcagactgcaggtgagccacagaaagggcctgccccacgtgatctactgcagactgtggagatggcccgacctgcacagccaccacgagctgagagccatggagctgtgcgagttcgccttcaacatgaagaaggacgaggtgtgcgtgaacccctaccactaccagagagtggagacccccgtgctgccccccgtgctggtgcccagacacaccgagatccccgccgagttcccccccctggacgactacagccacagcatccccgagaacaccaacttccccgccggcatcgagccccagagcaacatccccgagacccccccccccggctacctgagcgaggacggcgagaccagcgaccaccagatgaaccacagcatggacgccggcagccccaacctgagccccaaccccatgagccccgcccacaacaacctggacctgcagcccgtgacctactgcgagcccgccttctggtgcagcatcagctactacgagctgaaccagagagtgggcgagaccttccacgccagccagcccagcatgaccgtggacggcttcaccgaccccagcaacagcgagagattctgcctgggcctgctgagcaacgtgaacagaaacgccgccgtggagctgaccagaagacacatcggcagaggcgtgagactgtactacatcggcggcgaggtgttcgccgagtgcctgagcgacagcgccatcttcgtgcagagccccaactgcaaccagagatacggctggcaccccgccaccgtgtgcaagatcccccccggctgcaacctgaagatcttcaacaaccaggagttcgccgccctgctggcccagagcgtgaaccagggcttcgaggccgtgtaccagctgaccagaatgtgcaccatcagaatgagcttcgtgaagggctggggcgccgagtacagaagacagaccgtgaccagcaccccctgctggatcgagctgcacctgaacggccccctgcagtggctggacaaggtgctgacccagatgggcagccccagcatcagatgcagcagcgtgagctag

SEQ ID NO: 12948 - DNA, 1146 bp, synthetic construct
  misc_feature 1..1146: note = Description of Artificial Sequence: Synthetic coding sequence
  source 1..1146: mol_type = other DNA
atgagctgcctgcaccccagacagacctggaagggcgccgccctggtgcacagaaaggcctggtggatgggcagaagcctggacggcagactgcaggtgagccacagaaagggcctgccccacgtgatctactgcagactgtggagatggcccgacctgcacagccaccacgagctgagagccatggagctgtgcgagttcgccttcaacatgaagaaggacgaggtgtgcgtgaacccctaccactaccagagagtggagacccccgtgctgccccccgtgctggtgcccagacacaccgagatccccgccgagttcccccccctggacgactacagccacagcatccccgagaacaccaacttccccgccggcatcgagccccagagcaacatccccgagacccccccccccggctacctgagcgaggacggcgagaccagcgaccaccagatgaaccacagcatggacgccggcagccccaacctgagccccaaccccatgagccccgcccacaacaacctggacctgcagcccgtgacctactgcgagcccgccttctggtgcagcatcagctactacgagctgaaccagagagtgggcgagaccttccacgccagccagcccagcatgaccgtggacggcttcaccgaccccagcaacagcgagagattctgcctgggcctgctgagcaacgtgaacagaaacgccgccgtggagctgaccagaagacacatcggcagaggcgtgagactgtactacatcggcggcgaggtgttcgccgagtgcctgagcgacagcgccatcttcgtgcagagccccaactgcaaccagagatacggctggcaccccgccaccgtgtgcaagatcccccccggctgcaacctgaagatcttcaacaaccaggagttcgccgccctgctggcccagagcgtgaaccagggcttcgaggccgtgtaccagctgaccagaatgtgcaccatcagaatgagcttcgtgaagggctggggcgccgagtacagaagacagaccgtgaccagcaccccctgctggatcgagctgcacctgaacggccccctgcagtggctggacaaggtgctgacccagatgggcagccccagcatcagatgcagcagcgtgagctag

SEQ ID NO: 12949 - DNA, 1278 bp, synthetic construct; identical to SEQ ID NO: 12947
  misc_feature 1..1278: note = Description of Artificial Sequence: Synthetic coding sequence
  source 1..1278: mol_type = other DNA

SEQ ID NO: 12950 - DNA, 693 bp, synthetic construct
  misc_feature 1..693: note = Description of Artificial Sequence: Synthetic coding sequence
  source 1..693: mol_type = other DNA
atgaaccacagcatggacgccggcagccccaacctgagccccaaccccatgagccccgcccacaacaacctggacctgcagcccgtgacctactgcgagcccgccttctggtgcagcatcagctactacgagctgaaccagagagtgggcgagaccttccacgccagccagcccagcatgaccgtggacggcttcaccgaccccagcaacagcgagagattctgcctgggcctgctgagcaacgtgaacagaaacgccgccgtggagctgaccagaagacacatcggcagaggcgtgagactgtactacatcggcggcgaggtgttcgccgagtgcctgagcgacagcgccatcttcgtgcagagccccaactgcaaccagagatacggctggcaccccgccaccgtgtgcaagatcccccccggctgcaacctgaagatcttcaacaaccaggagttcgccgccctgctggcccagagcgtgaaccagggcttcgaggccgtgtaccagctgaccagaatgtgcaccatcagaatgagcttcgtgaagggctggggcgccgagtacagaagacagaccgtgaccagcaccccctgctggatcgagctgcacctgaacggccccctgcagtggctggacaaggtgctgacccagatgggcagccccagcatcagatgcagcagcgtgagctag

SEQ ID NO: 12951 - DNA, 963 bp, synthetic construct
  misc_feature 1..963: note = Description of Artificial Sequence: Synthetic coding sequence
  source 1..963: mol_type = other DNA
atggagctgtgcgagttcgccttcaacatgaagaaggacgaggtgtgcgtgaacccctaccactaccagagagtggagacccccgtgctgccccccgtgctggtgcccagacacaccgagatccccgccgagttcccccccctggacgactacagccacagcatccccgagaacaccaacttccccgccggcatcgagccccagagcaacatccccgagacccccccccccggctacctgagcgaggacggcgagaccagcgaccaccagatgaaccacagcatggacgccggcagccccaacctgagccccaaccccatgagccccgcccacaacaacctggacctgcagcccgtgacctactgcgagcccgccttctggtgcagcatcagctactacgagctgaaccagagagtgggcgagaccttccacgccagccagcccagcatgaccgtggacggcttcaccgaccccagcaacagcgagagattctgcctgggcctgctgagcaacgtgaacagaaacgccgccgtggagctgaccagaagacacatcggcagaggcgtgagactgtactacatcggcggcgaggtgttcgccgagtgcctgagcgacagcgccatcttcgtgcagagccccaactgcaaccagagatacggctggcaccccgccaccgtgtgcaagatcccccccggctgcaacctgaagatcttcaacaaccaggagttcgccgccctgctggcccagagcgtgaaccagggcttcgaggccgtgtaccagctgaccagaatgtgcaccatcagaatgagcttcgtgaagggctggggcgccgagtacagaagacagaccgtgaccagcaccccctgctggatcgagctgcacctgaacggccccctgcagtggctggacaaggtgctgacccagatgggcagccccagcatcagatgcagcagcgtgagctag

SEQ ID NO: 12952 - DNA, 1281 bp, synthetic construct
  misc_feature 1..1281: note = Description of Artificial Sequence: Synthetic coding sequence
  source 1..1281: mol_type = other DNA
atgttcagaaccaagagaagcgccctggtgagaagactgtggagaagcagagcccccggcggcgaggacgaggaggagggcgccggcggcggcggcggcggcggcgagctgagaggcgagggcgccaccgacagcagagcccacggcgccggcggcggcggccccggcagagccggctgctgcctgggcaaggccgtgagaggcgccaagggccaccaccacccccacccccccgccgccggcgccggcgccgccggcggcgccgaggccgacctgaaggccctgacccacagcgtgctgaagaagctgaaggagagacagctggagctgctgctgcaggccgtggagagcagaggcggcaccagaaccgcctgcctgctgctgcccggcagactggactgcagactgggccccggcgcccccgccggcgcccagcccgcccagccccccagcagctacagcctgcccctgctgctgtgcaaggtgttcagatggcccgacctgagacacagcagcgaggtgaagagactgtgctgctgcgagagctacggcaagatcaaccccgagctggtgtgctgcaacccccaccacctgagcagactgtgcgagctggagagccccccccccccctacagcagataccccatggacttcctgaagcccaccgccgactgccccgacgccgtgcccagcagcgccgagaccggcggcaccaactacctggcccccggcggcctgagcgacagccagctgctgctggagcccggcgacagaagccactggtgcgtggtggcctactgggaggagaagaccagagtgggcagactgtactgcgtgcaggagcccagcctggacatcttctacgacctgccccagggcaacggcttctgcctgggccagctgaacagcgacaacaagagccagctggtgcagaaggtgagaagcaagatcggctgcggcatccagctgaccagagaggtggacggcgtgtgggtgtacaacagaagcagctaccccatcttcatcaagagcgccaccctggacaaccccgacagcagaaccctgctggtgcacaaggtgttccccggcttcagcatcaaggccttcgactacgagaaggcctacagcctgcagagacccaacgaccacgagttcatgcagcagccctggaccggcttcaccgtgcagatcagcttcgtgaagggctggggccagtgctacaccagacagttcatcagcagctgcccctgctggctggaggtgatcttcaacagcagatag

SEQ ID NO: 12953 - DNA, 636 bp, synthetic construct
  misc_feature 1..636: note = Description of Artificial Sequence: Synthetic coding sequence
  source 1..636: mol_type = other DNA
atggacttcctgaagcccaccgccgactgccccgacgccgtgcccagcagcgccgagaccggcggcaccaactacctggcccccggcggcctgagcgacagccagctgctgctggagcccggcgacagaagccactggtgcgtggtggcctactgggaggagaagaccagagtgggcagactgtactgcgtgcaggagcccagcctggacatcttctacgacctgccccagggcaacggcttctgcctgggccagctgaacagcgacaacaagagccagctggtgcagaaggtgagaagcaagatcggctgcggcatccagctgaccagagaggtggacggcgtgtgggtgtacaacagaagcagctaccccatcttcatcaagagcgccaccctggacaaccccgacagcagaaccctgctggtgcacaaggtgttccccggcttcagcatcaaggccttcgactacgagaaggcctacagcctgcagagacccaacgaccacgagttcatgcagcagccctggaccggcttcaccgtgcagatcagcttcgtgaagggctggggccagtgctacaccagacagttcatcagcagctgcccctgctggctggaggtgatcttcaacagcagatag

SEQ ID NO: 12954 - DNA, 636 bp, synthetic construct; identical to SEQ ID NO: 12953
  misc_feature 1..636: note = Description of Artificial Sequence: Synthetic coding sequence
  source 1..636: mol_type = other DNA

SEQ ID NO: 12955 - DNA, 270 bp, synthetic construct
  misc_feature 1..270: note = Description of Artificial Sequence: Synthetic coding sequence
  source 1..270: mol_type = other DNA
atgaacagccagcagcagaagcagccctgcaccccccccccccagccccagcagcagcaggtgaagcagccctgccagccccccccccaggagccctgcatccccaagaccaaggagccctgccaccccaaggtgcccgagccctgccaccccaaggtgcccgagccctgccagcccaaggtgcccgagccctgccagcccaaggtgcccgagccctgccccagcaccgtgacccccgcccccgcccagcagaagaccaagcagaagtag

SEQ ID NO: 12956 - DNA, 270 bp, synthetic construct; identical to SEQ ID NO: 12955
  misc_feature 1..270: note = Description of Artificial Sequence: Synthetic coding sequence
  source 1..270: mol_type = other DNA

SEQ ID NO: 12957 - DNA, 4260 bp, synthetic construct
  misc_feature 1..4260: note = Description of Artificial Sequence: Synthetic coding sequence
  source 1..4260: mol_type = other DNA
atggccgagggcctggagagagtgagaatcagcgccagcgagctgagaggcatcctggccaccctggccccccaggccggcagcagagagaacatgaaggagctgaaggaggccagacccagaaaggacaacagaagacccgacctggagatctacaagcccggcctgagcagactgagaaacaagcccaagatcaaggagccccccggcagcgaggagttcaaggacgagatcgtgaacgacagagactgcagcgccgtggagaacggcacccagcccgtgaaggacgtgtgcaaggagctgaacaaccaggagcagaacggccccatcgaccccgagaacaacagaggccaggagagcttccccagaaccgccggccaggaggacagaagcctgaagatcatcaagagaaccaagaagcccgacctgcagatctaccagcccggcagaagactgcagaccgtgagcaaggagagcgccagcagagtggaggaggaggaggtgctgaaccaggtggagcagctgagagtggaggaggacgagtgcagaggcaacgtggccaaggaggaggtggccaacaagcccgacagagccgagatcgagaagagccccggcggcggcagagtgggcgccgccaagggcgagaagggcaagagaatgggcaagggcgagggcgtgagagagacccacgacgaccccgccagaggcagacccggcagcgccaagagatacagcagaagcgacaagagaagaaacagatacagaaccagaagcaccagcagcgccggcagcaacaacagcgccgagggcgccggcctgaccgacaacggctgcagaagaagaagacaggacagaaccaaggagagacccagactgaagaagcaggtgagcgtgagcagcaccgacagcctggacgaggacagaatcgacgagcccgacggcctgggccccagaagaagcagcgagagaaagagacacctggagagaaactggagcggcagaggcgagggcgagcagaagaacagcgccaaggagtacagaggcaccctgagagtgaccttcgacgccgaggccatgaacaaggagagccccatggtgagaagcgccagagacgacatggacagaggcaagcccgacaagggcctgagcagcggcggcaagggcagcgagaagcaggagagcaagaaccccaagcaggagctgagaggcagaggcagaggcatcctgatcctgcccgcccacaccaccctgagcgtgaacagcgccggcagccccgagagcgcccccctgggccccagactgctgttcggcagcggcagcaagggcagcagaagctggggcagaggcggcaccaccagaagactgtgggaccccaacaaccccgaccagaagcccgccctgaagacccagaccccccagctgcacttcctggacaccgacgacgaggtgagccccaccagctggggcgacagcagacaggcccaggccagctactacaagttccagaacagcgacaacccctactactaccccagaacccccggccccgccagccagtacccctacaccggctacaaccccctgcagtaccccgtgggccccaccaacggcgtgtaccccggcccctactaccccggctaccccacccccagcggccagtacgtgtgcagccccctgcccaccagcaccatgagccccgaggaggtggagcagcacatgagaaacctgcagcagcaggagctgcacagactgctgagagtggccgacaaccaggagctgcagctgagcaacctgctgagcagagacagaatcagccccgagggcctggagaagatggcccagctgagagccgagctgctgcagctgtacgagagatgcatcctgctggacatcgagttcagcgacaaccagaacgtggaccagatcctgtggaagaacgccttctaccaggtgatcgagaagttcagacagctggtgaaggaccccaacgtggagaaccccgagcagatcagaaacagactgctggagctgctggacgagggcagcgacttcttcgacagcctgctgcagaagctgcaggtgacctacaagttcaagctggaggactacatggacggcctggccatcagaagcaagcccctgagaaagaccgtgaagtacgccctgatcagcgcccagagatgcatgatctgccagggcgacatcgccagatacagagagcaggccagcgacaccgccaactacggcaaggccagaagctggtacctgaaggcccagcacatcgcccccaagaacggcagaccctacaaccagctggccctgctggccgtgtacaccagaagaaagctggacgccgtgtactactacatgagaagcctggccgccagcaaccccatcctgaccgccaaggagagcctgatgagcctgttcgaggagaccaagagaaaggccgagcagatggagaagaagcagcacgaggagttcgacctgagccccgaccagtggagaaagggcaagaagagcaccttcagacacgtgggcgacgacaccaccagactggagatctggatccaccccagccaccccagaagcagccagggcaccgagagcggcaaggacagcgagcaggagaacggcctgggcagcctgagccccagcgacctgaacaagagattcatcctgagcttcctgcacgcccacggcaagctgttcaccagaatcggcatggagaccttccccgccgtggccgagaaggtgctgaaggagttccaggtgctgctgcagcacagccccagccccatcggcagcaccagaatgctgcagctgatgaccatcaacatgttcgccgtgcacaacagccagctgaaggactgcttcagcgaggagtgcagaagcgtgatccaggagcaggccgccgccctgggcctggccatgttcagcctgctggtgagaagatgcacctgcctgctgaaggagagcgccaaggcccagctgagcagccccgaggaccaggacgaccaggacgacatcaaggtgagcagcttcgtgcccgacctgaaggagctgctgcccagcgtgaaggtgtggagcgactggatgctgggctaccccgacacctggaaccccccccccaccagcctggacctgcccagccacgtggccgtggacgtgtggagcaccctggccgacttctgcaacatcctgaccgccgtgaaccagagcgaggtgcccctgtacaaggaccccgacgacgacctgaccctgctgatcctggaggaggacagactgctgagcggcttcgtgcccctgctggccgccccccaggacccctgctacgtggagaagaccagcgacaaggtgatcgccgccgactgcaagagagtgaccgtgctgaagtacttcctggaggccctgtgcggccaggaggagcccctgctggccttcaagggcggcaagtacgtgagcgtggcccccgtgcccgacaccatgggcaaggagatgggcagccaggagggcaccagactggaggacgaggaggaggacgtggtgatcgaggacttcgaggaggacagcgaggccgagggcagcggcggcgaggacgacatcagagagctgagagccaagaagctggccctggccagaaagatcgccgagcagcagagaagacaggagaagatccaggccgtgctggaggaccacagccagatgagacagatggagctggagatcagacccctgttcctggtgcccgacaccaacggcttcatcgaccacctggccagcctggccagactgctggagagcagaaagtacatcctggtggtgcccctgatcgtgatcaacgagctggacggcctggccaagggccaggagaccgaccacagagccggcggctacgccagagtggtgcaggagaaggccagaaagagcatcgagttcctggagcagagattcgagagcagagacagctgcctgagagccctgaccagcagaggcaacgagctggagagcatcgccttcagaagcgaggacatcaccggccagctgggcaacaacgacgacctgatcctgagctgctgcctgcactactgcaaggacaaggccaaggacttcatgcccgccagcaaggaggagcccatcagactgctgagagaggtggtgctgctgaccgacgacagaaacctgagagtgaaggccctgaccagaaacgtgcccgtgagagacatccccgccttcctgacctgggcccaggtgggctag

SEQ ID NO: 12958 - DNA, 993 bp, synthetic construct
  misc_feature 1..993: note = Description of Artificial Sequence: Synthetic coding sequence
  source 1..993: mol_type = other DNA
atgagattcagactgtgccaccagagaggctgctgcccccacgagagagagaacacctgcacctgcaagatgatcatcagcagcctgcaggtgatcgccgccgactgcaagagagtgaccgtgctgaagtacttcctggaggccctgtgcggccaggaggagcccctgctggccttcaagggcggcaagtacgtgagcgtggcccccgtgcccgacaccatgggcaaggagatgggcagccaggagggcaccagactggaggacgaggaggaggacgtggtgatcgaggacttcgaggaggacagcgaggccgagggcagcggcggcgaggacgacatcagagagctgagagccaagaagctggccctggccagaaagatcgccgagcagcagagaagacaggagaagatccaggccgtgctggaggaccacagccagatgagacagatggagctggagatcagacccctgttcctggtgcccgacaccaacggcttcatcgaccacctggccagcctggccagactgctggagagcagaaagtacatcctggtggtgcccctgatcgtgatcaacgagctggacggcctggccaagggccaggagaccgaccacagagccggcggctacgccagagtggtgcaggagaaggccagaaagagcatcgagttcctggagcagagattcgagagcagagacagctgcctgagagccctgaccagcagaggcaacgagctggagagcatcgccttcagaagcgaggacatcaccggccagctgggcaacaacgacgacctgatcctgagctgctgcctgcactactgcaaggacaaggccaaggacttcatgcccgccagcaaggaggagcccatcagactgctgagagaggtggtgctgctgaccgacgacagaaacctgagagtgaaggccctgaccagaaacgtgcccgtgagagacatccccgccttcctgacctgggcccaggtgggctag

SEQ ID NO: 12959 - DNA, 1536 bp, synthetic construct
  misc_feature 1..1536: note = Description of Artificial Sequence: Synthetic coding sequence
  source 1..1536: mol_type = other DNA
atggagaccttccccgccgtggccgagaaggtgctgaaggagttccaggtgctgctgcagcacagccccagccccatcggcagcaccagaatgctgcagctgatgaccatcaacatgttcgccgtgcacaacagccagctgaaggactgcttcagcgaggagtgcagaagcgtgatccaggagcaggccgccgccctgggcctggccatgttcagcctgctggtgagaagatgcacctgcctgctgaaggagagcgccaaggcccagctgagcagccccgaggaccaggacgaccaggacgacatcaaggtgagcagcttcgtgcccgacctgaaggagctgctgcccagcgtgaaggtgtggagcgactggatgctgggctaccccgacacctggaaccccccccccaccagcctggacctgcccagccacgtggccgtggacgtgtggagcaccctggccgacttctgcaacatcctgaccgccgtgaaccagagcgaggtgcccctgtacaaggaccccgacgacgacctgaccctgctgatcctggaggaggacagactgctgagcggcttcgtgcccctgctggccgccccccaggacccctgctacgtggagaagaccagcgacaaggtgatcgccgccgactgcaagagagtgaccgtgctgaagtacttcctggaggccctgtgcggccaggaggagcccctgctggccttcaagggcggcaagtacgtgagcgtggcccccgtgcccgacaccatgggcaaggagatgggcagccaggagggcaccagactggaggacgaggaggaggacgtggtgatcgaggacttcgaggaggacagcgaggccgagggcagcggcggcgaggacgacatcagagagctgagagccaagaagctggccctggccagaaagatcgccgagcagcagagaagacaggagaagatccaggccgtgctggaggaccacagccagatgagacagatggagctggagatcagacccctgttcctggtgcccgacaccaacggcttcatcgaccacctggccagcctggccagactgctggagagcagaaagtacatcctggtggtgcccctgatcgtgatcaacgagctggacggcctggccaagggccaggagaccgaccacagagccggcggctacgccagagtggtgcaggagaaggccagaaagagcatcgagttcctggagcagagattcgagagcagagacagctgcctgagagccctgaccagcagaggcaacgagctggagagcatcgccttcagaagcgaggacatcaccggccagctgggcaacaacgacgacctgatcctgagctgctgcctgcactactgcaaggacaaggccaaggacttcatgcccgccagcaaggaggagcccatcagactgctgagagaggtggtgctgctgaccgacgacagaaacctgagagtgaaggccctgaccagaaacgtgcccgtgagagacatccccgccttcctgacctgggcccaggtgggctag

SEQ ID NO: 12960 - DNA, 4167 bp, synthetic construct
  misc_feature 1..4167: note = Description of Artificial Sequence: Synthetic coding sequence
  source 1..4167: mol_type = other DNA
atgaaggagctgaaggaggccagacccagaaaggacaacagaagacccgacctggagatctacaagcccggcctgagcagactgagaaacaagcccaagatcaaggagccccccggcagcgaggagttcaaggacgagatcgtgaacgacagagactgcagcgccgtggagaacggcacccagcccgtgaaggacgtgtgcaaggagctgaacaaccaggagcagaacggccccatcgaccccgagaacaacagaggccaggagagcttccccagaaccgccggccaggaggacagaagcctgaagatcatcaagagaaccaagaagcccgacctgcagatctaccagcccggcagaagactgcagaccgtgagcaaggagagcgccagcagagtggaggaggaggaggtgctgaaccaggtggagcagctgagagtggaggaggacgagtgcagaggcaacgtggccaaggaggaggtggccaacaagcccgacagagccgagatcgagaagagccccggcggcggcagagtgggcgccgccaagggcgagaagggcaagagaatgggcaagggcgagggcgtgagagagacccacgacgaccccgccagaggcagacccggcagcgccaagagatacagcagaagcgacaagagaagaaacagatacagaaccagaagcaccagcagcgccggcagcaacaacagcgccgagggcgccggcctgaccgacaacggctgcagaagaagaagacaggacagaaccaaggagagacccagactgaagaagcaggtgagcgtgagcagcaccgacagcctggacgaggacagaatcgacgagcccgacggcctgggccccagaagaagcagcgagagaaagagacacctggagagaaactggagcggcagaggcgagggcgagcagaagaacagcgccaaggagtacagaggcaccctgagagtgaccttcgacgccgaggccatgaacaaggagagccccatggtgagaagcgccagagacgacatggacagaggcaagcccgacaagggcctgagcagcggcggcaagggcagcgagaagcaggagagcaagaaccccaagcaggagctgagaggcagaggcagaggcatcctgatcctgcccgcccacaccaccctgagcgtgaacagcgccggcagccccgagagcgcccccctgggccccagactgctgttcggcagcggcagcaagggcagcagaagctggggcagaggcggcaccaccagaagactgtgggaccccaacaaccccgaccagaagcccgccctgaagacccagaccccccagctgcacttcctggacaccgacgacgaggtgagccccaccagctggggcgacagcagacaggcccaggccagctactacaagttccagaacagcgacaacccctactactaccccagaacccccggccccgccagccagtacccctacaccggctacaaccccctgcagtaccccgtgggccccaccaacggcgtgtaccccggcccctactaccccggctaccccacccccagcggccagtacgtgtgcagccccctgcccaccagcaccatgagccccgaggaggtggagcagcacatgagaaacctgcagcagcaggagctgcacagactgctgagagtggccgacaaccaggagctgcagctgagcaacctgctgagcagagacagaatcagccccgagggcctggagaagatggcccagctgagagccgagctgctgcagctgtacgagagatgcatcctgctggacatcgagttcagcgacaaccagaacgtggaccagatcctgtggaagaacgccttctaccaggtgatcgagaagttcagacagctggtgaaggaccccaacgtggagaaccccgagcagatcagaaacagactgctggagctgctggacgagggcagcgacttcttcgacagcctgctgcagaagctgcaggtgacctacaagttcaagctggaggactacatggacggcctggccatcagaagcaagcccctgagaaagaccgtgaagtacgccctgatcagcgcccagagatgcatgatctgccagggcgacatcgccagatacagagagcaggccagcgacaccgccaactacggcaaggccagaagctggtacctgaaggcccagcacatcgcccccaagaacggcagaccctacaaccagctggccctgctggccgtgtacaccagaagaaagctggacgccgtgtactactacatgagaagcctggccgccagcaaccccatcctgaccgccaaggagagcctgatgagcctgttcgaggagaccaagagaaaggccgagcagatggagaagaagcagcacgaggagttcgacctgagccccgaccagtggagaaagggcaagaagagcaccttcagacacgtgggcgacgacaccaccagactggagatctggatccaccccagccaccccagaagcagccagggcaccgagagcggcaaggacagcgagcaggagaacggcctgggcagcctgagccccagcgacctgaacaagagattcatcctgagcttcctgcacgcccacggcaagctgttcaccagaatcggcatggagaccttccccgccgtggccgagaaggtgctgaaggagttccaggtgctgctgcagcacagccccagccccatcggcagcaccagaatgctgcagctgatgaccatcaacatgttcgccgtgcacaacagccagctgaaggactgcttcagcgaggagtgcagaagcgtgatccaggagcaggccgccgccctgggcctggccatgttcagcctgctggtgagaagatgcacctgcctgctgaaggagagcgccaaggcccagctgagcagccccgaggaccaggacgaccaggacgacatcaaggtgagcagcttcgtgcccgacctgaaggagctgctgcccagcgtgaaggtgtggagcgactggatgctgggctaccccgacacctggaaccccccccccaccagcctggacctgcccagccacgtggccgtggacgtgtggagcaccctggccgacttctgcaacatcctgaccgccgtgaaccagagcgaggtgcccctgtacaaggaccccgacgacgacctgaccctgctgatcctggaggaggacagactgctgagcggcttcgtgcccctgctggccgccccccaggacccctgctacgtggagaagaccagcgacaaggtgatcgccgccgactgcaagagagtgaccgtgctgaagtacttcctggaggccctgtgcggccaggaggagcccctgctggccttcaagggcggcaagtacgtgagcgtggcccccgtgcccgacaccatgggcaaggagatgggcagccaggagggcaccagactggaggacgaggaggaggacgtggtgatcgaggacttcgaggaggacagcgaggccgagggcagcggcggcgaggacgacatcagagagctgagagccaagaagctggccctggccagaaagatcgccgagcagcagagaagacaggagaagatccaggccgtgctggaggaccacagccagatgagacagatggagctggagatcagacccctgttcctggtgcccgacaccaacggcttcatcgaccacctggccagcctggccagactgctggagagcagaaagtacatcctggtggtgcccctgatcgtgatcaacgagctggacggcctggccaagggccaggagaccgaccacagagccggcggctacgccagagtggtgcaggagaaggccagaaagagcatcgagttcctggagcagagattcgagagcagagacagctgcctgagagccctgaccagcagaggcaacgagctggagagcatcgccttcagaagcgaggacatcaccggccagctgggcaacaacgacgacctgatcctgagctgctgcctgcactactgcaaggacaaggccaaggacttcatgcccgccagcaaggaggagcccatcagactgctgagagaggtggtgctgctgaccgacgacagaaacctgagagtgaaggccctgaccagaaacgtgcccgtgagagacatccccgccttcctgacctgggcccaggtgggctag

SEQ ID NO: 12961 - DNA, 2364 bp, synthetic construct
  misc_feature 1..2364: note = Description of Artificial Sequence: Synthetic coding sequence
  source 1..2364: mol_type = other DNA
atggccgccgccagacccgccagaggccccgagctgcccctgctgggcctgctgctgctgctgctgctgggcgaccccggcagaggcgccgccagcagcggcaacgccaccggccccggccccagaagcgccggcggcagcgccagaagaagcgccgccgtgaccggcccccccccccccctgagccactgcggcagagccgccccctgcgagcccctgagatacaacgtgtgcctgggcagcgtgctgccctacggcgccaccagcaccctgctggccggcgacagcgacagccaggaggaggcccacggcaagctggtgctgtggagcggcctgagaaacgcccccagatgctgggccgtgatccagcccctgctgtgcgccgtgtacatgcccaagtgcgagaacgacagagtggagctgcccagcagaaccctgtgccaggccaccagaggcccctgcgccatcgtggagagagagagaggctggcccgacttcctgagatgcacccccgacagattccccgagggctgcaccaacgaggtgcagaacatcaagttcaacagcagcggccagtgcgaggtgcccctggtgagaaccgacaaccccaagagctggtacgaggacgtggagggctgcggcatccagtgccagaaccccctgttcaccgaggccgagcaccaggacatgcacagctacatcgccgccttcggcgccgtgaccggcctgtgcaccctgttcaccctggccaccttcgtggccgactggagaaacagcaacagataccccgccgtgatcctgttctacgtgaacgcctgcttcttcgtgggcagcatcggctggctggcccagttcatggacggcgccagaagagagatcgtgtgcagagccgacggcaccatgagactgggcgagcccaccagcaacgagaccctgagctgcgtgatcatcttcgtgatcgtgtactacgccctgatggccggcgtggtgtggttcgtggtgctgacctacgcctggcacaccagcttcaaggccctgggcaccacctaccagcccctgagcggcaagaccagctacttccacctgctgacctggagcctgcccttcgtgctgaccgtggccatcctggccgtggcccaggtggacggcgacagcgtgagcggcatctgcttcgtgggctacaagaactacagatacagagccggcttcgtgctggcccccatcggcctggtgctgatcgtgggcggctacttcctgatcagaggcgtgatgaccctgttcagcatcaagagcaaccaccccggcctgctgagcgagaaggccgccagcaagatcaacgagaccatgctgagactgggcatcttcggcttcctggccttcggcttcgtgctgatcaccttcagctgccacttctacgacttcttcaaccaggccgagtgggagagaagcttcagagactacgtgctgtgccaggccaacgtgaccatcggcctgcccaccaagcagcccatccccgactgcgagatcaagaacagacccagcctgctggtggagaagatcaacctgttcgccatgttcggcaccggcatcgccatgagcacctgggtgtggaccaaggccaccctgctgatctggagaagaacctggtgcagactgaccggccagagcgacgacgagcccaagagaatcaagaagagcaagatgatcgccaaggccttcagcaagagacacgagctgctgcagaaccccggccaggagctgagcttcagcatgcacaccgtgagccacgacggccccgtggccggcctggccttcgacctgaacgagcccagcgccgacgtgagcagcgcctgggcccagcacgtgaccaagatggtggccagaagaggcgccatcctgccccaggacatcagcgtgacccccgtggccacccccgtgccccccgaggagcaggccaacctgtggctggtggaggccgagatcagccccgagctgcagaagagactgggcagaaagaagaagagaagaaagagaaagaaggaggtgtgccccctggcccccccccccgagctgcacccccccgcccccgcccccagcaccatccccagactgccccagctgcccagacagaagtgcctggtggccgccggcgcctggggcgccggcgacagctgcagacagggcgcctggaccctggtgagcaaccccttctgccccgagcccagccccccccaggaccccttcctgcccagcgcccccgcccccgtggcctgggcccacggcagaagacagggcctgggccccatccacagcagaaccaacctgatggacaccgagctgatggacgccgacagcgacttctag

SEQ ID NO: 12962 - DNA, 231 bp, synthetic construct
  misc_feature 1..231: note = Description of Artificial Sequence: Synthetic coding sequence
  source 1..231: mol_type = other DNA
atgagcgaccaggacagcagcgagatccacttcaaggtgaagatgaccacccacctgaagaagctgaaggagagctactgccagagacagggcgtgcccatgaacagcctgagattcctgttcgagggccagagaatcgccgacaaccacacccccaaggagctgggcatggaggaggaggacgtgatcgaggtgtaccaggagcagaccggcggccacagcaccgtgtag

SEQ ID NO: 12963 - DNA, 306 bp, synthetic construct
  misc_feature 1..306: note = Description of Artificial Sequence: Synthetic coding sequence
  source 1..306: mol_type = other DNA
atgagcgaccaggaggccaagcccagcaccgaggacctgggcgacaagaaggagggcgagtacatcaagctgaaggtgatcggccaggacagcagcgagatccacttcaaggtgaagatgaccacccacctgaagaagctgaaggagagctactgccagagacagggcgtgcccatgaacagcctgagattcctgttcgagggccagagaatcgccgacaaccacacccccaaggagctgggcatggaggaggaggacgtgatcgaggtgtaccaggagcagaccggcggccacagcaccgtgtag

SEQ ID NO: 12964 - DNA, 306 bp, synthetic construct; identical to SEQ ID NO: 12963
  misc_feature 1..306: note = Description of Artificial Sequence: Synthetic coding sequence
  source 1..306: mol_type = other DNA

SEQ ID NO: 12965 - DNA, 189 bp, synthetic construct
  misc_feature 1..189: note = Description of Artificial Sequence: Synthetic coding sequence
  source 1..189: mol_type = other DNA
atgaccacccacctgaagaagctgaaggagagctactgccagagacagggcgtgcccatgaacagcctgagattcctgttcgagggccagagaatcgccgacaaccacacccccaaggagctgggcatggaggaggaggacgtgatcgaggtgtaccaggagcagaccggcggccacagcaccgtgtag

SEQ ID NO: 12966 - DNA, 189 bp, synthetic construct; identical to SEQ ID NO: 12965
  misc_feature 1..189: note = Description of Artificial Sequence: Synthetic coding sequence
  source 1..189: mol_type = other DNA

SEQ ID NO: 12967 - DNA, 795 bp, synthetic construct
  misc_feature 1..795: note = Description of Artificial Sequence: Synthetic coding sequence
  source 1..795: mol_type = other DNA
atgcccagaagcttcctggtgagaaagcccagcgaccccaacagaaagcccaactacagcgagctgcaggacagcaaccccgagttcaccttccagcagccctacgaccaggcccacctgctggccgccatccccccccccgagatcctgaaccccaccgccagcctgcccatgctgatctgggacagcgtgctggccccccaggcccagcccatcgcctgggccagcctgagactgcaggagagccccagagtggccgagctgaccagcctgagcgacgaggacagcggcaagggcagccagccccccagcccccccagccccgcccccagcagcttcagcagcaccagcgtgagcagcctggaggccgaggcctacgccgccttccccggcctgggccaggtgcccaagcagctggcccagctgagcgaggccaaggacctgcaggccagaaaggccttcaactgcaagtactgcaacaaggagtacctgagcctgggcgccctgaagatgcacatcagaagccacaccctgccctgcgtgtgcggcacctgcggcaaggccttcagcagaccctggctgctgcagggccacgtgagaacccacaccggcgagaagcccttcagctgcccccactgcagcagagccttcgccgacagaagcaacctgagagcccacctgcagacccacagcgacgtgaagaagtaccagtgccaggcctgcgccagaaccttcagcagaatgagcctgctgcacaagcaccaggagagcggctgcagcggctgccccagatag

SEQ ID NO: 12968 - DNA, 807 bp, synthetic construct
  misc_feature 1..807: note = Description of Artificial Sequence: Synthetic coding sequence
  source 1..807: mol_type = other DNA
atgcccagaagcttcctggtgaagaagcacttcaacgccagcaagaagcccaactacagcgagctggacacccacaccgtgatcatcagcccctacctgtacgagagctacagcatgcccgtgatcccccagcccgagatcctgagcagcggcgcctacagccccatcaccgtgtggaccaccgccgcccccttccacgcccagctgcccaacggcctgagccccctgagcggctacagcagcagcctgggcagagtgagcccccccccccccagcgacaccagcagcaaggaccacagcggcagcgagagccccatcagcgacgaggaggagagactgcagagcaagctgagcgacccccacgccatcgaggccgagaagttccagtgcaacctgtgcaacaagacctacagcaccttcagcggcctggccaagcacaagcagctgcactgcgacgcccagagcagaaagagcttcagctgcaagtactgcgacaaggagtacgtgagcctgggcgccctgaagatgcacatcagaacccacaccctgccctgcgtgtgcaagatctgcggcaaggccttcagcagaccctggctgctgcagggccacatcagaacccacaccggcgagaagcccttcagctgcccccactgcaacagagccttcgccgacagaagcaacctgagagcccacctgcagacccacagcgacgtgaagaagtaccagtgcaagaactgcagcaagaccttcagcagaatgagcctgctgcacaagcacgaggagagcggctgctgcgtggcccactag

SEQ ID NO: 12969 - DNA, 807 bp, synthetic construct; identical to SEQ ID NO: 12968
  misc_feature 1..807: note = Description of Artificial Sequence: Synthetic coding sequence
  source 1..807: mol_type = other DNA

SEQ ID NO: 12970 - DNA, 879 bp, synthetic construct
  misc_feature 1..879: note = Description of Artificial Sequence: Synthetic coding sequence
  source 1..879: mol_type = other DNA
atgcccagaagcttcctggtgaagacccacagcagccacagagtgcccaactacagaagactggagacccagagagagatcaacggcgcctgcagcgcctgcggcggcctggtggtgcccctgctgcccagagacaaggaggcccccagcgtgcccggcgacctgccccagccctgggacagaagcagcgccgtggcctgcatcagcctgcccctgctgcccagaatcgaggaggccctgggcgccagcggcctggacgccctggaggtgagcgaggtggaccccagagccagcagagccgccatcgtgcccctgaaggacagcctgaaccacctgaacctgccccccctgctggtgctgcccaccagatggagccccaccctgggccccgacagacacggcgcccccgagaagctgctgggcgccgagagaatgcccagagcccccggcggcttcgagtgcttccactgccacaagccctaccacaccctggccggcctggccagacacagacagctgcactgccacctgcaggtgggcagagtgttcacctgcaagtactgcgacaaggagtacaccagcctgggcgccctgaagatgcacatcagaacccacaccctgccctgcacctgcaagatctgcggcaaggccttcagcagaccctggctgctgcagggccacgtgagaacccacaccggcgagaagccctacgcctgcagccactgcagcagagccttcgccgacagaagcaacctgagagcccacctgcagacccacagcgacgccaagaagtacagatgcagaagatgcaccaagaccttcagcagaatgagcctgctggccagacacgaggagagcggctgctgccccggcccctag

SEQ ID NO: 12971 - DNA, 1398 bp, synthetic construct
  misc_feature 1..1398: note = Description of Artificial Sequence: Synthetic coding sequence
  source 1..1398: mol_type = other DNA
atgggcggcgccgtggtggacgagggccccaccggcgtgaaggcccccgacggcggctggggctgggccgtgctgttcggctgcttcgtgatcaccggcttcagctacgccttccccaaggccgtgagcgtgttcttcaaggagctgatccaggagttcggcatcggctacagcgacaccgcctggatcagcagcatcctgctggccatgctgtacggcaccggccccctgtgcagcgtgtgcgtgaacagattcggctgcagacccgtgatgctggtgggcggcctgttcgccagcctgggcatggtggccgccagcttctgcagaagcatcatccaggtgtacctgaccaccggcgtgatcaccggcctgggcctggccctgaacttccagcccagcctgatcatgctgaacagatacttcagcaagagaagacccatggccaacggcctggccgccgccggcagccccgtgttcctgtgcgccctgagccccctgggccagctgctgcaggacagatacggctggagaggcggcttcctgatcctgggcggcctgctgctgaactgctgcgtgtgcgccgccctgatgagacccctggtggtgaccgcccagcccggcagcggcccccccagacccagcagaagactgctggacctgagcgtgttcagagacagaggcttcgtgctgtacgccgtggccgccagcgtgatggtgctgggcctgttcgtgccccccgtgttcgtggtgagctacgccaaggacctgggcgtgcccgacaccaaggccgccttcctgctgaccatcctgggcttcatcgacatcttcgccagacccgccgccggcttcgtggccggcctgggcaaggtgagaccctacagcgtgtacctgttcagcttcagcatgttcttcaacggcctggccgacctggccggcagcaccgccggcgactacggcggcctggtggtgttctgcatcttcttcggcatcagctacggcatggtgggcgccctgcagttcgaggtgctgatggccatcgtgggcacccacaagttcagcagcgccatcggcctggtgctgctgatggaggccgtggccgtgctggtgggcccccccagcggcggcaagctgctggacgccacccacgtgtacatgtacgtgttcatcctggccggcgccgaggtgctgaccagcagcctgatcctgctgctgggcaacttcttctgcatcagaaagaagcccaaggagccccagcccgaggtggccgccgccgaggaggagaagctgcacaagccccccgccgacagcggcgtggacctgagagaggtggagcacttcctgaaggccgagcccgagaagaacggcgaggtggtgcacacccccgagaccagcgtgtag

SEQ ID NO: 12972 - DNA, 1398 bp, synthetic construct; identical to SEQ ID NO: 12971
  misc_feature 1..1398: note = Description of Artificial Sequence: Synthetic coding sequence
  source 1..1398: mol_type = other DNA

SEQ ID NO: 12973 - DNA, 1398 bp, synthetic construct; identical to SEQ ID NO: 12971
  misc_feature 1..1398: note = Description of Artificial Sequence: Synthetic coding sequence
  source 1..1398: mol_type = other DNA

SEQ ID NO: 12974 - DNA, 1398 bp, synthetic construct; identical to SEQ ID NO: 12971
  misc_feature 1..1398: note = Description of Artificial Sequence: Synthetic coding sequence
  source 1..1398: mol_type = other DNA

SEQ ID NO: 12975 - DNA, 1470 bp, synthetic construct
  misc_feature 1..1470: note = Description of Artificial Sequence: Synthetic coding sequence
  source 1..1470: mol_type = other DNA
atggtgcccagcagccccgccgtggagaagcaggtgcccgtggagcccggccccgaccccgagctgagaagctggagacacctggtgtgctacctgtgcttctacggcttcatggcccagatcagacccggcgagagcttcatcaccccctacctgctgggccccgacaagaacttcaccagagagcaggtgaccaacgagatcacccccgtgctgagctacagctacctggccgtgctggtgcccgtgttcctgctgaccgactacctgagatacacccccgtgctgctgctgcagggcctgagcttcgtgagcgtgtggctgctgctgctgctgggccacagcgtggcccacatgcagctgatggagctgttctacagcgtgaccatggccgccagaatcgcctacagcagctacatcttcagcctggtgagacccgccagataccagagagtggccggctacagcagagccgccgtgctgctgggcgtgttcaccagcagcgtgctgggccagctgctggtgaccgtgggcagagtgagcttcagcaccctgaactacatcagcctggccttcctgaccttcagcgtggtgctggccctgttcctgaagagacccaagagaagcctgttcttcaacagagacgacagaggcagatgcgagaccagcgccagcgagctggagagaatgaaccccggccccggcggcaagctgggccacgccctgagagtggcctgcggcgacagcgtgctggccagaatgctgagagagctgggcgacagcctgagaagaccccagctgagactgtggagcctgtggtgggtgttcaacagcgccggctactacctggtggtgtactacgtgcacatcctgtggaacgaggtggaccccaccaccaacagcgccagagtgtacaacggcgccgccgacgccgccagcaccctgctgggcgccatcaccagcttcgccgccggcttcgtgaagatcagatgggccagatggagcaagctgctgatcgccggcgtgaccgccacccaggccggcctggtgttcctgctggcccacaccagacaccccagcagcatctggctgtgctacgccgccttcgtgctgttcagaggcagctaccagttcctggtgcccatcgccaccttccagatcgccagcagcctgagcaaggagctgtgcgccctggtgttcggcgtgaacaccttcttcgccaccatcgtgaagaccatcatcaccttcatcgtgagcgacgtgagaggcctgggcctgcccgtgagaaagcagaacgaggagctgcacgtggccagcctgagcctgtggaagagccacctgagactggccgccgacaccctgagcagcgagggcagcagcggcagcggccccagaagctggttcctgagccccaccctgagagccgccctgcacggccccgtgtgccccagcgaggtgtgccccagctag

SEQ ID NO: 12976 - DNA, 1776 bp, synthetic construct
  misc_feature 1..1776: note = Description of Artificial Sequence: Synthetic coding sequence
  source 1..1776: mol_type = other DNA
atggtgcccagcagccccgccgtggagaagcaggtgcccgtggagcccggccccgaccccgagctgagaagctggagacacctggtgtgctacctgtgcttctacggcttcatggcccagatcagacccggcgagagcttcatcaccccctacctgctgggccccgacaagaacttcaccagagagcaggtgaccaacgagatcacccccgtgctgagctacagctacctggccgtgctggtgcccgtgttcctgctgaccgactacctgagatacacccccgtgctgctgctgcagggcctgagcttcgtgagcgtgtggctgctgctgctgctgggccacagcgtggcccacatgcagctgatggagctgttctacagcgtgaccatggccgccagaatcgcctacagcagctacatcttcagcctggtgagacccgccagataccagagagtggccggctacagcagagccgccgtgctgctgggcgtgttcaccagcagcgtgctgggccagctgctggtgaccgtgggcagagtgagcttcagcaccctgaactacatcagcctggccttcctgaccttcagcgtggtgctggccctgttcctgaagagacccaagagaagcctgttcttcaacagagacgacagaggcagatgcgagaccagcgccagcgagctggagagaatgaaccccggccccggcggcaagctgggccacgccctgagagtggcctgcggcgacagcgtgctggccagaatgctgagagagctgggcgacagcctgagaagaccccagctgagactgtggagcctgtggtgggtgttcaacagcgccggctactacctggtggtgtactacgtgcacatcctgtggaacgaggtggaccccaccaccaacagcgccagagtgtacaacggcgccgccgacgccgccagcaccctgctgggcgccatcaccagcttcgccgccggcttcgtgaagatcagatgggccagatggagcaagctgctgatcgccggcgtgaccgccacccaggccggcctggtgttcctgctggcccacaccagacaccccagcagcatctggctgtgctacgccgccttcgtgctgttcagaggcagctaccagttcctggtgcccatcgccaccttccagatcgccagcagcctgagcaaggagctgtgcgccctggtgttcggcgtgaacaccttcttcgccaccatcgtgaagaccatcatcaccttcatcgtgagcgacgtgagaggcctgggcctgcccgtgagaaagcagttccagctgtacagcgtgtacttcctgatcctgagcatcatctacttcctgggcgccatgctggacggcctgagacactgccagagaggccaccaccccagacagccccccgcccagggcctgagaagcgccgccgaggagaaggccgcccaggccctgagcgtgcaggacaagggcctgggcggcctgcagcccgcccagagcccccccctgagccccgaggacagcctgggcgccgtgggccccgccagcctggagcagagacagagcgacccctacctggcccaggcccccgccccccaggccgccgagttcctgagccccgtgaccacccccagcccctgcaccctgtgcagcgcccaggccagcggccccgaggccgccgacgagacctgcccccagctggccgtgcacccccccggcgtgagcaagctgggcctgcagtgcctgcccagcgacggcgtgcagaacgtgaaccagtag

SEQ ID NO: 12977 - DNA, 846 bp, synthetic construct
  misc_feature 1..846: note = Description of Artificial Sequence: Synthetic coding sequence
  source 1..846: mol_type = other DNA
atgctgagagagctgggcgacagcctgagaagaccccagctgagactgtggagcctgtggtgggtgttcaacagcgccggctactacctggtggtgtactacgtgcacatcctgtggaacgaggtggaccccaccaccaacagcgccagagtgtacaacggcgccgccgacgccgccagcaccctgctgggcgccatcaccagcttcgccgccggcttcgtgaagatcagatgggccagatggagcaagctgctgatcgccggcgtgaccgccacccaggccggcctggtgttcctgctggcccacaccagacaccccagcagcatctggctgtgctacgccgccttcgtgctgttcagaggcagctaccagttcctggtgcccatcgccaccttccagatcgccagcagcctgagcaaggagctgtgcgccctggtgttcggcgtgaacaccttcttcgccaccatcgtgaagaccatcatcaccttcatcgtgagcgacgtgagaggcctgggcctgcccgtgagaaagcaggccctgagaatgagcagacccagactgggcctgtgcctgcccggccccttccccccccagagcgccgcccccgccagagccggcatggccgccagcagcgccgaggaccccggcagcgagagaggcccctggagaagagccggcaccgtggccgccagaggcgaccccggcggcgagagaggcccctggagaagagagggcaccctggccgccagaggcgaccccggcggcgagagaggcccctggtggagagagggcaccctggccgccaagcccagaatgcagtgggtgaccagagccaccgccccctag

SEQ ID NO: 12978 - DNA, 810 bp, synthetic construct
  misc_feature 1..810: note = Description of Artificial Sequence: Synthetic coding sequence
  source 1..810: mol_type = other DNA
tgactgagactgtggagcctgtggtgggtgttcaacagcgccggctactacctggtggtgtactacgtgcacatcctgtggaacgaggtggaccccaccaccaacagcgccagagtgtacaacggcgccgccgacgccgccagcaccctgctgggcgccatcaccagcttcgccgccggcttcgtgaagatcagatgggccagatggagcaagctgctgatcgccggcgtgaccgccacccaggccggcctggtgttcctgctggcccacaccagacaccccagcagcatctggctgtgctacgccgccttcgtgctgttcagaggcagctaccagttcctggtgcccatcgccaccttccagatcgccagcagcctgagcaaggagctgtgcgccctggtgttcggcgtgaacaccttcttcgccaccatcgtgaagaccatcatcaccttcatcgtgagcgacgtgagaggcctgggcctgcccgtgagaaagcaggccctgagaatgagcagacccagactgggcctgtgcctgcccggccccttccccccccagagcgccgcccccgccagagccggcatggccgccagcagcgccgaggaccccggcagcgagagaggcccctggagaagagccggcaccgtggccgccagaggcgaccccggcggcgagagaggcccctggagaagagagggcaccctggccgccagaggcgaccccggcggcgagagaggcccctggtggagagagggcaccctggccgccaagcccagaatgcagtgggtgaccagagccaccgccccctag

SEQ ID NO: 12979 - DNA, 549 bp, synthetic construct
  misc_feature 1..549: note = Description of Artificial Sequence: Synthetic coding sequence
  source 1..549: mol_type = other DNA
atggtgcccagcagccccgccgtggagaagcaggtgcccgtggagcccggccccgaccccgagctgagaagctggagacacctggtgtgctacctgtgcttctacggcttcatggcccagatcagacccggcgagagcttcatcaccccctacctgctgggccccgacaagaacttcaccagagagcaggtgaccaacgagatcacccccgtgctgagctacagctacctggccgtgctggtgcccgtgttcctgctgaccgactacctgagatacacccccgtgctgctgctgcagggcctgagcttcgtgagcgtgtggctgctgctgctgctgggccacagcgtggcccacatgcagctgatggagctgttctacagcgtgaccatggccgccagaatcgcctacagcagctacatcttcagcctggtgagacccgccagataccagagagtggccggctacagcagagccgccgtgctgctgggcgtgttcaccagcagcgtgctgggccagctgctggtgaccgtgggcagagtgagcttctag

SEQ ID NO: 12980 - DNA, 465 bp, synthetic construct
  misc_feature 1..465: note = Description of Artificial Sequence: Synthetic coding sequence
  source 1..465: mol_type = other DNA
atggtgcccagcagccccgccgtggagaagcaggtgcccgtggagcccggccccgaccccgagctgagaagctggagacacctggtgtgctacctgtgcttctacggcttcatggcccagatcagacccggcgagagcttcatcaccccctacctgctgggccccgacaagaacttcaccagagagcaggtgaccaacgagatcacccccgtgctgagctacagctacctggccgtgctggtgcccgtgttcctgctgaccgactacctgagatacacccccgtgctgctgctgcagggcctgagcttcgtgagcgtgtggctgctgctgctgctgggccacagcgtggcccacatgcagctgatggagctgttctacagcgtgaccatggccgccagaatcgcctacagcagctacatcttcagcctggtgagacccgccagataccagagagtggccggctag

SEQ ID NO: 12981 - DNA, 1656 bp, synthetic construct
  misc_feature 1..1656: note = Description of Artificial Sequence: Synthetic coding sequence
  source 1..1656: mol_type = other DNA
atgagaccccagcccgccgagcccgcccccggcggcagaggcaacgaggcctgcagcatccacagcgaggtgaccaacgagatcacccccgtgctgagctacagctacctggccgtgctggtgcccgtgttcctgctgaccgactacctgagatacacccccgtgctgctgctgcagggcctgagcttcgtgagcgtgtggctgctgctgctgctgggccacagcgtggcccacatgcagctgatggagctgttctacagcgtgaccatggccgccagaatcgcctacagcagctacatcttcagcctggtgagacccgccagataccagagagtggccggctacagcagagccgccgtgctgctgggcgtgttcaccagcagcgtgctgggccagctgctggtgaccgtgggcagagtgagcttcagcaccctgaactacatcagcctggccttcctgaccttcagcgtggtgctggccctgttcctgaagagacccaagagaagcctgttcttcaacagagacgacagaggcagatgcgagaccagcgccagcgagctggagagaatgaaccccggccccggcggcaagctgggccacgccctgagagtggcctgcggcgacagcgtgctggccagaatgctgagagagctgggcgacagcctgagaagaccccagctgagactgtggagcctgtggtgggtgttcaacagcgccggctactacctggtggtgtactacgtgcacatcctgtggaacgaggtggaccccaccaccaacagcgccagagtgtacaacggcgccgccgacgccgccagcaccctgctgggcgccatcaccagcttcgccgccggcttcgtgaagatcagatgggccagatggagcaagctgctgatcgccggcgtgaccgccacccaggccggcctggtgttcctgctggcccacaccagacaccccagcagcatctggctgtgctacgccgccttcgtgctgttcagaggcagctaccagttcctggtgcccatcgccaccttccagatcgccagcagcctgagcaaggagctgtgcgccctggtgttcggcgtgaacaccttcttcgccaccatcgtgaagaccatcatcaccttcatcgtgagcgacgtgagaggcctgggcctgcccgtgagaaagcagttccagctgtacagcgtgtacttcctgatcctgagcatcatctacttcctgggcgccatgctggacggcctgagacactgccagagaggccaccaccccagacagccccccgcccagggcctgagaagcgccgccgaggagaaggccgcccaggccctgagcgtgcaggacaagggcctgggcggcctgcagcccgcccagagcccccccctgagccccgaggacagcctgggcgccgtgggccccgccagcctggagcagagacagagcgacccctacctggcccaggcccccgccccccaggccgccgagttcctgagccccgtgaccacccccagcccctgcaccctgtgcagcgcccaggccagcggccccgaggccgccgacgagacctgcccccagctggccgtgcacccccccggcgtgagcaagctgggcctgcagtgcctgcccagcgacggcgtgcagaacgtgaaccagtag

SEQ ID NO: 12982 - DNA, 186 bp, synthetic construct
  misc_feature 1..186: note = Description of Artificial Sequence: Synthetic coding sequence
  source 1..186: mol_type = other DNA
atggtgcccagcagccccgccgtggagaagcaggtgcccgtggagcccggccccgaccccgagctgagaagctggagacacctggtgtgctacctgtgcttctacggcttcatggcccagatcagacccggcgagagcttcatcaccccctacctgctgggccccgacaagaacttcaccagatag

SEQ ID NO: 12983 - DNA, 705 bp, synthetic construct
  misc_feature 1..705: note = Description of Artificial Sequence: Synthetic coding sequence
  source 1..705: mol_type = other DNA
atggagcccagcagcaagaagctgaccggcagactgatgctggccgtgggcggcgccgtgctgggcagcctgcagttcggctacaacaccggcgtgatcaacgccccccagaaggtgatcgaggagttctacaaccagacctgggtgcacagatacggcgagagcatcctgcccaccaccctgaccaccctgtggagcctgagcgtggccatcttcagcgtgggcggcatgatcggcagcttcagcgtgggcctgttcgtgaacagattcggcagaagaaacagcatgctgatgatgaacctgctggccttcgtgagcgccgtgctgatgggcttcagcaagctgggcaagagcttcgagatgctgatcctgggcagattcatcatcggcgtgtactgcggcctgaccaccggcttcgtgcccatgtacgtgggcgaggtgagccccaccgccctgagaggcgccctgggcaccctgcaccagctgggcatcgtggtgggcatcctgatcgcccaggtgagctggggcagaatctacctgcccggcaccgcccccgcccacagcttcagcggcagcagaatctgcgcccagcagggcagagtgagcctgccccccagcccccacagcctggccgaggacaactacggcacccaggtgcagagaacccagcaccacggcctgcccgtggacagcaagatgacctag

SEQ ID NO: 12984 - DNA, 1377 bp, synthetic construct
  misc_feature 1..1377: note = Description of Artificial Sequence: Synthetic coding sequence
  source 1..1377: mol_type = other DNA
atggagcccagcagcaagaagctgaccggcagactgatgctggccgtgggcggcgccgtgctgggcagcctgcagttcggctacaacaccggcgtgatcaacgccccccagaaggtgatcgaggagttctacaaccagacctgggtgcacagatacggcgagagcatcctgcccaccaccctgaccaccctgtggagcctgagcgtggccatcttcagcgtgggcggcatgatcggcagcttcagcgtgggcctgttcgtgaacagattcggcagaagaaacagcatgctgatgatgaacctgctggccttcgtgagcgccgtgctgatgggcttcagcaagctgggcaagagcttcgagatgctgatcctgggcagattcatcatcggcgtgtactgcggcctgaccaccggcttcgtgcccatgtacgtgggcgaggtgagccccaccgccctgagaggcgccctgggcaccctgcaccagctgggcatcgtggtgggcatcctgatcgcccaggtgttcggcctggacagcatcatgggcaacaaggacctgtggcccctgctgctgagcatcatcttcatccccgccctgctgcagtgcatcgtgctgcccttctgccccgagagccccagattcctgctgatcaacagaaacgaggagaacagagccaagagcgtgctgaagaagctgagaggcaccgccgacgtgacccacgacctgcaggagatgaaggaggagagcagacagatgatgagagagaagaaggtgaccatcctggagctgttcagaagccccgcctacagacagcccatcctgatcgccgtggtgctgcagctgagccagcagctgagcggcatcaacgccgtgttctactacagcaccagcatcttcgagaaggccggcgtgcagcagcccgtgtacgccaccatcggcagcggcatcgtgaacaccgccttcaccgtggtgagcctgttcgtggtggagagagccggcagaagaaccctgcacctgatcggcctggccggcatggccggctgcgccatcctgatgaccatcgccctggccctgctggagcagctgccctggatgagctacctgagcatcgtggccatcttcggcttcgtggccttcttcgaggtgggccccggccccatcccctggttcatcgtggccgagctgttcagccagggccccagacccgccgccatcgccgtggccggcttcagcaactggaccagcaacttcatcgtgggcatgtgcttccagtacgtggagcagctgtgcggcccctacgtgttcatcatcttcaccgtgctgctggtgctgttcttcatcttcaccctgaacggcagcatgcccgagggcggcgactag

SEQ ID NO: 12985 - DNA, 1305 bp, synthetic construct
  misc_feature 1..1305: note = Description of Artificial Sequence: Synthetic coding sequence
  source 1..1305: mol_type = other DNA
atggagcccagcagcaagaagctgaccggcagactgatgctggccgtgggcggcgccgtgctgggcagcctgcagttcggctacaacaccggcgtgatcaacgccccccagaaggtgatcgaggagttctacaaccagacctgggtgcacagatacggcgagagcatcctgcccaccaccctgaccaccctgtggagcctgagcgtggccatcttcagcgtgggcggcatgatcggcagcttcagcgtgggcctgttcgtgaacagattcggcagaagaaacagcatgctgatgatgaacctgctggccttcgtgcccatgtacgtgggcgaggtgagccccaccgccctgagaggcgccctgggcaccctgcaccagctgggcatcgtggtgggcatcatcatcttcatccccgccctgctgcagtgcatcgtgctgcccttctgccccgagagccccagattcctgctgatcaacagaaacgaggagaacagagccaagagcgtgctgaagaagctgagaggcaccgccgacgtgacccacgacctgcaggagatgaaggaggagagcagacagatgatgagagagaagaaggtgaccatcctggagctgttcagaagccccgcctacagacagcccatcctgatcgccgtggtgctgcagctgagccagcagctgagcggcatcaacgccgtgttctactacagcaccagcatcttcgagaaggccggcgtgcagcagcccgtgtacgccaccatcggcagcggcatcgtgaacaccgccttcaccgtggtgagcctgttcgtggtggagagagccggcagaagaaccctgcacctgatcggcctggccggcatggccggctgcgccatcctgatgaccatcgccctggccctgctggagcagctgccctggatgagctacctgagcatcgtggccatcttcggcttcgtggccttcttcgaggtgggccccggccccatcccctggttcatcgtggccgagctgttcagccagggccccagacccgccgccatcgccgtggccggcttcagcaactggaccagcaacttcatcgtgggcatgtgcttccagtacgtggagcagctgtgcggcccctacgtgttcatcatcttcaccgtgctgctggtgctgttcttcatcttcacctacttcaaggtgcccgagaccaagggcagaaccttcgacgagatcgccagcggcttcagacagggcggcgccagccagagcgacaagacccccgaggagctgttccaccccctgggcgccgacagccaggtgtag

SEQ ID NO: 12986 - DNA, 528 bp, synthetic construct
  misc_feature 1..528: note = Description of Artificial Sequence: Synthetic coding sequence
  source 1..528: mol_type = other DNA
atggagcccagcagcaagaagctgaccggcagactgatgctggccgtgggcggcgccgtgctgggcagcctgcagttcggctacaacaccggcgtgatcaacgccccccagaaggtgatcgaggagttctacaaccagacctgggtgcacagatacggcgagagcatcctgcccaccaccctgaccaccctgtggagcctgagcgtggccatcttcagcgtgggcggcatgatcggcagcttcagcgtgggcctgttcgtgaacagattcggcagaagaaacagcatgctgatgatgaacctgctggccttcgtgagcgccgtgctgatgggcttcagcaagctgggcaaccccaagctggagaccaccgacacccccctgcccaagaagttccccttcagaccccaggccagaaaggtgaccgccgtgcagtgccccttctgcctgagcatctgccccctgcacagcctgctgatcctgggccccaccagcaccgccaccgaggccggcaagggccacaacgtgtag

SEQ ID NO: 12987 - DNA, 1479 bp, synthetic construct
  misc_feature 1..1479: note = Description of Artificial Sequence: Synthetic coding sequence
  source 1..1479: mol_type = other DNA
atggagcccagcagcaagaagctgaccggcagactgatgctggccgtgggcggcgccgtgctgggcagcctgcagttcggctacaacaccggcgtgatcaacgccccccagaaggtgatcgaggagttctacaaccagacctgggtgcacagatacggcgagagcatcctgcccaccaccctgaccaccctgtggagcctgagcgtggccatcttcagcgtgggcggcatgatcggcagcttcagcgtgggcctgttcgtgaacagattcggcagaagaaacagcatgctgatgatgaacctgctggccttcgtgagcgccgtgctgatgggcttcagcaagctgggcaagagcttcgagatgctgatcctgggcagattcatcatcggcgtgtactgcggcctgaccaccggcttcgtgcccatgtacgtgggcgaggtgagccccaccgccctgagaggcgccctgggcaccctgcaccagctgggcatcgtggtgggcatcctgatcgcccaggtgttcggcctggacagcatcatgggcaacaaggacctgtggcccctgctgctgagcatcatcttcatccccgccctgctgcagtgcatcgtgctgcccttctgccccgagagccccagattcctgctgatcaacagaaacgaggagaacagagccaagagcgtgctgaagaagctgagaggcaccgccgacgtgacccacgacctgcaggagatgaaggaggagagcagacagatgatgagagagaagaaggtgaccatcctggagctgttcagaagccccgcctacagacagcccatcctgatcgccgtggtgctgcagctgagccagcagctgagcggcatcaacgccgtgttctactacagcaccagcatcttcgagaaggccggcgtgcagcagcccgtgtacgccaccatcggcagcggcatcgtgaacaccgccttcaccgtggtgagcctgttcgtggtggagagagccggcagaagaaccctgcacctgatcggcctggccggcatggccggctgcgccatcctgatgaccatcgccctggccctgctggagcagctgccctggatgagctacctgagcatcgtggccatcttcggcttcgtggccttcttcgaggtgggccccggccccatcccctggttcatcgtggccgagctgttcagccagggccccagacccgccgccatcgccgtggccggcttcagcaactggaccagcaacttcatcgtgggcatgtgcttccagtacgtggagcagctgtgcggcccctacgtgttcatcatcttcaccgtgctgctggtgctgttcttcatcttcacctacttcaaggtgcccgagaccaagggcagaaccttcgacgagatcgccagcggcttcagacagggcggcgccagccagagcgacaagacccccgaggagctgttccaccccctgggcgccgacagccaggtgtag

SEQ ID NO: 12988 - DNA, 753 bp, synthetic construct
  misc_feature 1..753: note = Description of Artificial Sequence: Synthetic coding sequence
  source 1..753: mol_type = other DNA
atgctgatgatgaacctgctggccttcgtgagcgccgtgctgatgggcttcagcaagctgggcaagagcttcgagatgctgatcctgggcagattcatcatcggcgtgtactgcggcctgaccaccggcttcgtgcccatgtacgtgggcgaggtgagccccaccgccctgagaggcgccctgggcaccctgcaccagctgggcatcgtggtgggcatcctgatcgcccaggtgttcggcctggacagcatcatgggcaacaaggacctgtggcccctgctgctgagcatcatcttcatccccgccctgctgcagtgcatcgtgctgcccttctgccccgagagccccagattcctgctgatcaacagaaacgaggagaacagagccaagagcgtgctgaagaagctgagaggcaccgccgacgtgacccacgacctgcaggagatgaaggaggagagcagacagatgatgagagagaagaaggtgaccatcctggagctgttcagaagccccgcctacagacagcccatcctgatcgccgtggtgctgcagctgagccagcagctgagcggcatcaacgccgtgttctactacagcaccagcatcttcgagaaggccggcgtgcagcagcccgtgtacgccaccatcggcagcggcatcgtgaacaccgccttcaccgtggtgagcgtgagcctgtgcctgctggccccccccgccaagccccagggcggcggcagcgccatcttcccctag

SEQ ID NO: 12989 - DNA, 1671 bp, synthetic construct
  misc_feature 1..1671: note = Description of Artificial Sequence: Synthetic coding sequence
  source 1..1671: mol_type = other DNA
atgcccagcttcgacgaggccctgcagagagtgggcgagttcggcagattccagagaagagtgttcctgctgctgtgcctgaccggcgtgaccttcgccttcctgttcgtgggcgtggtgttcctgggcacccagcccgaccactactggtgcagaggccccagcgccgccgccctggccgagagatgcggctggagccccgaggaggagtggaacagaaccgcccccgccagcagaggccccgagccccccgagagaagaggcagatgccagagatacctgctggaggccgccaacgacagcgccagcgccaccagcgccctgagctgcgccgaccccctggccgccttccccaacagaagcgcccccctggtgccctgcagaggcggctggagatacgcccaggcccacagcaccatcgtgagcgagttcgacctggtgtgcgtgaacgcctggatgctggacctgacccaggccatcctgaacctgggcttcctgaccggcgccttcaccctgggctacgccgccgacagatacggcagaatcgtgatctacctgctgagctgcctgggcgtgggcgtgaccggcgtggtggtggccttcgcccccaacttccccgtgttcgtgatcttcagattcctgcagggcgtgttcggcaagggcacctggatgacctgctacgtgatcgtgaccgagatcgtgggcagcaagcagagaagaatcgtgggcatcgtgatccagatgttcttcaccctgggcatcatcatcctgcccggcatcgcctacttcatccccaactggcagggcatccagctggccatcaccctgcccagcttcctgttcctgctgtactactgggtggtgcccgagagccccagatggctgatcaccagaaagaagggcgacaaggccctgcagatcctgagaagaatcgccaagtgcaacggcaagtacctgagcagcaactacagcgagatcaccgtgaccgacgaggaggtgagcaaccccagcttcctggacctggtgagaaccccccagatgagaaagtgcaccctgatcctgatgttcgcctggttcaccagcgccgtggtgtaccagggcctggtgatgagactgggcatcatcggcggcaacctgtacatcgacttcttcatcagcggcgtggtggagctgcccggcgccctgctgatcctgctgaccatcgagagactgggcagaagactgcccttcgccgccagcaacatcgtggccggcgtggcctgcctggtgaccgccttcctgcccgagggcatcgcctggctgagaaccaccgtggccaccctgggcagactgggcatcaccatggccttcgagatcgtgtacctggtgaacagcgagctgtaccccaccaccctgagaaacttcggcgtgagcctgtgcagcggcctgtgcgacttcggcggcatcatcgcccccttcctgctgttcagactggccgccgtgtggctggagctgcccctgatcatcttcggcatcctggccagcatctgcggcggcctggtgatgctgctgcccgagaccaagggcatcgccctgcccgagaccgtggacgacgtggagaagctgggcagcccccacagctgcaagtgcggcagaaacaagaagacccccgtgagcagaagccacctgtag

SEQ ID NO: 12990 - DNA, 1674 bp, synthetic construct
  misc_feature 1..1674: note = Description of Artificial Sequence: Synthetic coding sequence
  source 1..1674: mol_type = other DNA
atgcccagcttcgacgaggccctgcagagagtgggcgagttcggcagattccagagaagagtgttcctgctgctgtgcctgaccggcgtgaccttcgccttcctgttcgtgggcgtggtgttcctgggcacccagcccgaccactactggtgcagaggccccagcgccgccgccctggccgagagatgcggctggagccccgaggaggagtggaacagaaccgcccccgccagcagaggccccgagccccccgagagaagaggcagatgccagagatacctgctggaggccgccaacgacagcgccagcgccaccagcgccctgagctgcgccgaccccctggccgccttccccaacagaagcgcccccctggtgccctgcagaggcggctggagatacgcccaggcccacagcaccatcgtgagcgagttcgacctggtgtgcgtgaacgcctggatgctggacctgacccaggccatcctgaacctgggcttcctgaccggcgccttcaccctgggctacgccgccgacagatacggcagaatcgtgatctacctgctgagctgcctgggcgtgggcgtgaccggcgtggtggtggccttcgcccccaacttccccgtgttcgtgatcttcagattcctgcagggcgtgttcggcaagggcacctggatgacctgctacgtgatcgtgaccgagatcgtgggcagcaagcagagaagaatcgtgggcatcgtgatccagatgttcttcaccctgggcatcatcatcctgcccggcatcgcctacttcatccccaactggcagggcatccagctggccatcaccctgcccagcttcctgttcctgctgtactactgggtggtgcccgagagccccagatggctgatcaccagaaagaagggcgacaaggccctgcagatcctgagaagaatcgccaagtgcaacggcaagtacctgagcagcaactacagcgagatcaccgtgaccgacgaggaggtgagcaaccccagcttcctggacctggtgagaaccccccagatgagaaagtgcaccctgatcctgatgttcgcctggttcaccagcgccgtggtgtaccagggcctggtgatgagactgggcatcatcggcggcaacctgtacatcgacttcttcatcagcggcgtggtggagctgcccggcgccctgctgatcctgctgaccatcgagagactgggcagaagactgcccttcgccgccagcaacatcgtggccggcgtggcctgcctggtgaccgccttcctgcccgaggccggcatcgcctggctgagaaccaccgtggccaccctgggcagactgggcatcaccatggccttcgagatcgtgtacctggtgaacagcgagctgtaccccaccaccctgagaaacttcggcgtgagcctgtgcagcggcctgtgcgacttcggcggcatcatcgcccccttcctgctgttcagactggccgccgtgtggctggagctgcccctgatcatcttcggcatcctggccagcatctgcggcggcctggtgatgctgctgcccgagaccaagggcatcgccctgcccgagaccgtggacgacgtggagaagctgggcagcccccacagctgcaagtgcggcagaaacaagaagacccccgtgagcagaagccacctgtag

SEQ ID NO: 12991 - DNA, 1017 bp, synthetic construct
  misc_feature 1..1017: note = Description of Artificial Sequence: Synthetic coding sequence
  source 1..1017: mol_type = other DNA
atggagctgagaagcggcagcgtgggcagccaggccgtggccagaagaatggacggcgacagcagagacggcggcggcggcaaggacgccaccggcagcgaggactacgagaacctgcccaccagcgccagcgtgagcacccacatgaccgccggcgccatggccggcatcctggagcacagcgtgatgtaccccgtggacagcgtgaagaccagaatgcagagcctgagccccgaccccaaggcccagtacaccagcatctacggcgccctgaagaagatcatgagaaccgagggcttctggagacccctgagaggcgtgaacgtgatgatcatgggcgccggccccgcccacgccatgtacttcgcctgctacgagaacatgaagagaaccctgaacgacgtgttccaccaccagggcaacagccacctggccaacggcatcgccggcagcatggccaccctgctgcacgacgccgtgatgaaccccgccgaggtggtgaagcagagactgcagatgtacaacagccagcacagaagcgccatcagctgcatcagaaccgtgtggagaaccgagggcctgggcgccttctacagaagctacaccacccagctgaccatgaacatccccttccagagcatccacttcatcacctacgagttcctgcaggagcaggtgaacccccacagaacctacaacccccagagccacatcatcagcggcggcctggccggcgccctggccgccgccgccaccacccccctggacgtgtgcaagaccctgctgaacacccaggagaacgtggccctgagcctggccaacatcagcggcagactgagcggcatggccaacgccttcagaaccgtgtaccagctgaacggcctggccggctacttcaagggcatccaggccagagtgatctaccagatgcccagcaccgccatcagctggagcgtgtacgagttcttcaagtacttcctgaccaagagacagctggagaacagagccccctactag

SEQ ID NO: 12992 - DNA, 2268 bp, synthetic construct
  misc_feature 1..2268: note = Description of Artificial Sequence: Synthetic coding sequence
  source 1..2268: mol_type = other DNA
atggccagaaagctgagcgtgatcctgatcctgaccttcgccctgagcgtgaccaaccccctgcacgagctgaaggccgccgccttcccccagaccaccgagaagatcagccccaactgggagagcggcatcaacgtggacctggccatcagcaccagacagtaccacctgcagcagctgttctacagatacggcgagaacaacagcctgagcgtggagggcttcagaaagctgctgcagaacatcggcatcgacaagatcaagagaatccacatccaccacgaccacgaccaccacagcgaccacgagcaccacagcgaccacgagagacacagcgaccacgagcaccacagcgagcacgagcaccacagcgaccacgaccaccacagccaccacaaccacgccgccagcggcaagaacaagagaaaggccctgtgccccgaccacgacagcgacagcagcggcaaggaccccagaaacagccagggcaagggcgcccacagacccgagcacgccagcggcagaagaaacgtgaaggacagcgtgagcgccagcgaggtgaccagcaccgtgtacaacaccgtgagcgagggcacccacttcctggagaccatcgagacccccagacccggcaagctgttccccaaggacgtgagcagcagcaccccccccagcgtgaccagcaagagcagagtgagcagactggccggcagaaagaccaacgagagcgtgagcgagcccagaaagggcttcatgtacagcagaaacaccaacgagaacccccaggagtgcttcaacgccagcaagctgctgaccagccacggcatgggcatccaggtgcccctgaacgccaccgagttcaactacctgtgccccgccatcatcaaccagatcgacgccagaagctgcctgatccacaccagcgagaagaaggccgagatcccccccaagacctacagcctgcagatcgcctgggtgggcggcttcatcgccatcagcatcatcagcttcctgagcctgctgggcgtgatcctggtgcccctgatgaacagagtgttcttcaagttcctgctgagcttcctggtggccctggccgtgggcaccctgagcggcgacgccttcctgcacctgctgccccacagccacgccagccaccaccacagccacagccacgaggagcccgccatggagatgaagagaggccccctgttcagccacctgagcagccagaacatcgaggagagcgcctacttcgacagcacctggaagggcctgaccgccctgggcggcctgtacttcatgttcctggtggagcacgtgctgaccctgatcaagcagttcaaggacaagaagaagaagaaccagaagaagcccgagaacgacgacgacgtggagatcaagaagcagctgagcaagtacgagagccagctgagcaccaacgaggagaaggtggacaccgacgacagaaccgagggctacctgagagccgacagccaggagcccagccacttcgacagccagcagcccgccgtgctggaggaggaggaggtgatgatcgcccacgcccacccccaggaggtgtacaacgagtacgtgcccagaggctgcaagaacaagtgccacagccacttccacgacaccctgggccagagcgacgacctgatccaccaccaccacgactaccaccacatcctgcaccaccaccaccaccagaaccaccacccccacagccacagccagagatacagcagagaggagctgaaggacgccggcgtggccaccctggcctggatggtgatcatgggcgacggcctgcacaacttcagcgacggcctggccatcggcgccgccttcaccgagggcctgagcagcggcctgagcaccagcgtggccgtgttctgccacgagctgccccacgagctgggcgacttcgccgtgctgctgaaggccggcatgaccgtgaagcaggccgtgctgtacaacgccctgagcgccatgctggcctacctgggcatggccaccggcatcttcatcggccactacgccgagaacgtgagcatgtggatcttcgccctgaccgccggcctgttcatgtacgtggccctggtggacatggtgcccgagatgctgcacaacgacgccagcgaccacggctgcagcagatggggctacttcttcctgcagaacgccggcatgctgctgggcttcggcatcatgctgctgatcagcatcttcgagcacaagatcgtgttcagaatcaacttctag

SEQ ID NO: 12993 - DNA, 1302 bp, synthetic construct
  misc_feature 1..1302: note = Description of Artificial Sequence: Synthetic coding sequence
  source 1..1302: mol_type = other DNA
atgggcatccaggtgcccctgaacgccaccgagttcaactacctgtgccccgccatcatcaaccagatcgacgccagaagctgcctgatccacaccagcgagaagaaggccgagatcccccccaagacctacagcctgcagatcgcctgggtgggcggcttcatcgccatcagcatcatcagcttcctgagcctgctgggcgtgatcctggtgcccctgatgaacagagtgttcttcaagttcctgctgagcttcctggtggccctggccgtgggcaccctgagcggcgacgccttcctgcacctgctgccccacagccacgccagccaccaccacagccacagccacgaggagcccgccatggagatgaagagaggccccctgttcagccacctgagcagccagaacatcgaggagagcgcctacttcgacagcacctggaagggcctgaccgccctgggcggcctgtacttcatgttcctggtggagcacgtgctgaccctgatcaagcagttcaaggacaagaagaagaagaaccagaagaagcccgagaacgacgacgacgtggagatcaagaagcagctgagcaagtacgagagccagctgagcaccaacgaggagaaggtggacaccgacgacagaaccgagggctacctgagagccgacagccaggagcccagccacttcgacagccagcagcccgccgtgctggaggaggaggaggtgatgatcgcccacgcccacccccaggaggtgtacaacgagtacgtgcccagaggctgcaagaacaagtgccacagccacttccacgacaccctgggccagagcgacgacctgatccaccaccaccacgactaccaccacatcctgcaccaccaccaccaccagaaccaccacccccacagccacagccagagatacagcagagaggagctgaaggacgccggcgtggccaccctggcctggatggtgatcatgggcgacggcctgcacaacttcagcgacggcctggccatcggcgccgccttcaccgagggcctgagcagcggcctgagcaccagcgtggccgtgttctgccacgagctgccccacgagctgggcgacttcgccgtgctgctgaaggccggcatgaccgtgaagcaggccgtgctgtacaacgccctgagcgccatgctggcctacctgggcatggccaccggcatcttcatcggccactacgccgagaacgtgagcatgtggatcttcgccctgaccgccggcctgttcatgtacgtggccctggtggacatggtgagcttctag

SEQ ID NO: 12994 - DNA, 1233 bp, synthetic construct
  misc_feature 1..1233: note = Description of Artificial Sequence: Synthetic coding sequence
  source 1..1233: mol_type = other DNA
atgggcatccaggtgcccctgaacgccaccgagttcaactacctgtgccccgccatcatcaaccagatcgacgccagaagctgcctgatccacaccagcgagaagaaggccgagatcccccccaagacctacagcctgcagatcgcctgggtgggcggcttcatcgccatcagcatcatcagcttcctgagcctgctgggcgtgatcctggtgcccctgatgaacagagtgttcttcaagttcctgctgagcttcctggtggccctggccgtgggcaccctgagcggcgacgccttcctgcacctgctgccccacagccacgccagccaccaccacagccacagccacgaggagcccgccatggagatgaagagaggccccctgttcagccacctgagcagccagaacatcgaggagagcgcctacttcgacagcacctggaagggcctgaccgccctgggcggcctgtacttcatgttcctggtggagcacgtgctgaccctgatcaagcagttcaaggacaagaagaagaagaaccagaagaagcccgagaacgacgacgacgtggagatcaagaagcagctgagcaagtacgagagccagctgagcaccaacgaggagaaggtggacaccgacgacagaaccgagggctacctgagagccgacagccaggagcccagccacttcgacagccagcagcccgccgtgctggaggaggaggaggtgatgatcgcccacgcccacccccaggaggtgtacaacgagtacgtgcccagaggctgcaagaacaagtgccacagccacttccacgacaccctgggccagagcgacgacctgatccaccaccaccacgactaccaccacatcctgcaccaccaccaccaccagaaccaccacccccacagccacagccagagatacagcagagaggagctgaaggacgccggcgtggccaccctggcctggatggtgatcatgggcgacggcctgcacaacttcagcgacggcctggccatcggcgccgccttcaccgagggcctgagcagcggcctgagcaccagcgtggccctggtggacatggtgcccgagatgctgcacaacgacgccagcgaccacggctgcagcagatggggctacttcttcctgcagaacgccggcatgctgctgggcttcggcatcatgctgctgatcagcatcttcgagcacaagatcgtgttcagaatcaacttctag

SEQ ID NO: 12995 - DNA, 1833 bp, synthetic construct
  misc_feature 1..1833: note = Description of Artificial Sequence: Synthetic coding sequence
  source 1..1833: mol_type = other DNA
atggacacccccagaggcatcggcaccttcgtggtgtgggactacgtggtgttcgccggcatgctggtgatcagcgccgccatcggcatctactacgccttcgccggcggcggccagcagaccagcaaggacttcctgatgggcggcagaagaatgaccgccgtgcccgtggccctgagcctgaccgccagcttcatgagcgccgtgaccgtgctgggcacccccagcgaggtgtacagattcggcgccatcttcagcatcttcgccttcacctacttcttcgtggtggtgatcagcgccgaggtgttcctgcccgtgttctacaagctgggcatcaccagcacctacgagtacctggagctgagattcaacaagtgcgtgagactgtgcggcaccgtgctgttcatcgtgcagaccatcctgtacaccggcatcgtgatctacgcccccgccctggccctgaaccaggtgaccggcttcgacctgtggggcgccgtggtggccaccggcgtggtgtgcaccttctactgcaccctgggcggcctgaaggccgtgatctggaccgacgtgttccaggtgggcatcatggtggccggcttcgccagcgtgatcatccaggccgtggtgatgcagggcggcatcagcaccatcctgaacgacgcctacgacggcggcagactgaacttctggaacttcaaccccaaccccctgcagagacacaccttctggaccatcatcatcggcggcaccttcacctggaccagcatctacggcgtgaaccagagccaggtgcagagatacatcagctgcaagagcagattccaggccaagctgagcctgtacatcaacctggtgggcctgtgggccatcctgacctgcagcgtgttctgcggcctggccctgtacagcagataccacgactgcgacccctggaccgccaagaaggtgagcgcccccgaccagctgatgccctacctggtgctggacatcctgcaggactaccccggcctgcccggcctgttcgtggcctgcgcctacagcggcaccctgagcaccgtgagcagcagcatcaacgccctggccgccgtgaccgtggaggacctgatcaagccctacttcagaagcctgagcgagagaagcctgagctggatcagccagggcatgagcgtggtgtacggcgccctgtgcatcggcatggccgccctggccagcctgatgggcgccctgctgcaggccgccctgagcgtgttcggcatggtgggcggccccctgatgggcctgttcgccctgggcatcctggtgcccttcgccaacagcatcggcgccctggtgggcctgatggccggcttcgccatcagcctgtgggtgggcatcggcgcccagatctacccccccctgcccgagagaaccctgcccctgcacctggacatccagggctgcaacagcacctacaacgagaccaacctgatgaccaccaccgagatgcccttcaccaccagcgtgttccagatctacaacgtgcagagaacccccctgatggacaactggtacagcctgagctacctgtacttcagcaccgtgggcaccctggtgaccctgctggtgggcatcctggtgagcctgagcaccggcggcagaaagcagaacctggaccccagatacatcctgaccaaggaggacttcctgagcaacttcgacatcttcaagaagaagaagcacgtgctgagctacaagagccaccccgtggaggacggcggcaccgacaaccccgccttcaaccacatcgagctgaacagcgaccagagcggcaagagcaacggcaccagactgtag

SEQ ID NO: 12996 - DNA, 1071 bp, synthetic construct
  misc_feature 1..1071: note = Description of Artificial Sequence: Synthetic coding sequence
  source 1..1071: mol_type = other DNA
atggacatggccgacgagcccctgaacggcagccacacctggctgagcatccccttcgacctgaacggcagcgtggtgagcaccaacaccagcaaccagaccgagccctactacgacctgaccagcaacgccgtgctgaccttcatctacttcgtggtgtgcatcatcggcctgtgcggcaacaccctggtgatctacgtgatcctgagatacgccaagatgaagaccatcaccaacatctacatcctgaacctggccatcgccgacgagctgttcatgctgggcctgcccttcctggccatgcaggtggccctggtgcactggcccttcggcaaggccatctgcagagtggtgatgaccgtggacggcatcaaccagttcaccagcatcttctgcctgaccgtgatgagcatcgacagatacctggccgtggtgcaccccatcaagagcgccaagtggagaagacccagaaccgccaagatgatcaccatggccgtgtggggcgtgagcctgctggtgatcctgcccatcatgatctacgccggcctgagaagcaaccagtggggcagaagcagctgcaccatcaactggcccggcgagagcggcgcctggtacaccggcttcatcatctacaccttcatcctgggcttcctggtgcccctgaccatcatctgcctgtgctacctgttcatcatcatcaaggtgaagagcagcggcatcagagtgggcagcagcaagagaaagaagagcgagaagaaggtgaccagaatggtgagcatcgtggtggccgtgttcatcttctgctggctgcccttctacatcttcaacgtgagcagcgtgagcatggccatcagccccacccccgccctgaagggcatgttcgacttcgtggtggtgctgacctacgccaacagctgcgccaaccccatcctgtacgccttcctgagcgacaacttcaagaagagcttccagaacgtgctgtgcctggtgaaggtggacaacagcaagagcggcgaggagggcagctgcctggacatgatcttcagaaacaacaagaacagaaagaagtag

SEQ ID NO: 12997 - DNA, 1110 bp, synthetic construct
  misc_feature 1..1110: note = Description of Artificial Sequence: Synthetic coding sequence
  source 1..1110: mol_type = other DNA
atggacatggccgacgagcccctgaacggcagccacacctggctgagcatccccttcgacctgaacggcagcgtggtgagcaccaacaccagcaaccagaccgagccctactacgacctgaccagcaacgccgtgctgaccttcatctacttcgtggtgtgcatcatcggcctgtgcggcaacaccctggtgatctacgtgatcctgagatacgccaagatgaagaccatcaccaacatctacatcctgaacctggccatcgccgacgagctgttcatgctgggcctgcccttcctggccatgcaggtggccctggtgcactggcccttcggcaaggccatctgcagagtggtgatgaccgtggacggcatcaaccagttcaccagcatcttctgcctgaccgtgatgagcatcgacagatacctggccgtggtgcaccccatcaagagcgccaagtggagaagacccagaaccgccaagatgatcaccatggccgtgtggggcgtgagcctgctggtgatcctgcccatcatgatctacgccggcctgagaagcaaccagtggggcagaagcagctgcaccatcaactggcccggcgagagcggcgcctggtacaccggcttcatcatctacaccttcatcctgggcttcctggtgcccctgaccatcatctgcctgtgctacctgttcatcatcatcaaggtgaagagcagcggcatcagagtgggcagcagcaagagaaagaagagcgagaagaaggtgaccagaatggtgagcatcgtggtggccgtgttcatcttctgctggctgcccttctacatcttcaacgtgagcagcgtgagcatggccatcagccccacccccgccctgaagggcatgttcgacttcgtggtggtgctgacctacgccaacagctgcgccaaccccatcctgtacgccttcctgagcgacaacttcaagaagagcttccagaacgtgctgtgcctggtgaaggtgagcggcaccgacgacggcgagagaagcgacagcaagcaggacaagagcagactgaacgagaccaccgagacccagagaaccctgctgaacggcgacctgcagaccagcatctag

SEQ ID NO: 12998 - DNA, 3315 bp, synthetic construct
  misc_feature 1..3315: note = Description of Artificial Sequence: Synthetic coding sequence
  source 1..3315: mol_type = other DNA
atgcaggcccagcagctgccctacgagttcttcagcgaggagaacgcccccaagtggagaggcctgctggtgcccgccctgaagaaggtgcagggccaggtgcaccccaccctggagagcaacgacgacgccctgcagtacgtggaggagctgatcctgcagctgctgaacatgctgtgccaggcccagcccagaagcgccagcgacgtggaggagagagtgcagaagagcttcccccaccccatcgacaagtgggccatcgccgacgcccagagcgccatcgagaagagaaagagaagaaaccccctgagcctgcccgtggagaagatccaccccctgctgaaggaggtgctgggctacaagatcgaccaccaggtgagcgtgtacatcgtggccgtgctggagtacatcagcgccgacatcctgaagctggtgggcaactacgtgagaaacatcagacactacgagatcaccaagcaggacatcaaggtggccatgtgcgccgacaaggtgctgatggacatgttccaccaggacgtggaggacatcaacatcctgagcctgaccgacgaggagcccagcaccagcggcgagcagacctactacgacctggtgaaggccttcatggccgagatcagacagtacatcagagagctgaacctgatcatcaaggtgttcagagagcccttcgtgagcaacagcaagctgttcagcgccaacgacgtggagaacatcttcagcagaatcgtggacatccacgagctgagcgtgaagctgctgggccacatcgaggacaccgtggagatgaccgacgagggcagcccccaccccctggtgggcagctgcttcgaggacctggccgaggagctggccttcgacccctacgagagctacgccagagacatcctgagacccggcttccacgacagattcctgagccagctgagcaagcccggcgccgccctgtacctgcagagcatcggcgagggcttcaaggaggccgtgcagtacgtgctgcccagactgctgctggcccccgtgtaccactgcctgcactacttcgagctgctgaagcagctggaggagaagagcgaggaccaggaggacaaggagtgcctgaagcaggccatcaccgccctgctgaacgtgcagagcggcatggagaagatctgcagcaagagcctggccaagagaagactgagcgagagcgcctgcagattctacagccagcagatgaagggcaagcagctggccatcaagaagatgaacgagatccagaagaacatcgacggctgggagggcaaggacatcggccagtgctgcaacgagttcatcatggagggcaccctgaccagagtgggcgccaagcacgagagacacatcttcctgttcgacggcctgatgatctgctgcaagagcaaccacggccagcccagactgcccggcgccagcaacgccgagtacagactgaaggagaagttcttcatgagaaaggtgcagatcaacgacaaggacgacaccaacgagtacaagcacgccttcgagatcatcctgaaggacgagaacagcgtgatcttcagcgccaagagcgccgaggagaagaacaactggatggccgccctgatcagcctgcagtacagaagcaccctggagagaatgctggacgtgaccatgctgcaggaggagaaggaggagcagatgagactgcccagcgccgacgtgtacagattcgccgagcccgacagcgaggagaacatcatcttcgaggagaacatgcagcccaaggccggcatccccatcatcaaggccggcaccgtgatcaagctgatcgagagactgacctaccacatgtacgccgaccccaacttcgtgagaaccttcctgaccacctacagaagcttctgcaagccccaggagctgctgagcctgatcatcgagagattcgagatccccgagcccgagcccaccgaggccgacagaatcgccatcgagaacggcgaccagcccctgagcgccgagctgaagagattcagaaaggagtacatccagcccgtgcagctgagagtgctgaacgtgtgcagacactgggtggagcaccacttctacgacttcgagagagacgcctacctgctgcagagaatggaggagttcatcggcaccgtgagaggcaaggccatgaagaagtgggtggagagcatcaccaagatcatccagagaaagaagatcgccagagacaacggccccggccacaacatcaccttccagagcagcccccccaccgtggagtggcacatcagcagacccggccacatcgagaccttcgacctgctgaccctgcaccccatcgagatcgccagacagctgaccctgctggagagcgacctgtacagagccgtgcagcccagcgagctggtgggcagcgtgtggaccaaggaggacaaggagatcaacagccccaacctgctgaagatgatcagacacaccaccaacctgaccctgtggttcgagaagtgcatcgtggagaccgagaacctggaggagagagtggccgtggtgagcagaatcatcgagatcctgcaggtgttccaggagctgaacaacttcaacggcgtgctggaggtggtgagcgccatgaacagcagccccgtgtacagactggaccacaccttcgagcagatccccagcagacagaagaagatcctggaggaggcccacgagctgagcgaggaccactacaagaagtacctggccaagctgagaagcatcaaccccccctgcgtgcccttcttcggcatctacctgaccaacatcctgaagaccgaggagggcaaccccgaggtgctgaagagacacggcaaggagctgatcaacttcagcaagagaagaaaggtggccgagatcaccggcgagatccagcagtaccagaaccagccctactgcctgagagtggagagcgacatcaagagattcttcgagaacctgaaccccatgggcaacagcatggagaaggagttcaccgactacctgttcaacaagagcctggagatcgagcccagaaaccccaagcccctgcccagattccccaagaagtacagctaccccctgaagagccccggcgtgagacccagcaaccccagacccggcaccatgagacaccccacccccctgcagcaggagcccagaaagatcagctacagcagaatccccgagagcgagaccgagagcaccgccagcgcccccaacagccccaacaccgtgaacaccagcgcctgcttctggtgcttccagtaccacagatgcctgcagtgcatctag

SEQ ID NO: 12999 - DNA, 3957 bp, synthetic construct
  misc_feature 1..3957: note = Description of Artificial Sequence: Synthetic coding sequence
  source 1..3957: mol_type = other DNA
atgcaggcccagcagctgccctacgagttcttcagcgaggagaacgcccccaagtggagaggcctgctggtgcccgccctgaagaaggtgcagggccaggtgcaccccaccctggagagcaacgacgacgccctgcagtacgtggaggagctgatcctgcagctgctgaacatgctgtgccaggcccagcccagaagcgccagcgacgtggaggagagagtgcagaagagcttcccccaccccatcgacaagtgggccatcgccgacgcccagagcgccatcgagaagagaaagagaagaaaccccctgagcctgcccgtggagaagatccaccccctgctgaaggaggtgctgggctacaagatcgaccaccaggtgagcgtgtacatcgtggccgtgctggagtacatcagcgccgacatcctgaagctggtgggcaactacgtgagaaacatcagacactacgagatcaccaagcaggacatcaaggtggccatgtgcgccgacaaggtgctgatggacatgttccaccaggacgtggaggacatcaacatcctgagcctgaccgacgaggagcccagcaccagcggcgagcagacctactacgacctggtgaaggccttcatggccgagatcagacagtacatcagagagctgaacctgatcatcaaggtgttcagagagcccttcgtgagcaacagcaagctgttcagcgccaacgacgtggagaacatcttcagcagaatcgtggacatccacgagctgagcgtgaagctgctgggccacatcgaggacaccgtggagatgaccgacgagggcagcccccaccccctggtgggcagctgcttcgaggacctggccgaggagctggccttcgacccctacgagagctacgccagagacatcctgagacccggcttccacgacagattcctgagccagctgagcaagcccggcgccgccctgtacctgcagagcatcggcgagggcttcaaggaggccgtgcagtacgtgctgcccagactgctgctggcccccgtgtaccactgcctgcactacttcgagctgctgaagcagctggaggagaagagcgaggaccaggaggacaaggagtgcctgaagcaggccatcaccgccctgctgaacgtgcagagcggcatggagaagatctgcagcaagagcctggccaagagaagactgagcgagagcgcctgcagattctacagccagcagatgaagggcaagcagctggccatcaagaagatgaacgagatccagaagaacatcgacggctgggagggcaaggacatcggccagtgctgcaacgagttcatcatggagggcaccctgaccagagtgggcgccaagcacgagagacacatcttcctgttcgacggcctgatgatctgctgcaagagcaaccacggccagcccagactgcccggcgccagcaacgccgagtacagactgaaggagaagttcttcatgagaaaggtgcagatcaacgacaaggacgacaccaacgagtacaagcacgccttcgagatcatcctgaaggacgagaacagcgtgatcttcagcgccaagagcgccgaggagaagaacaactggatggccgccctgatcagcctgcagtacagaagcaccctggagagaatgctggacgtgaccatgctgcaggaggagaaggaggagcagatgagactgcccagcgccgacgtgtacagattcgccgagcccgacagcgaggagaacatcatcttcgaggagaacatgcagcccaaggccggcatccccatcatcaaggccggcaccgtgatcaagctgatcgagagactgacctaccacatgtacgccgaccccaacttcgtgagaaccttcctgaccacctacagaagcttctgcaagccccaggagctgctgagcctgatcatcgagagattcgagatccccgagcccgagcccaccgaggccgacagaatcgccatcgagaacggcgaccagcccctgagcgccgagctgaagagattcagaaaggagtacatccagcccgtgcagctgagagtgctgaacgtgtgcagacactgggtggagcaccacttctacgacttcgagagagacgcctacctgctgcagagaatggaggagttcatcggcaccgtgagaggcaaggccatgaagaagtgggtggagagcatcaccaagatcatccagagaaagaagatcgccagagacaacggccccggccacaacatcaccttccagagcagcccccccaccgtggagtggcacatcagcagacccggccacatcgagaccttcgacctgctgaccctgcaccccatcgagatcgccagacagctgaccctgctggagagcgacctgtacagagccgtgcagcccagcgagctggtgggcagcgtgtggaccaaggaggacaaggagatcaacagccccaacctgctgaagatgatcagacacaccaccaacctgaccctgtggttcgagaagtgcatcgtggagaccgagaacctggaggagagagtggccgtggtgagcagaatcatcgagatcctgcaggtgttccaggagctgaacaacttcaacggcgtgctggaggtggtgagcgccatgaacagcagccccgtgtacagactggaccacaccttcgagcagatccccagcagacagaagaagatcctggaggaggcccacgagctgagcgaggaccactacaagaagtacctggccaagctgagaagcatcaaccccccctgcgtgcccttcttcggcatctacctgaccaacatcctgaagaccgaggagggcaaccccgaggtgctgaagagacacggcaaggagctgatcaacttcagcaagagaagaaaggtggccgagatcaccggcgagatccagcagtaccagaaccagccctactgcctgagagtggagagcgacatcaagagattcttcgagaacctgaaccccatgggcaacagcatggagaaggagttcaccgactacctgttcaacaagagcctggagatcgagcccagaaaccccaagcccctgcccagattccccaagaagtacagctaccccctgaagagccccggcgtgagacccagcaaccccagacccggcaccatgagacaccccacccccctgcagcaggagcccagaaagatcagctacagcagaatccccgagagcgagaccgagagcaccgccagcgcccccaacagccccagaacccccctgacccccccccccgccagcggcgccagcagcaccaccgacgtgtgcagcgtgttcgacagcgaccacagcagccccttccacagcagaagcgccagcgtgagcagcatcagcctgaccaagggcaccgacgaggtgcccgtgcccccccccgtgccccccagaagaagacccgagagcgcccccgccgagagcagccccagcaagatcatgagcaagcacctggacagcccccccgccatcccccccagacagcccaccagcaaggcctacagccccagatacagcatcagcgacagaaccagcatcagcgacccccccgagagcccccccctgctgccccccagagagcccgtgagaacccccgacgtgttcagcagcagccccctgcacctgcagcccccccccctgggcaagaagagcgaccacggcaacgccttcttccccaacagccccagccccttcacccccccccccccccagacccccagcccccacggcaccagaagacacctgcccagcccccccctgacccaggaggtggacctgcacagcatcgccggcccccccgtgccccccagacagagcaccagccagcacatccccaagctgccccccaagacctacaagagagagcacacccaccccagcatgcacagagacggcccccccctgctggagaacgcccacagcagctag

SEQ ID NO: 13000 - DNA, 4002 bp, synthetic construct
  misc_feature 1..4002: note = Description of Artificial Sequence: Synthetic coding sequence
  source 1..4002: mol_type = other DNA
atgcaggcccagcagctgccctacgagttcttcagcgaggagaacgcccccaagtggagaggcctgctggtgcccgccctgaagaaggtgcagggccaggtgcaccccaccctggagagcaacgacgacgccctgcagtacgtggaggagctgatcctgcagctgctgaacatgctgtgccaggcccagcccagaagcgccagcgacgtggaggagagagtgcagaagagcttcccccaccccatcgacaagtgggccatcgccgacgcccagagcgccatcgagaagagaaagagaagaaaccccctgagcctgcccgtggagaagatccaccccctgctgaaggaggtgctgggctacaagatcgaccaccaggtgagcgtgtacatcgtggccgtgctggagtacatcagcgccgacatcctgaagctggtgggcaactacgtgagaaacatcagacactacgagatcaccaagcaggacatcaaggtggccatgtgcgccgacaaggtgctgatggacatgttccaccaggacgtggaggacatcaacatcctgagcctgaccgacgaggagcccagcaccagcggcgagcagacctactacgacctggtgaaggccttcatggccgagatcagacagtacatcagagagctgaacctgatcatcaaggtgttcagagagcccttcgtgagcaacagcaagctgttcagcgccaacgacgtggagaacatcttcagcagaatcgtggacatccacgagctgagcgtgaagctgctgggccacatcgaggacaccgtggagatgaccgacgagggcagcccccaccccctggtgggcagctgcttcgaggacctggccgaggagctggccttcgacccctacgagagctacgccagagacatcctgagacccggcttccacgacagattcctgagccagctgagcaagcccggcgccgccctgtacctgcagagcatcggcgagggcttcaaggaggccgtgcagtacgtgctgcccagactgctgctggcccccgtgtaccactgcctgcactacttcgagctgctgaagcagctggaggagaagagcgaggaccaggaggacaaggagtgcctgaagcaggccatcaccgccctgctgaacgtgcagagcggcatggagaagatctgcagcaagagcctggccaagagaagactgagcgagagcgcctgcagattctacagccagcagatgaagggcaagcagctggccatcaagaagatgaacgagatccagaagaacatcgacggctgggagggcaaggacatcggccagtgctgcaacgagttcatcatggagggcaccctgaccagagtgggcgccaagcacgagagacacatcttcctgttcgacggcctgatgatctgctgcaagagcaaccacggccagcccagactgcccggcgccagcaacgccgagtacagactgaaggagaagttcttcatgagaaaggtgcagatcaacgacaaggacgacaccaacgagtacaagcacgccttcgagatcatcctgaaggacgagaacagcgtgatcttcagcgccaagagcgccgaggagaagaacaactggatggccgccctgatcagcctgcagtacagaagcaccctggagagaatgctggacgtgaccatgctgcaggaggagaaggaggagcagatgagactgcccagcgccgacgtgtacagattcgccgagcccgacagcgaggagaacatcatcttcgaggagaacatgcagcccaaggccggcatccccatcatcaaggccggcaccgtgatcaagctgatcgagagactgacctaccacatgtacgccgaccccaacttcgtgagaaccttcctgaccacctacagaagcttctgcaagccccaggagctgctgagcctgatcatcgagagattcgagatccccgagcccgagcccaccgaggccgacagaatcgccatcgagaacggcgaccagcccctgagcgccgagctgaagagattcagaaaggagtacatccagcccgtgcagctgagagtgctgaacgtgtgcagacactgggtggagcaccacttctacgacttcgagagagacgcctacctgctgcagagaatggaggagttcatcggcaccgtgagaggcaaggccatgaagaagtgggtggagagcatcaccaagatcatccagagaaagaagatcgccagagacaacggccccggccacaacatcaccttccagagcagcccccccaccgtggagtggcacatcagcagacccggccacatcgagaccttcgacctgctgaccctgcaccccatcgagatcgccagacagctgaccctgctggagagcgacctgtacagagccgtgcagcccagcgagctggtgggcagcgtgtggaccaaggaggacaaggagatcaacagccccaacctgctgaagatgatcagacacaccaccaacctgaccctgtggttcgagaagtgcatcgtggagaccgagaacctggaggagagagtggccgtggtgagcagaatcatcgagatcctgcaggtgttccaggagctgaacaacttcaacggcgtgctggaggtggtgagcgccatgaacagcagccccgtgtacagactggaccacaccttcgagcagatccccagcagacagaagaagatcctggaggaggcccacgagctgagcgaggaccactacaagaagtacctggccaagctgagaagcatcaaccccccctgcgtgcccttcttcggcatctacctgaccaacatcctgaagaccgaggagggcaaccccgaggtgctgaagagacacggcaaggagctgatcaacttcagcaagagaagaaaggtggccgagatcaccggcgagatccagcagtaccagaaccagccctactgcctgagagtggagagcgacatcaagagattcttcgagaacctgaaccccatgggcaacagcatggagaaggagttcaccgactacctgttcaacaagagcctggagatcgagcccagaaaccccaagcccctgcccagattccccaagaagtacagctaccccctgaagagccccggcgtgagacccagcaaccccagacccggcaccatgagacaccccacccccctgcagcaggagcccagaaagatcagctacagcagaatccccgagagcgagaccgagagcaccgccagcgcccccaacagccccagaacccccctgacccccccccccgccagcggcgccagcagcaccaccgacgtgtgcagcgtgttcgacagcgaccacagcagccccttccacagcagcaacgacaccgtgttcatccaggtgaccctgccccacggccccagaagcgccagcgtgagcagcatcagcctgaccaagggcaccgacgaggtgcccgtgcccccccccgtgccccccagaagaagacccgagagcgcccccgccgagagcagccccagcaagatcatgagcaagcacctggacagcccccccgccatcccccccagacagcccaccagcaaggcctacagccccagatacagcatcagcgacagaaccagcatcagcgacccccccgagagcccccccctgctgccccccagagagcccgtgagaacccccgacgtgttcagcagcagccccctgcacctgcagcccccccccctgggcaagaagagcgaccacggcaacgccttcttccccaacagccccagccccttcacccccccccccccccagacccccagcccccacggcaccagaagacacctgcccagcccccccctgacccaggaggtggacctgcacagcatcgccggcccccccgtgccccccagacagagcaccagccagcacatccccaagctgccccccaagacctacaagagagagcacacccaccccagcatgcacagagacggcccccccctgctggagaacgcccacagcagctag

SEQ ID NO: 13001 - DNA, 4002 bp, synthetic construct; identical to SEQ ID NO: 13000
  misc_feature 1..4002: note = Description of Artificial Sequence: Synthetic coding sequence
  source 1..4002: mol_type = other DNA

SEQ ID NO: 13002 - DNA, 945 bp, synthetic construct
  misc_feature 1..945: note = Description of Artificial Sequence: Synthetic coding sequence
  source 1..945: mol_type = other DNA
atgctgtgccaggcccagcccagaagcgccagcgacgtggaggagagagtgcagaagagcttcccccaccccatcgacaagtgggccatcgccgacgcccagagcgccatcgagaagagaaagagaagaaaccccctgagcctgcccgtggagaagatccaccccctgctgaaggaggtgctgggctacaagatcgaccaccaggtgagcgtgtacatcgtggccgtgctggagtacatcagcgccgacatcctgaagctggtgggcaactacgtgagaaacatcagacactacgagatcaccaagcaggacatcaaggtggccatgtgcgccgacaaggtgctgatggacatgttccaccaggacgtggaggacatcaacatcctgagcctgaccgacgaggagcccagcaccagcggcgagcagacctactacgacctggtgaaggccttcatggccgagatcagacagtacatcagagagctgaacctgatcatcaaggtgttcagagagcccttcgtgagcaacagcaagctgttcagcgccaacgacgtggagaacatcttcagcagaatcgtggacatccacgagctgagcgtgaagctgctgggccacatcgaggacaccgtggagatgaccgacgagggcagcccccaccccctggtgggcagctgcttcgaggacctggccgaggagctggccttcgacccctacgagagctacgccagagacatcctgagacccggcttccacgacagattcctgagccagctgagcaagcccggcgccgccctgtacctgcagagcatcggcgagggcttcaaggaggccgtgcagtacgtgctgcccagactgctgctggcccccgtgtaccactgcctgcactacttcgagctgctgaagttccccttcggcgacctgagcagactgagagacagcgtgtag

SEQ ID NO: 13003 - DNA, 3153 bp, synthetic construct
  misc_feature 1..3153: note = Description of Artificial Sequence: Synthetic coding sequence
  source 1..3153: mol_type = other DNA
atgaccgacgagggcagcccccaccccctggtgggcagctgcttcgaggacctggccgaggagctggccttcgacccctacgagagctacgccagagacatcctgagacccggcttccacgacagattcctgagccagctgagcaagcccggcgccgccctgtacctgcagagcatcggcgagggcttcaaggaggccgtgcagtacgtgctgcccagactgctgctggcccccgtgtaccactgcctgcactacttcgagctgctgaagcagctggaggagaagagcgaggaccaggaggacaaggagtgcctgaagcaggccatcaccgccctgctgaacgtgcagagcggcatggagaagatctgcagcaagagcctggccaagagaagactgagcgagagcgcctgcagattctacagccagcagatgaagggcaagcagctggccatcaagaagatgaacgagatccagaagaacatcgacggctgggagggcaaggacatcggccagtgctgcaacgagttcatcatggagggcaccctgaccagagtgggcgccaagcacgagagacacatcttcctgttcgacggcctgatgatctgctgcaagagcaaccacggccagcccagactgcccggcgccagcaacgccgagtacagactgaaggagaagttcttcatgagaaaggtgcagatcaacgacaaggacgacaccaacgagtacaagcacgccttcgagatcatcctgaaggacgagaacagcgtgatcttcagcgccaagagcgccgaggagaagaacaactggatggccgccctgatcagcctgcagtacagaagcaccctggagagaatgctggacgtgaccatgctgcaggaggagaaggaggagcagatgagactgcccagcgccgacgtgtacagattcgccgagcccgacagcgaggagaacatcatcttcgaggagaacatgcagcccaaggccggcatccccatcatcaaggccggcaccgtgatcaagctgatcgagagactgacctaccacatgtacgccgaccccaacttcgtgagaaccttcctgaccacctacagaagcttctgcaagccccaggagctgctgagcctgatcatcgagagattcgagatccccgagcccgagcccaccgaggccgacagaatcgccatcgagaacggcgaccagcccctgagcgccgagctgaagagattcagaaaggagtacatccagcccgtgcagctgagagtgctgaacgtgtgcagacactgggtggagcaccacttctacgacttcgagagagacgcctacctgctgcagagaatggaggagttcatcggcaccgtgagaggcaaggccatgaagaagtgggtggagagcatcaccaagatcatccagagaaagaagatcgccagagacaacggccccggccacaacatcaccttccagagcagcccccccaccgtggagtggcacatcagcagacccggccacatcgagaccttcgacctgctgaccctgcaccccatcgagatcgccagacagctgaccctgctggagagcgacctgtacagagccgtgcagcccagcgagctggtgggcagcgtgtggaccaaggaggacaaggagatcaacagccccaacctgctgaagatgatcagacacaccaccaacctgaccctgtggttcgagaagtgcatcgtggagaccgagaacctggaggagagagtggccgtggtgagcagaatcatcgagatcctgcaggtgttccaggagctgaacaacttcaacggcgtgctggaggtggtgagcgccatgaacagcagccccgtgtacagactggaccacaccttcgagcagatccccagcagacagaagaagatcctggaggaggcccacgagctgagcgaggaccactacaagaagtacctggccaagctgagaagcatcaaccccccctgcgtgcccttcttcggcatctacctgaccaacatcctgaagaccgaggagggcaaccccgaggtgctgaagagacacggcaaggagctgatcaacttcagcaagagaagaaaggtggccgagatcaccggcgagatccagcagtaccagaaccagccctactgcctgagagtggagagcgacatcaagagattcttcgagaacctgaaccccatgggcaacagcatggagaaggagttcaccgactacctgttcaacaagagcctggagatcgagcccagaaaccccaagcccctgcccagattccccaagaagtacagctaccccctgaagagccccggcgtgagacccagcaaccccagacccggcaccatgagacaccccacccccctgcagcaggagcccagaaagatcagctacagcagaatccccgagagcgagaccgagagcaccgccagcgcccccaacagccccagaacccccctgacccccccccccgccagcggcgccagcagcaccaccgacgtgtgcagcgtgttcgacagcgaccacagcagccccttccacagcagaagcgccagcgtgagcagcatcagcctgaccaagggcaccgacgaggtgcccgtgcccccccccgtgccccccagaagaagacccgagagcgcccccgccgagagcagccccagcaagatcatgagcaagcacctggacagcccccccgccatcccccccagacagcccaccagcaaggcctacagccccagatacagcatcagcgacagaaccagcatcagcgacccccccgagagcccccccctgctgccccccagagagcccgtgagaacccccgacgtgttcagcagcagccccctgcacctgcagcccccccccctgggcaagaagagcgaccacggcaacgccttcttccccaacagccccagccccttcacccccccccccccccagacccccagcccccacggcaccagaagacacctgcccagcccccccctgacccaggaggtggacctgcacagcatcgccggcccccccgtgccccccagacagagcaccagccagcacatccccaagctgccccccaagacctacaagagagagcacacccaccccagcatgcacagagacggcccccccctgctggagaacgcccacagcagctag

SEQ ID NO: 13004 - DNA, 2358 bp, synthetic construct
  misc_feature 1..2358: note = Description of Artificial Sequence: Synthetic coding sequence
  source 1..2358: mol_type = other DNA
atgagcgaccaggaccacagcatggacgagatgaccgccgtggtgaagatcgagaagggcgtgggcggcaacaacggcggcaacggcaacggcggcggcgccttcagccaggccagaagcagcagcaccggcagcagcagcagcaccggcggcggcggccaggagagccagcccagccccctggccctgctggccgccacctgcagcagaatcgagagccccaacgagaacagcaacaacagccagggccccagccagagcggcggcaccggcgagctggacctgaccgccacccagctgagccagggcgccaacggctggcagatcatcagcagcagcagcggcgccacccccaccagcaaggagcagagcggcagcagcaccaacggcagcaacggcagcgagagcagcaagaacagaaccgtgagcggcggccagtacgtggtggccgccgcccccaacctgcagaaccagcaggtgctgaccggcctgcccggcgtgatgcccaacatccagtaccaggtgatcccccagttccagaccgtggacggccagcagctgcagttcgccgccaccggcgcccaggtgcagcaggacggcagcggccagatccagatcatccccggcgccaaccagcagatcatcaccaacagaggcagcggcggcaacatcatcgccgccatgcccaacctgctgcagcaggccgtgcccctgcagggcctggccaacaacgtgctgagcggccagacccagtacgtgaccaacgtgcccgtggccctgaacggcaacatcaccctgctgcccgtgaacagcgtgagcgccgccaccctgacccccagcagccaggccgtgaccatcagcagcagcggcagccaggagagcggcagccagcccgtgaccagcggcaccaccatcagcagcgccagcctggtgagcagccaggccagcagcagcagcttcttcaccaacgccaacagctacagcaccaccaccaccaccagcaacatgggcatcatgaacttcaccaccagcggcagcagcggcaccaacagccagggccagaccccccagagagtgagcggcctgcagggcagcgacgccctgaacatccagcagaaccagaccagcggcggcagcctgcaggccggccagcagaaggagggcgagcagaaccagcagacccagcagcagcagatcctgatccagccccagctggtgcagggcggccaggccctgcaggccctgcaggccgcccccctgagcggccagaccttcaccacccaggccatcagccaggagaccctgcagaacctgcagctgcaggccgtgcccaacagcggccccatcatcatcagaacccccaccgtgggccccaacggccaggtgagctggcagaccctgcagctgcagaacctgcaggtgcagaacccccaggcccagaccatcaccctggcccccatgcagggcgtgagcctgggccagaccagcagcagcaacaccaccctgacccccatcgccagcgccgccagcatccccgccggcaccgtgaccgtgaacgccgcccagctgagcagcatgcccggcctgcagaccatcaacctgagcgccctgggcaccagcggcatccaggtgcaccccatccagggcctgcccctggccatcgccaacgcccccggcgaccacggcgcccagctgggcctgcacggcgccggcggcgacggcatccacgacgacaccgccggcggcgaggagggcgagaacagccccgacgcccagccccaggccggcagaagaaccagaagagaggcctgcacctgcccctactgcaaggacagcgagggcagaggcagcggcgaccccggcaagaagaagcagcacatctgccacatccagggctgcggcaaggtgtacggcaagaccagccacctgagagcccacctgagatggcacaccggcgagagacccttcatgtgcacctggagctactgcggcaagagattcaccagaagcgacgagctgcagagacacaagagaacccacaccggcgagaagaagttcgcctgccccgagtgccccaagagattcatgagaagcgaccacctgagcaagcacatcaagacccaccagaacaagaagggcggccccggcgtggccctgagcgtgggcaccctgcccctggacagcggcgccggcagcgagggcagcggcaccgccacccccagcgccctgatcaccaccaacatggtggccatggaggccatctgccccgagggcatcgccagactggccaacagcggcatcaacgtgatgcaggtggccgacctgcagagcatcaacatcagcggcaacggcttctag

SEQ ID NO: 13005 - DNA, 2337 bp, synthetic construct
  misc_feature 1..2337: note = Description of Artificial Sequence: Synthetic coding sequence
  source 1..2337: mol_type = other DNA
atggacgagatgaccgccgtggtgaagatcgagaagggcgtgggcggcaacaacggcggcaacggcaacggcggcggcgccttcagccaggccagaagcagcagcaccggcagcagcagcagcaccggcggcggcggccaggagagccagcccagccccctggccctgctggccgccacctgcagcagaatcgagagccccaacgagaacagcaacaacagccagggccccagccagagcggcggcaccggcgagctggacctgaccgccacccagctgagccagggcgccaacggctggcagatcatcagcagcagcagcggcgccacccccaccagcaaggagcagagcggcagcagcaccaacggcagcaacggcagcgagagcagcaagaacagaaccgtgagcggcggccagtacgtggtggccgccgcccccaacctgcagaaccagcaggtgctgaccggcctgcccggcgtgatgcccaacatccagtaccaggtgatcccccagttccagaccgtggacggccagcagctgcagttcgccgccaccggcgcccaggtgcagcaggacggcagcggccagatccagatcatccccggcgccaaccagcagatcatcaccaacagaggcagcggcggcaacatcatcgccgccatgcccaacctgctgcagcaggccgtgcccctgcagggcctggccaacaacgtgctgagcggccagacccagtacgtgaccaacgtgcccgtggccctgaacggcaacatcaccctgctgcccgtgaacagcgtgagcgccgccaccctgacccccagcagccaggccgtgaccatcagcagcagcggcagccaggagagcggcagccagcccgtgaccagcggcaccaccatcagcagcgccagcctggtgagcagccaggccagcagcagcagcttcttcaccaacgccaacagctacagcaccaccaccaccaccagcaacatgggcatcatgaacttcaccaccagcggcagcagcggcaccaacagccagggccagaccccccagagagtgagcggcctgcagggcagcgacgccctgaacatccagcagaaccagaccagcggcggcagcctgcaggccggccagcagaaggagggcgagcagaaccagcagacccagcagcagcagatcctgatccagccccagctggtgcagggcggccaggccctgcaggccctgcaggccgcccccctgagcggccagaccttcaccacccaggccatcagccaggagaccctgcagaacctgcagctgcaggccgtgcccaacagcggccccatcatcatcagaacccccaccgtgggccccaacggccaggtgagctggcagaccctgcagctgcagaacctgcaggtgcagaacccccaggcccagaccatcaccctggcccccatgcagggcgtgagcctgggccagaccagcagcagcaacaccaccctgacccccatcgccagcgccgccagcatccccgccggcaccgtgaccgtgaacgccgcccagctgagcagcatgcccggcctgcagaccatcaacctgagcgccctgggcaccagcggcatccaggtgcaccccatccagggcctgcccctggccatcgccaacgcccccggcgaccacggcgcccagctgggcctgcacggcgccggcggcgacggcatccacgacgacaccgccggcggcgaggagggcgagaacagccccgacgcccagccccaggccggcagaagaaccagaagagaggcctgcacctgcccctactgcaaggacagcgagggcagaggcagcggcgaccccggcaagaagaagcagcacatctgccacatccagggctgcggcaaggtgtacggcaagaccagccacctgagagcccacctgagatggcacaccggcgagagacccttcatgtgcacctggagctactgcggcaagagattcaccagaagcgacgagctgcagagacacaagagaacccacaccggcgagaagaagttcgcctgccccgagtgccccaagagattcatgagaagcgaccacctgagcaagcacatcaagacccaccagaacaagaagggcggccccggcgtggccctgagcgtgggcaccctgcccctggacagcggcgccggcagcgagggcagcggcaccgccacccccagcgccctgatcaccaccaacatggtggccatggaggccatctgccccgagggcatcgccagactggccaacagcggcatcaacgtgatgcaggtggccgacctgcagagcatcaacatcagcggcaacggcttctag

SEQ ID NO: 13006 - DNA, 1413 bp, synthetic construct
  misc_feature 1..1413: note = Description of Artificial Sequence: Synthetic coding sequence
  source 1..1413: mol_type = other DNA
atgagcgcccaggtgctgggcttcctgagaagctggacccccctgcccctggccgcccccagaggccccgccgccgccggcaacgacgccggcgcccccgccgccaccgcccccggcggcgagggcgagccccacagcagaccctgcgacgccagactgggcagcaccgacaaggagctgaaggccggcgccgccgccaccggcagcgcccccaccgcccccggcaccccctggcagagagagcccagagtggaggtgatggaccccgccggcggccccagaggcgtgctgcccagaccctgcagagtgctggtgctgctgaaccccagaggcggcaagggcaaggccctgcagctgttcagaagccacgtgcagcccctgctggccgaggccgagatcagcttcaccctgatgctgaccgagagaagaaaccacgccagagagctggtgagaagcgaggagctgggcagatgggacgccctggtggtgatgagcggcgacggcctgatgcacgaggtggtgaacggcctgatggagagacccgactgggagaccgccatccagaagcccctgtgcagcctgcccgccggcagcggcaacgccctggccgccagcctgaaccactacgccggctacgagcaggtgaccaacgaggacctgctgaccaactgcaccctgctgctgtgcagaagactgctgagccccatgaacctgctgagcctgcacaccgccagcggcctgagactgttcagcgtgctgagcctggcctggggcttcatcgccgacgtggacctggagagcgagaagtacagaagactgggcgagatgagattcaccctgggcaccttcctgagactggccgccctgagaacctacagaggcagactggcctacctgcccgtgggcagagtgggcagcaagacccccgccagccccgtggtggtgcagcagggccccgtggacgcccacctggtgcccctggaggagcccgtgcccagccactggaccgtggtgcccgacgaggacttcgtgctggtgctggccctgctgcacagccacctgggcagcgagatgttcgccgcccccatgggcagatgcgccgccggcgtgatgcacctgttctacgtgagagccggcgtgagcagagccatgctgctgagactgttcctggccatggagaagggcagacacatggagtacgagtgcccctacctggtgtacgtgcccgtggtggccttcagactggagcccaaggacggcaagggcgtgttcgccgtggacggcgagctgatggtgagcgaggccgtgcagggccaggtgcaccccaactacttctggatggtgagcggctgcgtggagcccccccccagctggaagccccagcagatgcccccccccgaggagcccctgtag

SEQ ID NO: 13007 - DNA, 1155 bp, synthetic construct
  misc_feature 1..1155: note = Description of Artificial Sequence: Synthetic coding sequence
  source 1..1155: mol_type = other DNA
atggaccccgccggcggccccagaggcgtgctgcccagaccctgcagagtgctggtgctgctgaaccccagaggcggcaagggcaaggccctgcagctgttcagaagccacgtgcagcccctgctggccgaggccgagatcagcttcaccctgatgctgaccgagagaagaaaccacgccagagagctggtgagaagcgaggagctgggcagatgggacgccctggtggtgatgagcggcgacggcctgatgcacgaggtggtgaacggcctgatggagagacccgactgggagaccgccatccagaagcccctgtgcagcctgcccgccggcagcggcaacgccctggccgccagcctgaaccactacgccggctacgagcaggtgaccaacgaggacctgctgaccaactgcaccctgctgctgtgcagaagactgctgagccccatgaacctgctgagcctgcacaccgccagcggcctgagactgttcagcgtgctgagcctggcctggggcttcatcgccgacgtggacctggagagcgagaagtacagaagactgggcgagatgagattcaccctgggcaccttcctgagactggccgccctgagaacctacagaggcagactggcctacctgcccgtgggcagagtgggcagcaagacccccgccagccccgtggtggtgcagcagggccccgtggacgcccacctggtgcccctggaggagcccgtgcccagccactggaccgtggtgcccgacgaggacttcgtgctggtgctggccctgctgcacagccacctgggcagcgagatgttcgccgcccccatgggcagatgcgccgccggcgtgatgcacctgttctacgtgagagccggcgtgagcagagccatgctgctgagactgttcctggccatggagaagggcagacacatggagtacgagtgcccctacctggtgtacgtgcccgtggtggccttcagactggagcccaaggacggcaagggcgtgttcgccgtggacggcgagctgatggtgagcgaggccgtgcagggccaggtgcaccccaactacttctggatggtgagcggctgcgtggagcccccccccagctggaagccccagcagatgcccccccccgaggagcccctgtag

SEQ ID NO: 13008 - DNA, 1152 bp, synthetic construct
  misc_feature 1..1152: note = Description of Artificial Sequence: Synthetic coding sequence
  source 1..1152: mol_type = other DNA
gagcccaccggcggccccagaggcgtgctgcccagaccctgcagagtgctggtgctgctgaaccccagaggcggcaagggcaaggccctgcagctgttcagaagccacgtgcagcccctgctggccgaggccgagatcagcttcaccctgatgctgaccgagagaagaaaccacgccagagagctggtgagaagcgaggagctgggcagatgggacgccctggtggtgatgagcggcgacggcctgatgcacgaggtggtgaacggcctgatggagagacccgactgggagaccgccatccagaagcccctgtgcagcctgcccgccggcagcggcaacgccctggccgccagcctgaaccactacgccggctacgagcaggtgaccaacgaggacctgctgaccaactgcaccctgctgctgtgcagaagactgctgagccccatgaacctgctgagcctgcacaccgccagcggcctgagactgttcagcgtgctgagcctggcctggggcttcatcgccgacgtggacctggagagcgagaagtacagaagactgggcgagatgagattcaccctgggcaccttcctgagactggccgccctgagaacctacagaggcagactggcctacctgcccgtgggcagagtgggcagcaagacccccgccagccccgtggtggtgcagcagggccccgtggacgcccacctggtgcccctggaggagcccgtgcccagccactggaccgtggtgcccgacgaggacttcgtgctggtgctggccctgctgcacagccacctgggcagcgagatgttcgccgcccccatgggcagatgcgccgccggcgtgatgcacctgttctacgtgagagccggcgtgagcagagccatgctgctgagactgttcctggccatggagaagggcagacacatggagtacgagtgcccctacctggtgtacgtgcccgtggtggccttcagactggagcccaaggacggcaagggcgtgttcgccgtggacggcgagctgatggtgagcgaggccgtgcagggccaggtgcaccccaactacttctggatggtgagcggctgcgtggagcccccccccagctggaagccccagcagatgcccccccccgaggagcccctgtag

SEQ ID NO: 13009 - DNA, 1155 bp, synthetic construct; identical to SEQ ID NO: 13007
  misc_feature 1..1155: note = Description of Artificial Sequence: Synthetic coding sequence
  source 1..1155: mol_type = other DNA

SEQ ID NO: 13010 - DNA, 1197 bp, synthetic construct
  misc_feature 1..1197: note = Description of Artificial Sequence: Synthetic coding sequence
  source 1..1197: mol_type = other DNA
atggaccccgtggtgggctgcggcagaggcctgttcggcttcgtgttcagcgccggcggccccagaggcgtgctgcccagaccctgcagagtgctggtgctgctgaaccccagaggcggcaagggcaaggccctgcagctgttcagaagccacgtgcagcccctgctggccgaggccgagatcagcttcaccctgatgctgaccgagagaagaaaccacgccagagagctggtgagaagcgaggagctgggcagatgggacgccctggtggtgatgagcggcgacggcctgatgcacgaggtggtgaacggcctgatggagagacccgactgggagaccgccatccagaagcccctgtgcagcctgcccgccggcagcggcaacgccctggccgccagcctgaaccactacgccggctacgagcaggtgaccaacgaggacctgctgaccaactgcaccctgctgctgtgcagaagactgctgagccccatgaacctgctgagcctgcacaccgccagcggcctgagactgttcagcgtgctgagcctggcctggggcttcatcgccgacgtggacctggagagcgagaagtacagaagactgggcgagatgagattcaccctgggcaccttcctgagactggccgccctgagaacctacagaggcagactggcctacctgcccgtgggcagagtgggcagcaagacccccgccagccccgtggtggtgcagcagggccccgtggacgcccacctggtgcccctggaggagcccgtgcccagccactggaccgtggtgcccgacgaggacttcgtgctggtgctggccctgctgcacagccacctgggcagcgagatgttcgccgcccccatgggcagatgcgccgccggcgtgatgcacctgttctacgtgagagccggcgtgagcagagccatgctgctgagactgttcctggccatggagaagggcagacacatggagtacgagtgcccctacctggtgtacgtgcccgtggtggccttcagactggagcccaaggacggcaagggcgtgttcgccgtggacggcgagctgatggtgagcgaggccgtgcagggccaggtgcaccccaactacttctggatggtgagcggctgcgtggagcccccccccagctggaagccccagcagatgcccccccccgaggagcccctgtag

SEQ ID NO: 13011 - DNA, 1155 bp, synthetic construct; identical to SEQ ID NO: 13007
  misc_feature 1..1155: note = Description of Artificial Sequence: Synthetic coding sequence
  source 1..1155: mol_type = other DNA

SEQ ID NO: 13012 - DNA, 1965 bp, synthetic construct
  misc_feature 1..1965: note = Description of Artificial Sequence: Synthetic coding sequence
  source 1..1965: mol_type = other DNA
atgaacggccacctggaggccgaggagcagcaggaccagagacccgaccaggagctgaccggcagctggggccacggccccagaagcaccctggtgagagccaaggccatggcccccccccccccccccctggccgccagcacccccctgctgcacggcgagttcggcagctaccccgccagaggccccagattcgccctgaccctgaccagccaggccctgcacatccagagactgagacccaagcccgaggccagacccagaggcggcctggtgcccctggccgaggtgagcggctgctgcaccctgagaagcagaagccccagcgacagcgccgcctacttctgcatctacacctaccccagaggcagaagaggcgccagaagaagagccaccagaaccttcagagccgacggcgccgccacctacgaggagaacagagccgaggcccagagatgggccaccgccctgacctgcctgctgagaggcctgcccctgcccggcgacggcgagatcacccccgacctgctgcccagaccccccagactgctgctgctggtgaaccccttcggcggcagaggcctggcctggcagtggtgcaagaaccacgtgctgcccatgatcagcgaggccggcctgagcttcaacctgatccagaccgagagacagaaccacgccagagagctggtgcagggcctgagcctgagcgagtgggacggcatcgtgaccgtgagcggcgacggcctgctgcacgaggtgctgaacggcctgctggacagacccgactgggaggaggccgtgaagatgcccgtgggcatcctgccctgcggcagcggcaacgccctggccggcgccgtgaaccagcacggcggcttcgagcccgccctgggcctggacctgctgctgaactgcagcctgctgctgtgcagaggcggcggccaccccctggacctgctgagcgtgaccctggccagcggcagcagatgcttcagcttcctgagcgtggcctggggcttcgtgagcgacgtggacatccagagcgagagattcagagccctgggcagcgccagattcaccctgggcaccgtgctgggcctggccaccctgcacacctacagaggcagactgagctacctgcccgccaccgtggagcccgccagccccacccccgcccacagcctgcccagagccaagagcgagctgaccctgacccccgaccccgccccccccatggcccacagccccctgcacagaagcgtgagcgacctgcccctgcccctgccccagcccgccctggccagccccggcagccccgagcccctgcccatcctgagcctgaacggcggcggccccgagctggccggcgactggggcggcgccggcgacgcccccctgagccccgaccccctgctgagcagcccccccggcagccccaaggccgccctgcacagccccgtgagcgagggcgcccccgtgatcccccccagcagcggcctgcccctgcccacccccgacgccagagtgggcgccagcacctgcggcccccccgaccacctgctgccccccctgggcacccccctgccccccgactgggtgaccctggagggcgacttcgtgctgatgctggccatcagccccagccacctgggcgccgacctggtggccgccccccacgccagattcgacgacggcctggtgcacctgtgctgggtgagaagcggcatcagcagagccgccctgctgagactgttcctggccatggagagaggcagccacttcagcctgggctgcccccagctgggctacgccgccgccagagccttcagactggagcccctgacccccagaggcgtgctgaccgtggacggcgagcaggtggagtacggccccctgcaggcccagatgcaccccggcatcggcaccctgctgaccggcccccccggctgccccggcagagagccctag

SEQ ID NO: 13013 - DNA, 1851 bp, synthetic construct
  misc_feature 1..1851: note = Description of Artificial Sequence: Synthetic coding sequence
  source 1..1851: mol_type = other DNA
atggcccccccccccccccccctggccgccagcacccccctgctgcacggcgagttcggcagctaccccgccagaggccccagattcgccctgaccctgaccagccaggccctgcacatccagagactgagacccaagcccgaggccagacccagaggcggcctggtgcccctggccgaggtgagcggctgctgcaccctgagaagcagaagccccagcgacagcgccgcctacttctgcatctacacctaccccagaggcagaagaggcgccagaagaagagccaccagaaccttcagagccgacggcgccgccacctacgaggagaacagagccgaggcccagagatgggccaccgccctgacctgcctgctgagaggcctgcccctgcccggcgacggcgagatcacccccgacctgctgcccagaccccccagactgctgctgctggtgaaccccttcggcggcagaggcctggcctggcagtggtgcaagaaccacgtgctgcccatgatcagcgaggccggcctgagcttcaacctgatccagaccgagagacagaaccacgccagagagctggtgcagggcctgagcctgagcgagtgggacggcatcgtgaccgtgagcggcgacggcctgctgcacgaggtgctgaacggcctgctggacagacccgactgggaggaggccgtgaagatgcccgtgggcatcctgccctgcggcagcggcaacgccctggccggcgccgtgaaccagcacggcggccccagctggggcgacagagacccctacatcagccacagcgccaagcccaccgtgagccaggtgaaccagcccgcctgcggcatgctgacccccagcagctggaccttcctgcccgcctgcttccccgccgtgagcagagcccccagaaccctgcccggcatgggcggcacccaggccctgggcagcgccagattcaccctgggcaccgtgctgggcctggccaccctgcacacctacagaggcagactgagctacctgcccgccaccgtggagcccgccagccccacccccgcccacagcctgcccagagccaagagcgagctgaccctgacccccgaccccgccccccccatggcccacagccccctgcacagaagcgtgagcgacctgcccctgcccctgccccagcccgccctggccagccccggcagccccgagcccctgcccatcctgagcctgaacggcggcggccccgagctggccggcgactggggcggcgccggcgacgcccccctgagccccgaccccctgctgagcagcccccccggcagccccaaggccgccctgcacagccccgtgagcgagggcgcccccgtgatcccccccagcagcggcctgcccctgcccacccccgacgccagagtgggcgccagcacctgcggcccccccgaccacctgctgccccccctgggcacccccctgccccccgactgggtgaccctggagggcgacttcgtgctgatgctggccatcagccccagccacctgggcgccgacctggtggccgccccccacgccagattcgacgacggcctggtgcacctgtgctgggtgagaagcggcatcagcagagccgccctgctgagactgttcctggccatggagagaggcagccacttcagcctgggctgcccccagctgggctacgccgccgccagagccttcagactggagcccctgacccccagaggcgtgctgaccgtggacggcgagcaggtggagtacggccccctgcaggcccagatgcaccccggcatcggcaccctgctgaccggcccccccggctgccccggcagagagccctag

SEQ ID NO: 13014 - DNA, 1884 bp, synthetic construct
  misc_feature 1..1884: note = Description of Artificial Sequence: Synthetic coding sequence
  source 1..1884: mol_type = other DNA
atgaacggccacctggaggccgaggagcagcaggaccagagacccgaccaggagctgaccggcagctggggccacggccccagaagcaccctggtgagagccaaggccatggcccccccccccccccccctggccgccagcacccccctgctgcacggcgagttcggcagctaccccgccagaggccccagattcgccctgaccctgaccagccaggccctgcacatccagagactgagacccaagcacagcgccgcctacttctgcatctacacctaccccagaggcagaagaggcgccagaagaagagccaccagaaccttcagagccgacggcgccgccacctacgaggagaacagagccgaggcccagagatgggccaccgccctgacctgcctgctgagaggcctgcccctgcccggcgacggcgagatcacccccgacctgctgcccagaccccccagactgctgctgctggtgaaccccttcggcggcagaggcctggcctggcagtggtgcaagaaccacgtgctgcccatgatcagcgaggccggcctgagcttcaacctgatccagaccgagagacagaaccacgccagagagctggtgcagggcctgagcctgagcgagtgggacggcatcgtgaccgtgagcggcgacggcctgctgcacgaggtgctgaacggcctgctggacagacccgactgggaggaggccgtgaagatgcccgtgggcatcctgccctgcggcagcggcaacgccctggccggcgccgtgaaccagcacggcggcttcgagcccgccctgggcctggacctgctgctgaactgcagcctgctgctgtgcagaggcggcggccaccccctggacctgctgagcgtgaccctggccagcggcagcagatgcttcagcttcctgagcgtggcctggggcttcgtgagcgacgtggacatccagagcgagagattcagagccctgggcagcgccagattcaccctgggcaccgtgctgggcctggccaccctgcacacctacagaggcagactgagctacctgcccgccaccgtggagcccgccagccccacccccgcccacagcctgcccagagccaagagcgagctgaccctgacccccgaccccgccccccccatggcccacagccccctgcacagaagcgtgagcgacctgcccctgcccctgccccagcccgccctggccagccccggcagccccgagcccctgcccatcctgagcctgaacggcggcggccccgagctggccggcgactggggcggcgccggcgacgcccccctgagccccgaccccctgctgagcagcccccccggcagccccaaggccgccctgcacagccccgtgagcgagggcgcccccgtgatcccccccagcagcggcctgcccctgcccacccccgacgccagagtgggcgccagcacctgcggcccccccgaccacctgctgccccccctgggcacccccctgccccccgactgggtgaccctggagggcgacttcgtgctgatgctggccatcagccccagccacctgggcgccgacctggtggccgccccccacgccagattcgacgacggcctggtgcacctgtgctgggtgagaagcggcatcagcagagccgccctgctgagactgttcctggccatggagagaggcagccacttcagcctgggctgcccccagctgggctacgccgccgccagagccttcagactggagcccctgacccccagaggcgtgctgaccgtggacggcgagcaggtggagtacggccccctgcaggcccagatgcaccccggcatcggcaccctgctgaccggcccccccggctgccccggcagagagccctag

SEQ ID NO: 13015 - DNA, 150 bp, synthetic construct
  misc_feature 1..150: note = Description of Artificial Sequence: Synthetic coding sequence
  source 1..150: mol_type = other DNA
atgaacggccacctggaggccgaggagcagcaggaccagagaagccccctgacctgctacctgggcagacccggctgcttctactggagcatccccctgggcgtgggcgcctggcccggcagcggcgtgagaaccacctgcttcccctag

SEQ ID NO: 13016 - DNA, 2286 bp, synthetic construct
  misc_feature 1..2286: note = Description of Artificial Sequence: Synthetic coding sequence
  source 1..2286: mol_type = other DNA
atgatcggctgcctgcacgccagagtgagcggccccctgtgggacgccggcctgtgccccgccagcagcagaagcgcccacacctgcctgagcctgagcgtgagcgacgcccccgtgagccccgccaccgccccccactgcctgctgctgagcaccgcccccgcccccccctgcccctgccacggcgtgctgaacagccaccccttcagcccccccttcccccagagacccgaccaggagctgaccggcagctggggccacggccccagaagcaccctggtgagagccaaggccatggcccccccccccccccccctggccgccagcacccccctgctgcacggcgagttcggcagctaccccgccagaggccccagattcgccctgaccctgaccagccaggccctgcacatccagagactgagacccaagcccgaggccagacccagaggcggcctggtgcccctggccgaggtgagcggctgctgcaccctgagaagcagaagccccagcgacagcgccgcctacttctgcatctacacctaccccagaggcagaagaggcgccagaagaagagccaccagaaccttcagagccgacggcgccgccacctacgaggagaacagagccgaggcccagagatgggccaccgccctgacctgcctgctgagaggcctgcccctgcccggcgacggcgagatcacccccgacctgctgcccagaccccccagactgctgctgctggtgaaccccttcggcggcagaggcctggcctggcagtggtgcaagaaccacgtgctgcccatgatcagcgaggccggcctgagcttcaacctgatccagaccgagagacagaaccacgccagagagctggtgcagggcctgagcctgagcgagtgggacggcatcgtgaccgtgagcggcgacggcctgctgcacgaggtgctgaacggcctgctggacagacccgactgggaggaggccgtgaagatgcccgtgggcatcctgccctgcggcagcggcaacgccctggccggcgccgtgaaccagcacggcggcttcgagcccgccctgggcctggacctgctgctgaactgcagcctgctgctgtgcagaggcggcggccaccccctggacctgctgagcgtgaccctggccagcggcagcagatgcttcagcttcctgagcgtggcctggggcttcgtgagcgacgtggacatccagagcgagagattcagagccctgggcagcgccagattcaccctgggcaccgtgctgggcctggccaccctgcacacctacagaggcagactgagctacctgcccgccaccgtggagcccgccagccccacccccgcccacagcctgcccagagccaagagcgagctgaccctgacccccgaccccgccccccccatggcccacagccccctgcacagaagcgtgagcgacctgcccctgcccctgccccagcccgccctggccagccccggcagccccgagcccctgcccatcctgagcctgaacggcggcggccccgagctggccggcgactggggcggcgccggcgacgcccccctgagccccgaccccctgctgagcagcccccccggcagccccaaggccgccctgcacagccccgtgagcgagggcgcccccgtgatcccccccagcagcggcctgcccctgcccacccccgacgccagagtgggcgccagcacctgcggcccccccgaccacctgctgccccccctgggcacccccctgccccccgactgggtgaccctggagggcgacttcgtgctgatgctggccatcagccccagccacctgggcgccgacctggtggccgccccccacgccagattcgacgacggcctggtgcacctgtgctgggtgagaagcggcatcagcagagccgccctgctgagactgttcctggccatggagagaggcagccacttcagcctgggctgcccccagctgggctacgccgccgccagagccttcagactggagcccctgacccccagaggcgtgctgaccgtggacggcgagcaggtggagtacggccccctgcaggcccagatgcaccccggcatcgccagaggcagaacccagacccccgccctgcccgccgcccccgccctgtacggcagacagcccggcgccgcccacggcctgcagcccgtgtgccagggcgccgccctgttcttccacaacagctggctgtggggcagccaggacctgttcagaatcgtgctgaccgaggccgtgggcggctag

SEQ ID NO: 13017 - DNA, 1965 bp, synthetic construct; identical to SEQ ID NO: 13012
  misc_feature 1..1965: note = Description of Artificial Sequence: Synthetic coding sequence
  source 1..1965: mol_type = other DNA

SEQ ID NO: 13018 - DNA, 1857 bp, synthetic construct
  misc_feature 1..1857: note = Description of Artificial Sequence: Synthetic coding sequence
  source 1..1857: mol_type = other DNA
atggcccccccccccccccccctggccgccagcacccccctgctgcacggcgagttcggcagctaccccgccagaggccccagattcgccctgaccctgaccagccaggccctgcacatccagagactgagacccaagcccgaggccagacccagaggcggcctggtgcccctggccgaggtgagcggctgctgcaccctgagaagcagaagccccagcgacagcgccgcctacttctgcatctacacctaccccagaggcagaagaggcgccagaagaagagccaccagaaccttcagagccgacggcgccgccacctacgaggagaacagagccgaggcccagagatgggccaccgccctgacctgcctgctgagaggcctgcccctgcccggcgacggcgagatcacccccgacctgctgcccagaccccccagactgctgctgctggtgaaccccttcggcggcagaggcctggcctggcagtggtgcaagaaccacgtgctgcccatgatcagcgaggccggcctgagcttcaacctgatccagaccgagagacagaaccacgccagagagctggtgcagggcctgagcctgagcgagtgggacggcatcgtgaccgtgagcggcgacggcctgctgcacgaggtgctgaacggcctgctggacagacccgactgggaggaggccgtgaagatgcccgtgggcatcctgccctgcggcagcggcaacgccctggccggcgccgtgaaccagcacggcggcttcgagcccgccctgggcctggacctgctgctgaactgcagcctgctgctgtgcagaggcggcggccaccccctggacctgctgagcgtgaccctggccagcggcagcagatgcttcagcttcctgagcgtggcctggggcttcgtgagcgacgtggacatccagagcgagagattcagagccctgggcagcgccagattcaccctgggcaccgtgctgggcctggccaccctgcacacctacagaggcagactgagctacctgcccgccaccgtggagcccgccagccccacccccgcccacagcctgcccagagccaagagcgagctgaccctgacccccgaccccgccccccccatggcccacagccccctgcacagaagcgtgagcgacctgcccctgcccctgccccagcccgccctggccagccccggcagccccgagcccctgcccatcctgagcctgaacggcggcggccccgagctggccggcgactggggcggcgccggcgacgcccccctgagccccgaccccctgctgagcagcccccccggcagccccaaggccgccctgcacagccccgtgagcgagggcgcccccgtgatcccccccagcagcggcctgcccctgcccacccccgacgccagagtgggcgccagcacctgcggcccccccgaccacctgctgccccccctgggcacccccctgccccccgactgggtgaccctggagggcgacttcgtgctgatgctggccatcagccccagccacctgggcgccgacctggtggccgccccccacgccagattcgacgacggcctggtgcacctgtgctgggtgagaagcggcatcagcagagccgccctgctgagactgttcctggccatggagagaggcagccacttcagcctgggctgcccccagctgggctacgccgccgccagagccttcagactggagcccctgacccccagaggcgtgctgaccgtggacggcgagcaggtggagtacggccccctgcaggcccagatgcaccccggcatcggcaccctgctgaccggcccccccggctgccccggcagagagccctag

SEQ ID NO: 13019 - DNA, 1149 bp, synthetic construct
  misc_feature 1..1149: note = Description of Artificial Sequence: Synthetic coding sequence
  source 1..1149: mol_type = other DNA
atgggccccaccagcgtgcccctggtgaaggcccacagaagcagcgtgagcgactacgtgaactacgacatcatcgtgagacactacaactacaccggcaagctgaacatcagcgccgacaaggagaacagcatcaagctgaccagcgtggtgttcatcctgatctgctgcttcatcatcctggagaacatcttcgtgctgctgaccatctggaagaccaagaagttccacagacccatgtactacttcatcggcaacctggccctgagcgacctgctggccggcgtggcctacaccgccaacctgctgctgagcggcgccaccacctacaagctgacccccgcccagtggttcctgagagagggcagcatgttcgtggccctgagcgccagcgtgttcagcctgctggccatcgccatcgagagatacatcaccatgctgaagatgaagctgcacaacggcagcaacaacttcagactgttcctgctgatcagcgcctgctgggtgatcagcctgatcctgggcggcctgcccatcatgggctggaactgcatcagcgccctgagcagctgcagcaccgtgctgcccctgtaccacaagcactacatcctgttctgcaccaccgtgttcaccctgctgctgctgagcatcgtgatcctgtactgcagaatctacagcctggtgagaaccagaagcagaagactgaccttcagaaagaacatcagcaaggccagcagaagcagcgagaagagcctggccctgctgaagaccgtgatcatcgtgctgagcgtgttcatcgcctgctgggcccccctgttcatcctgctgctgctggacgtgggctgcaaggtgaagacctgcgacatcctgttcagagccgagtacttcctggtgctggccgtgctgaacagcggcaccaaccccatcatctacaccctgaccaacaaggagatgagaagagccttcatcagaatcatgagctgctgcaagtgccccagcggcgacagcgccggcaagttcaagagacccatcatcgccggcatggagttcagcagaagcaagagcgacaacagcagccacccccagaaggacgagggcgacaaccccgagaccatcatgagcagcggcaacgtgaacagcagcagctag

SEQ ID NO: 13020 - DNA, 1353 bp, synthetic construct
  misc_feature 1..1353: note = Description of Artificial Sequence: Synthetic coding sequence
  source 1..1353: mol_type = other DNA
atgggccccaccagcgtgcccctggtgaaggcccacagaagcagcgtgagcgactacgtgaactacgacatcatcgtgagacactacaactacaccggcaagctgaacatcagcgccgacaaggagaacagcatcaagctgaccagcgtggtgttcatcctgatctgctgcttcatcatcctggagaacatcttcgtgctgctgaccatctggaagaccaagaagttccacagacccatgtactacttcatcggcaacctggccctgagcgacctgctggccggcgtggcctacaccgccaacctgctgctgagcggcgccaccacctacaagctgacccccgcccagtggttcctgagagagggcagcatgttcgtggccctgagcgccagcgtgttcagcctgctggccatcgccatcgagagatacatcaccatgctgaagatgaagctgcacaacggcagcaacaacttcagactgttcctgctgatcagcgcctgctgggtgatcagcctgatcctgggcggcctgcccatcatgggctggaactgcatcagcgccctgagcagctgcagcaccgtgctgcccctgtaccacaagcactacatcctgttctgcaccaccgtgttcaccctgctgctgctgagcatcgtgatcctgtactgcagaatctacagcctggtgagaaccagaagcagaagactgaccttcagaaagaacatcagcaaggccagcagaagcagcgagaagagcctggccctgctgaagaccgtgatcatcgtgctgagcgtgttcatcgcctgctgggcccccctgttcatcctgctgctgctggacgtgggctgcaaggtgaagacctgcgacatcctgttcagagccgagtacttcctggtgctggccgtgctgaacagcggcaccaaccccatcatctacaccctgaccaacaaggagaccctgctggccaacagcagcgaccccagcagccccgcctggaacagcgccgccgccaacagaaccatcccccccacccccagaaagaccaagggcaccacccagagacccctgtgcctgctggagaccagcaccctgctgcccagaaccggcagctgcccccccaccggcagcgccctgtacctggtggccggccaccccagcgtgtggaagaagatcagcggcctgagactgctgcccggcagaagctgctgcaagcccgagggcggcagaggcagaatcagaaccgcctggtggtgcagagtgctggtgggcagagtgagcagctgcgagcagtgcaccggcaagggcggcgaccaggtgcccgcctggaacatcttcagcacccccctggagctgtag

SEQ ID NO: 13021 - DNA, 726 bp, synthetic construct
  misc_feature 1..726: note = Description of Artificial Sequence: Synthetic coding sequence
  source 1..726: mol_type = other DNA
atggccaccctgaaggaccagctgatctacaacctgctgaaggaggagcagaccccccagaacaagatcaccgtggtgggcgtgggcgccgtgggcatggcctgcgccatcagcatcctgatgaaggacctggccgacgagctggccctggtggacgtgatcgaggacaagctgaagggcgagatgatggacctgcagcacggcagcctgttcctgagaacccccaagatcgtgagcggcaaggactacaacgtgaccgccaacagcaagctggtgatcatcaccgccggcgccagacagcaggagggcgagagcagactgaacctggtgcagagaaacgtgaacatcttcaagttcatcatccccaacgtggtgaagtacagccccaactgcaagctgctgatcgtgagcaaccccgtggacatcctgacctacgtggcctggaagatcagcggcttccccaagaacagagtgatcggcagcggctgcaacctggacagcgccagattcagatacctgatgggcgagagactgggcgtgcaccccctgagctgccacggctgggtgctgggcgagcacggcgacagcagcgtgcccgtgtggagcggcatgaacgtggccggcgtgagcctgaagaccctgcaccccgacctgggcaccgacaaggacaaggagcagtggaaggaggtgcacaagcaggtggtggagagagtgttcaccgagtag

SEQ ID NO: 13022 - DNA, 813 bp, synthetic construct
  misc_feature 1..813: note = Description of Artificial Sequence: Synthetic coding sequence
  source 1..813: mol_type = other DNA
atgctgcaggcctgcaagatggagggcttccccctggtgcccccccccagcgaggacctggtgccctacgacaccgacctgtaccagagacagacccacgagtactacccctacctgagcagcgacggcgagagccacagcgaccactactgggacttccacccccaccacgtgcacagcgagttcgagagcttcgccgagaacaacttcaccgagctgcagagcgtgcagcccccccagctgcagcagctgtacagacacatggagctggagcagatgcacgtgctggacacccccatggtgcccccccaccccagcctgggccaccaggtgagctacctgcccagaatgtgcctgcagtaccccagcctgagccccgcccagcccagcagcgacgaggaggagggcgagagacagagcccccccctggaggtgagcgacggcgaggccgacggcctggagcccggccccggcctgctgcccggcgagaccggcagcaagaagaagatcagactgtaccagttcctgctggacctgctgagaagcggcgacatgaaggacagcatctggtgggtggacaaggacaagggcaccttccagttcagcagcaagcacaaggaggccctggcccacagatggggcatccagaagggcaacagaaagaagatgacctaccagaagatggccagagccctgagaaactacggcaagaccggcgaggtgaagaaggtgaagaagaagctgacctaccagttcagcggcgaggtgctgggcagaggcggcctggccgagagaagacaccccccccactag

SEQ ID NO: 13023 - DNA, 2403 bp, synthetic construct
  misc_feature 1..2403: note = Description of Artificial Sequence: Synthetic coding sequence
  source 1..2403: mol_type = other DNA
atgggcagcagcaagaagcacagaggcgagaaggaggccgccggcaccaccgccgccgccggcaccggcggcgccaccgagcagccccccagacacagagagcacaagaagcacaagcacagaagcggcggcagcggcggcagcggcggcgagagaagaaagagaagcagagagagaggcggcgagagaggcagcggcagaagaggcgccgaggccgaggccagaagcagcacccacggcagagagagaagccaggccgagcccagcgagagaagagtgaagagagagaagagagacgacggctacgaggccgccgccagcagcaagaccagcagcggcgacgccagcagcctgagcatcgaggagaccaacaagctgagagccaagctgggcctgaagcccctggaggtgaacgccatcaagaaggaggccggcaccaaggaggagcccgtgaccgccgacgtgatcaaccccatggccctgagacagagagaggagctgagagagaagctggccgccgccaaggagaagagactgctgaaccagaagctgggcaagatcaagaccctgggcgaggacgacccctggctggacgacaccgccgcctggatcgagagaagcagacagctgcagaaggagaaggacctggccgagaagagagccaagctgctggaggagatggaccaggagttcggcgtgagcaccctggtggaggaggagttcggccagagaagacaggacctgtacagcgccagagacctgcagggcctgaccgtggagcacgccatcgacagcttcagagagggcgagaccatgatcctgaccctgaaggacaagggcgtgctgcaggaggaggaggacgtgctggtgaacgtgaacctggtggacaaggagagagccgagaagaacgtggagctgagaaagaagaagcccgactacctgccctacgccgaggacgagagcgtggacgacctggcccagcagaagcccagaagcatcctgagcaagtacgacgaggagctggagggcgagagaccccacagcttcagactggagcagggcggcaccgccgacggcctgagagagagagagctggaggagatcagagccaagctgagactgcaggcccagagcctgagcaccgtgggccccagactggccagcgagtacctgacccccgaggagatggtgaccttcaagaagaccaagagaagagtgaagaagatcagaaagaaggagaaggaggtggtggtgagagccgacgacctgctgcccctgggcgaccagacccaggacggcgacttcggcagcagactgagaggcagaggcagaagaagagtgagcgaggtggaggaggagaaggagcccgtgccccagcccctgcccagcgacgacaccagagtggagaacatggacatcagcgacgaggaggagggcggcgcccccccccccggcagcccccaggtgctggaggaggacgaggccgagctggagctgcagaagcagctggagaagggcagaagactgagacagctgcagcagctgcagcagctgagagacagcggcgagaaggtggtggagatcgtgaagaagctggagagcagacagagaggctgggaggaggacgaggaccccgagagaaagggcgccatcgtgttcaacgccaccagcgagttctgcagaaccctgggcgagatccccacctacggcctggccggcaacagagaggagcaggaggagctgatggacttcgagagagacgaggagagaagcgccaacggcggcagcgagagcgacggcgaggagaacatcggctggagcaccgtgaacctggacgaggagaagcagcagcaggacttcagcgccagcagcaccaccatcctggacgaggagcccatcgtgaacagaggcctggccgccgccctgctgctgtgccagaacaagggcctgctggagaccaccgtgcagaaggtggccagagtgaaggcccccaacaagagcctgcccagcgccgtgtactgcatcgaggacaagatggccatcgacgacaagtacagcagaagagaggagtacagaggcttcacccaggacttcaaggagaaggacggctacaagcccgacgtgaagatcgagtacgtggacgagaccggcagaaagctgacccccaaggaggccttcagacagctgagccacagattccacggcaagggcagcggcaagatgaagaccgagagaagaatgaagaagctggacgaggaggccctgctgaagaagatgagcagcagcgacacccccctgggcaccgtggccctgctgcaggagaagcagaaggcccagaagaccccctacatcgtgctgagcggcagcggcaagagcatgaacgccaacaccatcaccaagtag

SEQ ID NO: 13024 - DNA, 1929 bp, synthetic construct
  misc_feature 1..1929: note = Description of Artificial Sequence: Synthetic coding sequence
  source 1..1929: mol_type = other DNA
atggccctgagacagagagaggagctgagagagaagctggccgccgccaaggagaagagactgctgaaccagaagctgggcaagatcaagaccctgggcgaggacgacccctggctggacgacaccgccgcctggatcgagagaagcagacagctgcagaaggagaaggacctggccgagaagagagccaagctgctggaggagatggaccaggagttcggcgtgagcaccctggtggaggaggagttcggccagagaagacaggacctgtacagcgccagagacctgcagggcctgaccgtggagcacgccatcgacagcttcagagagggcgagaccatgatcctgaccctgaaggacaagggcgtgctgcaggaggaggaggacgtgctggtgaacgtgaacctggtggacaaggagagagccgagaagaacgtggagctgagaaagaagaagcccgactacctgccctacgccgaggacgagagcgtggacgacctggcccagcagaagcccagaagcatcctgagcaagtacgacgaggagctggagggcgagagaccccacagcttcagactggagcagggcggcaccgccgacggcctgagagagagagagctggaggagatcagagccaagctgagactgcaggcccagagcctgagcaccgtgggccccagactggccagcgagtacctgacccccgaggagatggtgaccttcaagaagaccaagagaagagtgaagaagatcagaaagaaggagaaggaggtggtggtgagagccgacgacctgctgcccctgggcgaccagacccaggacggcgacttcggcagcagactgagaggcagaggcagaagaagagtgagcgaggtggaggaggagaaggagcccgtgccccagcccctgcccagcgacgacaccagagtggagaacatggacatcagcgacgaggaggagggcggcgcccccccccccggcagcccccaggtgctggaggaggacgaggccgagctggagctgcagaagcagctggagaagggcagaagactgagacagctgcagcagctgcagcagctgagagacagcggcgagaaggtggtggagatcgtgaagaagctggagagcagacagagaggctgggaggaggacgaggaccccgagagaaagggcgccatcgtgttcaacgccaccagcgagttctgcagaaccctgggcgagatccccacctacggcctggccggcaacagagaggagcaggaggagctgatggacttcgagagagacgaggagagaagcgccaacggcggcagcgagagcgacggcgaggagaacatcggctggagcaccgtgaacctggacgaggagaagcagcagcaggacttcagcgccagcagcaccaccatcctggacgaggagcccatcgtgaacagaggcctggccgccgccctgctgctgtgccagaacaagggcctgctggagaccaccgtgcagaaggtggccagagtgaaggcccccaacaagagcctgcccagcgccgtgtactgcatcgaggacaagatggccatcgacgacaagtacagcagaagagaggagtacagaggcttcacccaggacttcaaggagaaggacggctacaagcccgacgtgaagatcgagtacgtggacgagaccggcagaaagctgacccccaaggaggccttcagacagctgagccacagattccacggcaagggcagcggcaagatgaagaccgagagaagaatgaagaagctggacgaggaggccctgctgaagaagatgagcagcagcgacacccccctgggcaccgtggccctgctgcaggagaagcagaaggcccagaagaccccctacatcgtgctgagcggcagcggcaagagcatgaacgccaacaccatcaccaagtag

SEQ ID NO: 13025 - DNA, 4392 bp, synthetic construct
  misc_feature 1..4392: note = Description of Artificial Sequence: Synthetic coding sequence
  source 1..4392: mol_type = other DNA
atgaagaagaagaccgtgtgcaccctgaacatgggcgacaagaagtacgaggacatggagggcgaggagaacggcgacaacaccatcagcaccggcctgctgtacagcgaggccgacagatgccccatctgcctgaactgcctgctggagaaggaggtgggcttccccgagagctgcaaccacgtgttctgcatgacctgcatcctgaagtgggccgagaccctggccagctgccccatcgacagaaagcccttccaggccgtgttcaagttcagcgccctggagggctacgtgaaggtgcaggtgaagaagcagctgagagagaccaaggacaagaagaacgagaacagcttcgagaagcaggtgagctgccacgagaacagcaagagctgcatcagaagaaaggccatcgtgagagaggacctgctgagcgccaaggtgtgcgacctgaagtggatccacagaaacagcctgtacagcgagaccggcggcaagaagaacgccgccatcaagatcaacaagccccagagaagcaactggagcaccaaccagtgcttcagaaacttcttcagcaacatgttcagcagcgtgagccacagcggcgagagcagcttcacctacagagcctactgcaccgagttcatcgaggccagcgagatcagcgccctgatcagacagaagagacacgagctggagctgagctggttccccgacaccctgcccggcatcggcagaatcggcttcatcccctggaacgtggagaccgaggtgctgcccctgatcagcagcgtgctgcccagaaccatcttccccaccagcaccatcagcttcgagcacttcggcaccagctgcaagggctacgccctggcccacacccaggagggcgaggagaagaagcagaccagcggcaccagcaacaccagaggcagcagaagaaagcccgccatgaccacccccaccagaagaagcaccagaaacaccagagccgagaccgccagccagagccagagaagccccatcagcgacaacagcggctgcgacgcccccggcaacagcaaccccagcctgagcgtgcccagcagcgccgagagcgagaagcagaccagacaggcccccaagagaaagagcgtgagaagaggcagaaagccccccctgctgaagaagaagctgagaagcagcgtggccgcccccgagaagagcagcagcaacgacagcgtggacgaggagaccgccgagagcgacaccagccccgtgctggagaaggagcaccagcccgacgtggacagcagcaacatctgcaccgtgcagacccacgtggagaaccagagcgccaactgcctgaagagctgcaacgagcagatcgaggagagcgagaagcacaccgccaactacgacaccgaggagagagtgggcagcagcagcagcgagagctgcgcccaggacctgcccgtgctggtgggcgaggagggcgaggtgaagaagctggagaacaccggcatcgaggccaacgtgctgtgcctggagagcgagatcagcgagaacatcctggagaagggcggcgaccccctggagaagcaggaccagatcagcggcctgagccagagcgaggtgaagaccgacgtgtgcaccgtgcacctgcccaacgacttccccacctgcctgaccagcgagagcaaggtgtaccagcccgtgagctgccccctgagcgacctgagcgagaacgtggagagcgtggtgaacgaggagaagatcaccgagagcagcctggtggagatcaccgagcacaaggacttcaccctgaagaccgaggagctgatcgagagccccaagctggagagcagcgagggcgagatcatccagaccgtggacagacagagcgtgaagagccccgaggtgcagctgctgggccacgtggagaccgaggacgtggagatcatcgccacctgcgacaccttcggcaacgaggacttcaacaacatccaggacagcgagaacaacctgctgaagaacaacctgctgaacaccaagctggagaagagcctggaggagaagaacgagagcctgaccgagcaccccagaagcaccgagctgcccaagacccacatcgagcagatccagaagcacttcagcgaggacaacaacgagatgatccccatggagtgcgacagcttctgcagcgaccagaacgagagcgaggtggagcccagcgtgaacgccgacctgaagcagatgaacgagaacagcgtgacccactgcagcgagaacaacatgcccagcagcgacctggccgacgagaaggtggagaccgtgagccagcccagcgagagccccaaggacaccatcgacaagaccaagaagcccagaaccagaagaagcagattccacagccccagcaccacctggagccccaacaaggacaccccccaggagaagaagagaccccagagccccagccccagaagagagaccggcaaggagagcagaaagagccagagccccagccccaagaacgagagcgccagaggcagaaagaagagcagaagccagagccccaagaaggacatcgccagagagagaagacagagccagagcagaagccccaagagagacaccaccagagagagcagaagaagcgagagcctgagccccagaagagagaccagcagagagaacaagagaagccagcccagagtgaaggacagcagccccggcgagaagagcagaagccagagcagagagagagagagcgacagagacggccagagaagagagagagagagaagaaccagaaagtggagcagaagcagaagccacagcagaagccccagcagatgcagaaccaagagcaagagcagcagcttcggcagaatcgacagagacagctacagccccagatggaagggcagatgggccaacgacggctggagatgccccagaggcaacgacagatacagaaagaacgaccccgagaagcagaacgagaacaccagaaaggagaagaacgacatccacctggacgccgacgaccccaacagcgccgacaagcacagaaacgactgccccaactggatcaccgagaagatcaacagcggccccgaccccagaaccagaaaccccgagaagctgaaggagagccactgggaggagaacagaaacgagaacagcggcaacagctggaacaagaacttcggcagcggctgggtgagcaacagaggcagaggcagaggcaacagaggcagaggcacctacagaagcagcttcgcctacaaggaccagaacgagaacagatggcagaacagaaagcccctgagcggcaacagcaacagcagcggcagcgagagcttcaagttcgtggagcagcagagctacaagagaaagagcgagcaggagttcagcttcgacacccccgccgacagaagcggctggaccagcgccagcagctgggccgtgagaaagaccctgcccgccgacgtgcagaactactacagcagaagaggcagaaacagcagcggcccccagagcggctggatgaagcaggaggaggagaccagcggccaggacagcagcctgaaggaccagaccaaccagcaggtggacggcagccagctgcccatcaacatgatgcagccccagatgaacgtgatgcagcagcagatgaacgcccagcaccagcccatgaacatcttcccctaccccgtgggcgtgcacgcccccctgatgaacatccagagaaaccccttcaacatccacccccagctgcccctgcacctgcacaccggcgtgcccctgatgcaggtggccacccccaccagcgtgagccagggcctgcccccccccccccccccccccccccccagccagcaggtgaactacatcgccagccagcccgacggcaagcagctgcagggcatccccagcagcagccacgtgagcaacaacatgagcacccccgtgctgcccgcccccaccgccgcccccggcaacaccggcatggtgcagggccccagcagcggcaacaccagcagcagcagccacagcaaggccagcaacgccgccgtgaagctggccgagagcaaggtgagcgtggccgtggaggccagcgccgacagcagcaagaccgacaagaagctgcagatccaggagaaggccgcccaggaggtgaagctggccatcaagcccttctaccagaacaaggacatcaccaaggaggagtacaaggagatcgtgagaaaggccgtggacaaggtgtgccacagcaagagcggcgaggtgaacagcaccaaggtggccaacctggtgaaggcctacgtggacaagtacaagtacagcagaaagggcagccagaagaagaccctggaggagcccgtgagcaccgagaagaacatcggctag

SEQ ID NO: 13026 - DNA, 4392 bp, synthetic construct; identical to SEQ ID NO: 13025
  misc_feature 1..4392: note = Description of Artificial Sequence: Synthetic coding sequence
  source 1..4392: mol_type = other DNA

SEQ ID NO: 13027 - DNA, 3447 bp, synthetic construct
  misc_feature 1..3447: note = Description of Artificial Sequence: Synthetic coding sequence
  source 1..3447: mol_type = other DNA
atgaccacccccaccagaagaagcaccagaaacaccagagccgagaccgccagccagagccagagaagccccatcagcgacaacagcggctgcgacgcccccggcaacagcaaccccagcctgagcgtgcccagcagcgccgagagcgagaagcagaccagacaggcccccaagagaaagagcgtgagaagaggcagaaagccccccctgctgaagaagaagctgagaagcagcgtggccgcccccgagaagagcagcagcaacgacagcgtggacgaggagaccgccgagagcgacaccagccccgtgctggagaaggagcaccagcccgacgtggacagcagcaacatctgcaccgtgcagacccacgtggagaaccagagcgccaactgcctgaagagctgcaacgagcagatcgaggagagcgagaagcacaccgccaactacgacaccgaggagagagtgggcagcagcagcagcgagagctgcgcccaggacctgcccgtgctggtgggcgaggagggcgaggtgaagaagctggagaacaccggcatcgaggccaacgtgctgtgcctggagagcgagatcagcgagaacatcctggagaagggcggcgaccccctggagaagcaggaccagatcagcggcctgagccagagcgaggtgaagaccgacgtgtgcaccgtgcacctgcccaacgacttccccacctgcctgaccagcgagagcaaggtgtaccagcccgtgagctgccccctgagcgacctgagcgagaacgtggagagcgtggtgaacgaggagaagatcaccgagagcagcctggtggagatcaccgagcacaaggacttcaccctgaagaccgaggagctgatcgagagccccaagctggagagcagcgagggcgagatcatccagaccgtggacagacagagcgtgaagagccccgaggtgcagctgctgggccacgtggagaccgaggacgtggagatcatcgccacctgcgacaccttcggcaacgaggacttcaacaacatccaggacagcgagaacaacctgctgaagaacaacctgctgaacaccaagctggagaagagcctggaggagaagaacgagagcctgaccgagcaccccagaagcaccgagctgcccaagacccacatcgagcagatccagaagcacttcagcgaggacaacaacgagatgatccccatggagtgcgacagcttctgcagcgaccagaacgagagcgaggtggagcccagcgtgaacgccgacctgaagcagatgaacgagaacagcgtgacccactgcagcgagaacaacatgcccagcagcgacctggccgacgagaaggtggagaccgtgagccagcccagcgagagccccaaggacaccatcgacaagaccaagaagcccagaaccagaagaagcagattccacagccccagcaccacctggagccccaacaaggacaccccccaggagaagaagagaccccagagccccagccccagaagagagaccggcaaggagagcagaaagagccagagccccagccccaagaacgagagcgccagaggcagaaagaagagcagaagccagagccccaagaaggacatcgccagagagagaagacagagccagagcagaagccccaagagagacaccaccagagagagcagaagaagcgagagcctgagccccagaagagagaccagcagagagaacaagagaagccagcccagagtgaaggacagcagccccggcgagaagagcagaagccagagcagagagagagagagcgacagagacggccagagaagagagagagagagaagaaccagaaagtggagcagaagcagaagccacagcagaagccccagcagatgcagaaccaagagcaagagcagcagcttcggcagaatcgacagagacagctacagccccagatggaagggcagatgggccaacgacggctggagatgccccagaggcaacgacagatacagaaagaacgaccccgagaagcagaacgagaacaccagaaaggagaagaacgacatccacctggacgccgacgaccccaacagcgccgacaagcacagaaacgactgccccaactggatcaccgagaagatcaacagcggccccgaccccagaaccagaaaccccgagaagctgaaggagagccactgggaggagaacagaaacgagaacagcggcaacagctggaacaagaacttcggcagcggctgggtgagcaacagaggcagaggcagaggcaacagaggcagaggcacctacagaagcagcttcgcctacaaggaccagaacgagaacagatggcagaacagaaagcccctgagcggcaacagcaacagcagcggcagcgagagcttcaagttcgtggagcagcagagctacaagagaaagagcgagcaggagttcagcttcgacacccccgccgacagaagcggctggaccagcgccagcagctgggccgtgagaaagaccctgcccgccgacgtgcagaactactacagcagaagaggcagaaacagcagcggcccccagagcggctggatgaagcaggaggaggagaccagcggccaggacagcagcctgaaggaccagaccaaccagcaggtggacggcagccagctgcccatcaacatgatgcagccccagatgaacgtgatgcagcagcagatgaacgcccagcaccagcccatgaacatcttcccctaccccgtgggcgtgcacgcccccctgatgaacatccagagaaaccccttcaacatccacccccagctgcccctgcacctgcacaccggcgtgcccctgatgcaggtggccacccccaccagcgtgagccagggcctgcccccccccccccccccccccccccccagccagcaggtgaactacatcgccagccagcccgacggcaagcagctgcagggcatccccagcagcagccacgtgagcaacaacatgagcacccccgtgctgcccgcccccaccgccgcccccggcaacaccggcatggtgcagggccccagcagcggcaacaccagcagcagcagccacagcaaggccagcaacgccgccgtgaagctggccgagagcaaggtgagcgtggccgtggaggccagcgccgacagcagcaagaccgacaagaagctgcagatccaggagaaggccgcccaggaggtgaagctggccatcaagcccttctaccagaacaaggacatcaccaaggaggagtacaaggagatcgtgagaaaggccgtggacaaggtgtgccacagcaagagcggcgaggtgaacagcaccaaggtggccaacctggtgaaggcctacgtggacaagtacaagtacagcagaaagggcagccagaagaagaccctggaggagcccgtgagcaccgagaagaacatcggctag

SEQ ID NO: 13028 - DNA, 1401 bp, synthetic construct
  misc_feature 1..1401: note = Description of Artificial Sequence: Synthetic coding sequence
  source 1..1401: mol_type = other DNA
atggccgaggagcaggacctgagcgaggtggagctgagccccgtgggcagcgaggagcccagatgcctgagccccggcagcgcccccagcctgggccccgacggcggcggcggcggcagcggcctgagagccagccccggccccggcgagctgggcaaggtgaagaaggagcagcaggacggcgaggccgacgacgacaagttccccgtgtgcatcagagaggccgtgagccaggtgctgagcggctacgactggaccctggtgcccatgcccgtgagagtgaacggcgccagcaagagcaagccccacgtgaagagacccatgaacgccttcatggtgtgggcccaggccgccagaagaaagctggccgaccagtacccccacctgcacaacgccgagctgagcaagaccctgggcaagctgtggagactgctgaacgagagcgacaagagacccttcatcgaggaggccgagagactgagaatgcagcacaagaaggaccaccccgactacaagtaccagcccagaagaagaaagaacggcaaggccgcccagggcgaggccgagtgccccggcggcgaggccgagcagggcggcaccgccgccatccaggcccactacaagagcgcccacctggaccacagacaccccggcgagggcagccccatgagcgacggcaaccccgagcaccccagcggccagagccacggcccccccaccccccccaccacccccaagaccgagctgcagagcggcaaggccgaccccaagagagacggcagaagcatgggcgagggcggcaagccccacatcgacttcggcaacgtggacatcggcgagatcagccacgaggtgatgagcaacatggagaccttcgacgtggccgagctggaccagtacctgccccccaacggccaccccggccacgtgagcagctacagcgccgccggctacggcctgggcagcgccctggccgtggccagcggccacagcgcctggatcagcaagccccccggcgtggccctgcccaccgtgagcccccccggcgtggacgccaaggcccaggtgaagaccgagaccgccggcccccagggccccccccactacaccgaccagcccagcaccagccagatcgcctacaccagcctgagcctgccccactacggcagcgccttccccagcatcagcagaccccagttcgactacagcgaccaccagcccagcggcccctactacggccacagcggccaggccagcggcctgtacagcgccttcagctacatgggccccagccagagacccctgtacaccgccatcagcgaccccagccccagcggcccccagagccacagccccacccactgggagcagcccgtgtacaccaccctgagcagaccctag

SEQ ID NO: 13029 - DNA, 1401 bp, synthetic construct; identical to SEQ ID NO: 13028
  misc_feature 1..1401: note = Description of Artificial Sequence: Synthetic coding sequence
  source 1..1401: mol_type = other DNA

SEQ ID NO: 13030 - DNA, 861 bp, synthetic construct
  misc_feature 1..861: note = Description of Artificial Sequence: Synthetic coding sequence
  source 1..861: mol_type = other DNA
atggccgaggagcaggacctgagcgaggtggagctgagccccgtgggcagcgaggagcccagatgcctgagccccggcagcgcccccagcctgggccccgacggcggcggcggcggcagcggcctgagagccagccccggccccggcgagctgggcaaggtgaagaaggagcagcaggacggcgaggccgacgacgacaagttccccgtgtgcatcagagaggccgtgagccaggtgctgagcggctacgactggaccctggtgcccatgcccgtgagagtgaacggcgccagcaagagcaagccccacgtgaagagacccatgaacgccttcatggtgtgggcccaggccgccagaagaaagctggccgaccagtacccccacctgcacaacgccgagctgagcaagaccctgggcaagctgtggagactgctgaacgagagcgacaagagacccttcatcgaggaggccgagagactgagaatgcagcacaagaaggaccaccccgactacaagtaccagcccagaagaagaaagaacggcaaggccgcccagggcgaggccgagtgccccggcggcgaggccgagcagggcggcaccgccgccatccaggcccactacaagagcgcccacctggaccacagacaccccggcgagggcagccccatgagcgacggcaaccccgagcaccccagcggccagagccacggcccccccaccccccccaccacccccaagaccgagctgcagagcggcaaggccgaccccaagagagacggcagacccagccccagcggcccccagagccacagccccacccactgggagcagcccgtgtacaccaccctgagcagaccctag

SEQ ID NO: 13031 - DNA, 642 bp, synthetic construct
  misc_feature 1..642: note = Description of Artificial Sequence: Synthetic coding sequence
  source 1..642: mol_type = other DNA
atggccgaggagcaggacctgagcgaggtggagctgagccccgtgggcagcgaggagcccagatgcctgagccccggcagcgcccccagcctgggccccgacggcggcggcggcggcagcggcctgagagccagccccggccccggcgagctgggcaaggtgaagaaggagcagcaggacggcgaggccgacgacgacaagttccccgtgtgcatcagagaggccgtgagccaggtgctgagcggctacgactggaccctggtgcccatgcccgtgagagtgaacggcgccagcaagagcaagccccacgtgaagagacccatgaacgccttcatggtgtgggcccaggccgccagaagaaagctggccgaccagtacccccacctgcacaacgccgagctgagcaagaccctgggcaagctgtggagactgctgaacgagagcgacaagagacccttcatcgaggaggccgagagactgagaatgcagcacaagaaggaccaccccgactacaagtaccagcccagaagaagaaagaacggcaaggccgcccagggcgaggccgagtgccccggcggcgaggccgagcagggcggcaccgccgccatccaggcccactacaagagcgcccacctggactag

SEQ ID NO: 13032 - DNA, 1425 bp, synthetic construct
  misc_feature 1..1425: note = Description of Artificial Sequence: Synthetic coding sequence
  source 1..1425: mol_type = other DNA
atggtgcagcagaccaacaacgccgagaacaccgaggccctgctggccggcgagagcagcgacagcggcgccggcctggagctgggcatcgccagcagccccacccccggcagcaccgccagcaccggcggcaaggccgacgaccccagctggtgcaagacccccagcggccacatcaagagacccatgaacgccttcatggtgtggagccagatcgagagaagaaagatcatggagcagagccccgacatgcacaacgccgagatcagcaagagactgggcaagagatggaagctgctgaaggacagcgacaagatccccttcatcagagaggccgagagactgagactgaagcacatggccgactaccccgactacaagtacagacccagaaagaaggtgaagagcggcaacgccaacagcagcagcagcgccgccgccagcagcaagcccggcgagaagggcgacaaggtgggcggcagcggcggcggcggccacggcggcggcggcggcggcggcagcagcaacgccggcggcggcggcggcggcgccagcggcggcggcgccaacagcaagcccgcccagaagaagagctgcggcagcaaggtggccggcggcgccggcggcggcgtgagcaagccccacgccaagctgatcctggccggcggcggcggcggcggcaaggccgccgccgccgccgccgccagcttcgccgccgagcaggccggcgccgccgccctgctgcccctgggcgccgccgccgaccaccacagcctgtacaaggccagaacccccagcgccagcgccagcgccagcagcgccgccagcgccagcgccgccctggccgcccccggcaagcacctggccgagaagaaggtgaagagagtgtacctgttcggcggcctgggcaccagcagcagccccgtgggcggcgtgggcgccggcgccgaccccagcgaccccctgggcctgtacgaggaggagggcgccggctgcagccccgacgcccccagcctgagcggcagaagcagcgccgccagcagccccgccgccggcagaagccccgccgaccacagaggctacgccagcctgagagccgccagccccgcccccagcagcgcccccagccacgccagcagcagcgccagcagccacagcagcagcagcagcagcagcggcagcagcagcagcgacgacgagttcgaggacgacctgctggacctgaaccccagcagcaacttcgagagcatgagcctgggcagcttcagcagcagcagcgccctggacagagacctggacttcaacttcgagcccggcagcggcagccacttcgagttccccgactactgcacccccgaggtgagcgagatgatcagcggcgactggctggagagcagcatcagcaacctggtgttcacctactag

SEQ ID NO: 13033 - DNA, 1425 bp, synthetic construct; identical to SEQ ID NO: 13032
  misc_feature 1..1425: note = Description of Artificial Sequence: Synthetic coding sequence
  source 1..1425: mol_type = other DNA

SEQ ID NO: 13034 - DNA, 3318 bp, synthetic construct
  misc_feature 1..3318: note = Description of Artificial Sequence: Synthetic coding sequence
  source 1..3318: mol_type = other DNA
atgctggagcccagcagcgtgctgcacgccaacgtgaaccaggcccccctgtggtgcctggtgctgagatggtgcagagagtgcaaggacaccgtgtgcggcggcaagcagaagagcagagtgaaccacaccttccagagaagagagatcgaggccaaggaggcctgcgactggctgagagccgccggcttcccccagtacgcccagctgtacgaggacagccagttccccatcaacatcgtggccgtgaagaacgaccacgacttcctggagaaggacctggtggagcccctgtgcagaagactgaacaccctgaacaagtgcgccagcatgaagctggacgtgaacttccagagaaagaagggcgacgacagcgacgaggaggacctgtgcatcagcaacaagtggaccttccagagaaccagcagaagatggagcagagtggacgacctgtacaccctgctgcccagaggcgacagaaacggcagccccggcggcaccggcatgagaaacaccaccagcagcgagagcgtgctgaccgacctgagcgagcccgaggtgtgcagcatccacagcgagagcagcggcggcagcgacagcagaagccagcccggccagtgctgcaccgacaaccccgtgatgctggacgcccccctggtgagcagcagcctgccccagccccccagagacgtgctgaaccaccccttccaccccaagaacgagaagcccaccagagccagagccaagagcttcctgaagagaatggagaccctgagaggcaagggcgcccacggcagacacaagggcagcggcagaaccggcggcctggtgatcagcggccccatgctgcagcaggagcccgagagcttcaaggccatgcagtgcatccagatccccaacggcgacctgcagaacagccccccccccgcctgcagaaagggcctgccctgcagcggcaagagcagcggcgagagcagccccagcgagcacagcagcagcggcgtgagcaccccctgcctgaaggagagaaagtgccacgaggccaacaagagaggcggcatgtacctggaggacctggacgtgctggccggcaccgccctgcccgacgccggcgaccagagcagaatgcacgagttccacagccaggagaacctggtggtgcacatccccaaggaccacaagcccggcaccttccccaaggccctgagcatcgagagcctgagccccaccgacagcagcaacggcgtgaactggagaaccggcagcatcagcctgggcagagagcaggtgcccggcgccagagagcccagactgatggccagctgccacagagccagcagagtgagcatctacgacaacgtgcccggcagccacctgtacgccagcaccggcgacctgctggacctggagaaggacgacctgttcccccacctggacgacatcctgcagcacgtgaacggcctgcaggaggtggtggacgactggagcaaggacgtgctgcccgagctgcagacccacgacaccctggtgggcgagcccggcctgagcaccttccccagccccaaccagatcaccctggacttcgagggcaacagcgtgagcgagggcagaaccacccccagcgacgtggagagagacgtgaccagcctgaacgagagcgagccccccggcgtgagagacagaagagacagcggcgtgggcgccagcctgaccagacccaacagaagactgagatggaacagcttccagctgagccaccagcccagacccgcccccgccagcccccacatcagcagccagaccgccagccagctgagcctgctgcagagattcagcctgctgagactgaccgccatcatggagaagcacagcatgagcaacaagcacggctggacctggagcgtgcccaagttcatgaagagaatgaaggtgcccgactacaaggacaaggccgtgttcggcgtgcccctgatcgtgcacgtgcagagaaccggccagcccctgccccagagcatccagcaggccctgagatacctgagaagcaactgcctggaccaggtgggcctgttcagaaagagcggcgtgaagagcagaatccacgccctgagacagatgaacgagaacttccccgagaacgtgaactacgaggaccagagcgcctacgacgtggccgacatggtgaagcagttcttcagagacctgcccgagcccctgttcaccaacaagctgagcgagaccttcctgcacatctaccagtacgtgagcaaggagcagagactgcaggccgtgcaggccgccatcctgctgctggccgacgagaacagagaggtgctgcagaccctgctgtgcttcctgaacgacgtggtgaacctggtggaggagaaccagatgacccccatgaacctggccgtgtgcctggcccccagcctgttccacctgaacctgctgaagaaggagagcagccccagagtgatccagaagaagtacgccaccggcaagcccgaccagaaggacctgaacgagaacctggccgccgcccagggcctggcccacatgatcatggagtgcgacagactgttcgaggtgccccacgagctggtggcccagagcagaaacagctacgtggaggccgagatccacgtgcccaccctggaggagctgggcacccagctggaggagagcggcgccaccttccacacctacctgaaccacctgatccagggcctgcagaaggaggccaaggagaagttcaagggctgggtgacctgcagcagcaccgacaacaccgacctggccttcaagaaggtgggcgacggcaaccccctgaagctgtggaaggccagcgtggaggtggaggccccccccagcgtggtgctgaacagagtgctgagagagagacacctgtgggacgaggacttcgtgcagtggaaggtggtggagaccctggacagacagaccgagatctaccagtacgtgctgaacagcatggccccccaccccagcagagacttcgtggtgctgagaacctggaagaccgacctgcccaagggcatgtgcaccctggtgagcctgagcgtggagcacgaggaggcccagctgctgggcggcgtgagagccgtggtgatggacagccagtacctgatcgagccctgcggcagcggcaagagcagactgacccacatctgcagaatcgacctgaagggccacagccccgagtggtacagcaagggcttcggccacctgtgcgccgccgaggtggccagaatcagaaacagcttccagcccctgatcgccgagggccccgagaccaagatctag

SEQ ID NO: 13035 - DNA, 3342 bp, synthetic construct
  misc_feature 1..3342: note = Description of Artificial Sequence: Synthetic coding sequence
  source 1..3342: mol_type = other DNA
atgttcagccaggtgcccagaacccccgccagcggctgctactacctgaacagcatgacccccgagggccaggagatgtacctgagattcgaccagaccaccagaagaagcccctacagaatgagcagaatcctggccagacaccagctggtgaccaagatccagcaggagatcgaggccaaggaggcctgcgactggctgagagccgccggcttcccccagtacgcccagctgtacgaggacagccagttccccatcaacatcgtggccgtgaagaacgaccacgacttcctggagaaggacctggtggagcccctgtgcagaagactgaacaccctgaacaagtgcgccagcatgaagctggacgtgaacttccagagaaagaagggcgacgacagcgacgaggaggacctgtgcatcagcaacaagtggaccttccagagaaccagcagaagatggagcagagtggacgacctgtacaccctgctgcccagaggcgacagaaacggcagccccggcggcaccggcatgagaaacaccaccagcagcgagagcgtgctgaccgacctgagcgagcccgaggtgtgcagcatccacagcgagagcagcggcggcagcgacagcagaagccagcccggccagtgctgcaccgacaaccccgtgatgctggacgcccccctggtgagcagcagcctgccccagccccccagagacgtgctgaaccaccccttccaccccaagaacgagaagcccaccagagccagagccaagagcttcctgaagagaatggagaccctgagaggcaagggcgcccacggcagacacaagggcagcggcagaaccggcggcctggtgatcagcggccccatgctgcagcaggagcccgagagcttcaaggccatgcagtgcatccagatccccaacggcgacctgcagaacagccccccccccgcctgcagaaagggcctgccctgcagcggcaagagcagcggcgagagcagccccagcgagcacagcagcagcggcgtgagcaccccctgcctgaaggagagaaagtgccacgaggccaacaagagaggcggcatgtacctggaggacctggacgtgctggccggcaccgccctgcccgacgccggcgaccagagcagaatgcacgagttccacagccaggagaacctggtggtgcacatccccaaggaccacaagcccggcaccttccccaaggccctgagcatcgagagcctgagccccaccgacagcagcaacggcgtgaactggagaaccggcagcatcagcctgggcagagagcaggtgcccggcgccagagagcccagactgatggccagctgccacagagccagcagagtgagcatctacgacaacgtgcccggcagccacctgtacgccagcaccggcgacctgctggacctggagaaggacgacctgttcccccacctggacgacatcctgcagcacgtgaacggcctgcaggaggtggtggacgactggagcaaggacgtgctgcccgagctgcagacccacgacaccctggtgggcgagcccggcctgagcaccttccccagccccaaccagatcaccctggacttcgagggcaacagcgtgagcgagggcagaaccacccccagcgacgtggagagagacgtgaccagcctgaacgagagcgagccccccggcgtgagagacagaagagacagcggcgtgggcgccagcctgaccagacccaacagaagactgagatggaacagcttccagctgagccaccagcccagacccgcccccgccagcccccacatcagcagccagaccgccagccagctgagcctgctgcagagattcagcctgctgagactgaccgccatcatggagaagcacagcatgagcaacaagcacggctggacctggagcgtgcccaagttcatgaagagaatgaaggtgcccgactacaaggacaaggccgtgttcggcgtgcccctgatcgtgcacgtgcagagaaccggccagcccctgccccagagcatccagcaggccctgagatacctgagaagcaactgcctggaccaggtgggcctgttcagaaagagcggcgtgaagagcagaatccacgccctgagacagatgaacgagaacttccccgagaacgtgaactacgaggaccagagcgcctacgacgtggccgacatggtgaagcagttcttcagagacctgcccgagcccctgttcaccaacaagctgagcgagaccttcctgcacatctaccagtacgtgagcaaggagcagagactgcaggccgtgcaggccgccatcctgctgctggccgacgagaacagagaggtgctgcagaccctgctgtgcttcctgaacgacgtggtgaacctggtggaggagaaccagatgacccccatgaacctggccgtgtgcctggcccccagcctgttccacctgaacctgctgaagaaggagagcagccccagagtgatccagaagaagtacgccaccggcaagcccgaccagaaggacctgaacgagaacctggccgccgcccagggcctggcccacatgatcatggagtgcgacagactgttcgaggtgccccacgagctggtggcccagagcagaaacagctacgtggaggccgagatccacgtgcccaccctggaggagctgggcacccagctggaggagagcggcgccaccttccacacctacctgaaccacctgatccagggcctgcagaaggaggccaaggagaagttcaagggctgggtgacctgcagcagcaccgacaacaccgacctggccttcaagaaggtgggcgacggcaaccccctgaagctgtggaaggccagcgtggaggtggaggccccccccagcgtggtgctgaacagagtgctgagagagagacacctgtgggacgaggacttcgtgcagtggaaggtggtggagaccctggacagacagaccgagatctaccagtacgtgctgaacagcatggccccccaccccagcagagacttcgtggtgctgagaacctggaagaccgacctgcccaagggcatgtgcaccctggtgagcctgagcgtggagcacgaggaggcccagctgctgggcggcgtgagagccgtggtgatggacagccagtacctgatcgagccctgcggcagcggcaagagcagactgacccacatctgcagaatcgacctgaagggccacagccccgagtggtacagcaagggcttcggccacctgtgcgccgccgaggtggccagaatcagaaacagcttccagcccctgatcgccgagggccccgagaccaagatctag

SEQ ID NO: 13036 - DNA, 2064 bp, synthetic construct
  misc_feature 1..2064: note = Description of Artificial Sequence: Synthetic coding sequence
  source 1..2064: mol_type = other DNA
atgctggagcccagcagcgtgctgcacgccaacgtgaaccaggcccccctgtggtgcctggtgctgagatggtgcagagagtgcaaggacaccgtgtgcggcggcaagcagaagagcagagtgaaccacaccttccagagaagagagatcgaggccaaggaggcctgcgactggctgagagccgccggcttcccccagtacgcccagctgtacgaggacagccagttccccatcaacatcgtggccgtgaagaacgaccacgacttcctggagaaggacctggtggagcccctgtgcagaagactgaacaccctgaacaagtgcgccagcatgaagctggacgtgaacttccagagaaagaagggcgacgacagcgacgaggaggacctgtgcatcagcaacaagtggaccttccagagaaccagcagaagatggagcagagtggacgacctgtacaccctgctgcccagaggcgacagaaacggcagccccggcggcaccggcatgagaaacaccaccagcagcgagagcgtgctgaccgacctgagcgagcccgaggtgtgcagcatccacagcgagagcagcggcggcagcgacagcagaagccagcccggccagtgctgcaccgacaaccccgtgatgctggacgcccccctggtgagcagcagcctgccccagccccccagagacgtgctgaaccaccccttccaccccaagaacgagaagcccaccagagccagagccaagagcttcctgaagagaatggagaccctgagaggcaagggcgcccacggcagacacaagggcagcggcagaaccggcggcctggtgatcagcggccccatgctgcagcaggagcccgagagcttcaaggccatgcagtgcatccagatccccaacggcgacctgcagaacagccccccccccgcctgcagaaagggcctgccctgcagcggcaagagcagcggcgagagcagccccagcgagcacagcagcagcggcgtgagcaccccctgcctgaaggagagaaagtgccacgaggccaacaagagaggcggcatgtacctggaggacctggacgtgctggccggcaccgccctgcccgacgccggcgaccagagcagaatgcacgagttccacagccaggagaacctggtggtgcacatccccaaggaccacaagcccggcaccttccccaaggccctgagcatcgagagcctgagccccaccgacagcagcaacggcgtgaactggagaaccggcagcatcagcctgggcagagagcaggtgcccggcgccagagagcccagactgatggccagctgccacagagccagcagagtgagcatctacgacaacgtgcccggcagccacctgtacgccagcaccggcgacctgctggacctggagaaggacgacctgttcccccacctggacgacatcctgcagcacgtgaacggcctgcaggaggtggtggacgactggagcaaggacgtgctgcccgagctgcagacccacgacaccctggtgggcgagcccggcctgagcaccttccccagccccaaccagatcaccctggacttcgagggcaacagcgtgagcgagggcagaaccacccccagcgacgtggagagagacgtgaccagcctgaacgagagcgagccccccggcgtgagagacagaagagacagcggcgtgggcgccagcctgaccagacccaacagaagactgagatggaacagcttccagctgagccaccagcccagacccgcccccgccagcccccacatcagcagccagaccgccagccagctgagcctgctgcagagattcagcctgctgagactgaccgccatcatggagaagcacagcatgagcaacaagcacggctggacctggagcgtgcccaagttcatgaagagaatgaaggtgcccgactacaaggacaaggccgtgttcggcgtgcccctgatcgtgcacgtgcagagaaccggccagcccctgccccagagcatccagcaggccctgagatacctgagaagcaactgcctggaccaggagtag

SEQ ID NO: 13037 - DNA, 2988 bp, synthetic construct
  misc_feature 1..2988: note = Description of Artificial Sequence: Synthetic coding sequence
  source 1..2988: mol_type = other DNA
atgaagctggacgtgaacttccagagaaagaagggcgacgacagcgacgaggaggacctgtgcatcagcaacaagtggaccttccagagaaccagcagaagatggagcagagtggacgacctgtacaccctgctgcccagaggcgacagaaacggcagccccggcggcaccggcatgagaaacaccaccagcagcgagagcgtgctgaccgacctgagcgagcccgaggtgtgcagcatccacagcgagagcagcggcggcagcgacagcagaagccagcccggccagtgctgcaccgacaaccccgtgatgctggacgcccccctggtgagcagcagcctgccccagccccccagagacgtgctgaaccaccccttccaccccaagaacgagaagcccaccagagccagagccaagagcttcctgaagagaatggagaccctgagaggcaagggcgcccacggcagacacaagggcagcggcagaaccggcggcctggtgatcagcggccccatgctgcagcaggagcccgagagcttcaaggccatgcagtgcatccagatccccaacggcgacctgcagaacagccccccccccgcctgcagaaagggcctgccctgcagcggcaagagcagcggcgagagcagccccagcgagcacagcagcagcggcgtgagcaccccctgcctgaaggagagaaagtgccacgaggccaacaagagaggcggcatgtacctggaggacctggacgtgctggccggcaccgccctgcccgacgccggcgaccagagcagaatgcacgagttccacagccaggagaacctggtggtgcacatccccaaggaccacaagcccggcaccttccccaaggccctgagcatcgagagcctgagccccaccgacagcagcaacggcgtgaactggagaaccggcagcatcagcctgggcagagagcaggtgcccggcgccagagagcccagactgatggccagctgccacagagccagcagagtgagcatctacgacaacgtgcccggcagccacctgtacgccagcaccggcgacctgctggacctggagaaggacgacctgttcccccacctggacgacatcctgcagcacgtgaacggcctgcaggaggtggtggacgactggagcaaggacgtgctgcccgagctgcagacccacgacaccctggtgggcgagcccggcctgagcaccttccccagccccaaccagatcaccctggacttcgagggcaacagcgtgagcgagggcagaaccacccccagcgacgtggagagagacgtgaccagcctgaacgagagcgagccccccggcgtgagagacagaagagacagcggcgtgggcgccagcctgaccagacccaacagaagactgagatggaacagcttccagctgagccaccagcccagacccgcccccgccagcccccacatcagcagccagaccgccagccagctgagcctgctgcagagattcagcctgctgagactgaccgccatcatggagaagcacagcatgagcaacaagcacggctggacctggagcgtgcccaagttcatgaagagaatgaaggtgcccgactacaaggacaaggccgtgttcggcgtgcccctgatcgtgcacgtgcagagaaccggccagcccctgccccagagcatccagcaggccctgagatacctgagaagcaactgcctggaccaggtgggcctgttcagaaagagcggcgtgaagagcagaatccacgccctgagacagatgaacgagaacttccccgagaacgtgaactacgaggaccagagcgcctacgacgtggccgacatggtgaagcagttcttcagagacctgcccgagcccctgttcaccaacaagctgagcgagaccttcctgcacatctaccagtacgtgagcaaggagcagagactgcaggccgtgcaggccgccatcctgctgctggccgacgagaacagagaggtgctgcagaccctgctgtgcttcctgaacgacgtggtgaacctggtggaggagaaccagatgacccccatgaacctggccgtgtgcctggcccccagcctgttccacctgaacctgctgaagaaggagagcagccccagagtgatccagaagaagtacgccaccggcaagcccgaccagaaggacctgaacgagaacctggccgccgcccagggcctggcccacatgatcatggagtgcgacagactgttcgaggtgccccacgagctggtggcccagagcagaaacagctacgtggaggccgagatccacgtgcccaccctggaggagctgggcacccagctggaggagagcggcgccaccttccacacctacctgaaccacctgatccagggcctgcagaaggaggccaaggagaagttcaagggctgggtgacctgcagcagcaccgacaacaccgacctggccttcaagaaggtgggcgacggcaaccccctgaagctgtggaaggccagcgtggaggtggaggccccccccagcgtggtgctgaacagagtgctgagagagagacacctgtgggacgaggacttcgtgcagtggaaggtggtggagaccctggacagacagaccgagatctaccagtacgtgctgaacagcatggccccccaccccagcagagacttcgtggtgctgagaacctggaagaccgacctgcccaagggcatgtgcaccctggtgagcctgagcgtggagcacgaggaggcccagctgctgggcggcgtgagagccgtggtgatggacagccagtacctgatcgagccctgcggcagcggcaagagcagactgacccacatctgcagaatcgacctgaagggccacagccccgagtggtacagcaagggcttcggccacctgtgcgccgccgaggtggccagaatcagaaacagcttccagcccctgatcgccgagggccccgagaccaagatctag

SEQ ID NO: 13038 - DNA, 450 bp, synthetic construct
  misc_feature 1..450: note = Description of Artificial Sequence: Synthetic coding sequence
  source 1..450: mol_type = other DNA
atggccagcagcgacatccaggtgaaggagctggagaagagagccagcggccaggccttcgagctgatcctgagccccagaagcaaggagagcgtgcccgagttccccctgagcccccccaagaagaaggacctgagcctggaggagatccagaagaagctggaggccgccgaggagagaagaaagagccacgaggccgaggtgctgaagcagctggccgagaagagagagcacgagaaggaggtgctgcagaaggccatcgaggagaacaacaacttcagcaagatggccgaggagaagctgacccacaagatggaggccaacaaggagaacagagaggcccagatggccgccaagctggagagactgagagagaaggacaagcacatcgaggaggtgagaaagaacaaggagagcaaggaccccgccgacgagaccgaggccgactag

SEQ ID NO: 13039 - DNA, 450 bp, synthetic construct; identical to SEQ ID NO: 13038
  misc_feature 1..450: note = Description of Artificial Sequence: Synthetic coding sequence
  source 1..450: mol_type = other DNA

SEQ ID NO: 13040 - DNA, 450 bp, synthetic construct; identical to SEQ ID NO: 13038
  misc_feature 1..450: note = Description of Artificial Sequence: Synthetic coding sequence
  source 1..450: mol_type = other DNA

SEQ ID NO: 13041 - DNA, 525 bp, synthetic construct
  misc_feature 1..525: note = Description of Artificial Sequence: Synthetic coding sequence
  source 1..525: mol_type = other DNA
atggccagcagcgacatccaggtgaaggagctggagaagagagccagcggccaggccttcgagctgatcctgagccccagaagcaaggagagcgtgcccgagttccccctgagcccccccaagaagaaggacctgagcctggaggagatccagaagaagctggaggccgccgaggagagaagaaagagccacgaggccgaggtgctgaagcagctggccgagaagagagagcacgagaaggaggtgctgcagaaggccatcgaggagaacaacaacttcagcaagatggccgaggagaagctgacccacaagatggaggccaacaaggagaacagagaggcccagatggccgccaagctggagagactgagagagaagatgtacttctggacccacggccccggcgcccaccccgcccagatcagcgccgagcagagctgcctgcacagcgtgcccgccctgtgccccgccctgggcctgcagagcgccctgatcacctggagcgacctgagccaccaccactag

SEQ ID NO: 13042 - DNA, 261 bp, synthetic construct
  misc_feature 1..261: note = Description of Artificial Sequence: Synthetic coding sequence
  source 1..261: mol_type = other DNA
atggccagcagcgacatccaggtgaaggagctggagaagagagccagcggccaggccttcgagctgatcctgagccccagaagcaaggagagcgtgcccgagttccccctgagcccccccaagaagaaggacctgagcctggaggagatccagaagaagctggaggccgccgaggagagaagaaagagccacgaggccgaggtgctgaagcagctggccgagaagagagagcacgagaaggaggtgctgcagaaggcctag

SEQ ID NO: 13043 - DNA, 450 bp, synthetic construct; identical to SEQ ID NO: 13038
  misc_feature 1..450: note = Description of Artificial Sequence: Synthetic coding sequence
  source 1..450: mol_type = other DNA

SEQ ID NO: 13044 - DNA, 3615 bp, synthetic construct
  misc_feature 1..3615: note = Description of Artificial Sequence: Synthetic coding sequence
  source 1..3615: mol_type = other DNA
atgagcttcttcaacttcagaaagatcttcaagctgggcagcgagaagaagaagaagcagtacgagcacgtgaagagagacctgaaccccgaggacttctgggagatcatcggcgagctgggcgacggcgccttcggcaaggtgtacaaggcccagaacaaggagaccagcgtgctggccgccgccaaggtgatcgacaccaagagcgaggaggagctggaggactacatggtggagatcgacatcctggccagctgcgaccaccccaacatcgtgaagctgctggacgccttctactacgagaacaacctgtggatcctgatcgagttctgcgccggcggcgccgtggacgccgtgatgctggagctggagagacccctgaccgagagccagatccaggtggtgtgcaagcagaccctggacgccctgaactacctgcacgacaacaagatcatccacagagacctgaaggccggcaacatcctgttcaccctggacggcgacatcaagctggccgacttcggcgtgagcgccaagaacaccagaaccatccagagaagagacagcttcatcggcaccccctactggatggcccccgaggtggtgatgtgcgagaccagcaaggacagaccctacgactacaaggccgacgtgtggagcctgggcatcaccctgatcgagatggccgagatcgagcccccccaccacgagctgaaccccatgagagtgctgctgaagatcgccaagagcgagccccccaccctggcccagcccagcagatggagcagcaacttcaaggacttcctgaagaagtgcctggagaagaacgtggacgccagatggaccaccagccagctgctgcagcaccccttcgtgaccgtggacagcaacaagcccatcagagagctgatcgccgaggccaaggccgaggtgaccgaggaggtggaggacggcaaggaggaggacgaggaggaggagaccgagaacagcctgcccatccccgccagcaagagagccagcagcgacctgagcatcgccagcagcgaggaggacaagctgagccagaacgcctgcatcctggagagcgtgagcgagaagaccgagagaagcaacagcgaggacaagctgaacagcaagatcctgaacgagaagcccaccaccgacgagcccgagaaggccgtggaggacatcaacgagcacatcaccgacgcccagctggaggccatgaccgagctgcacgacagaaccgccgtgatcaaggagaacgagagagagaagagacccaagctggagaacctgcccgacaccgaggaccaggagaccgtggacatcaacagcgtgagcgagggcaaggagaacaacatcatgatcaccctggagaccaacatcgagcacaacctgaagagcgaggaggagaaggaccaggagaagcagcagatgttcgagaacaagctgatcaagagcgaggagatcaaggacaccatcctgcagaccgtggacctggtgagccaggagaccggcgagaaggaggccaacatccaggccgtggacagcgaggtgggcctgaccaaggaggacacccaggagaagctgggcgaggacgacaagacccagaaggacgtgatcagcaacaccagcgacgtgatcggcacctgcgaggccgccgacgtggcccagaaggtggacgaggacagcgccgaggacacccagagcaacgacggcaaggaggtggtggaggtgggccagaagctgatcaacaagcccatggtgggccccgaggccggcggcaccaaggaggtgcccatcaaggagatcgtggagatgaacgagatcgaggagggcaagaacaaggagcaggccatcaacagcagcgagaacatcatggacatcaacgaggagcccggcaccaccgagggcgaggagatcaccgagagcagcagcaccgaggagatggaggtgagaagcgtggtggccgacaccgaccagaaggccctgggcagcgaggtgcaggacgccagcaaggtgaccacccagatcgacaaggagaagaaggagatccccgtgagcatcaagaaggagcccgaggtgaccgtggtgagccagcccaccgagccccagcccgtgctgatccccagcatcaacatcaacagcgacagcggcgagaacaaggaggagatcggcagcctgagcaagaccgagaccatcctgccccccgagagcgagaaccccaaggagaacgacaacgacagcggcaccggcagcaccgccgacaccagcagcatcgacctgaacctgagcatcagcagcttcctgagcaagaccaaggacagcggcagcatcagcctgcaggagaccagaagacagaagaagaccctgaagaagaccagaaagttcatcgtggacggcgtggaggtgagcgtgaccaccagcaagatcgtgaccgacagcgacagcaagaccgaggagctgagattcctgagaagacaggagctgagagagctgagattcctgcagaaggaggagcagagagcccagcagcagctgaacagcaagctgcagcagcagagagagcagatcttcagaagattcgagcaggagatgatgagcaagaagagacagtacgaccaggagatcgagaacctggagaagcagcagaagcagaccatcgagagactggagcaggagcacaccaacagactgagagacgaggccaagagaatcaagggcgagcaggagaaggagctgagcaagttccagaacatgctgaagaacagaaagaaggaggagcaggagttcgtgcagaagcagcagcaggagctggacggcagcctgaagaagatcatccagcagcagaaggccgagctggccaacatcgagagagagtgcctgaacaacaagcagcagctgatgagagccagagaggccgccatctgggagctggaggagagacacctgcaggagaagcaccagctgctgaagcagcagctgaaggaccagtacttcatgcagagacaccagctgctgaagagacacgagaaggagaccgagcagatgcagagatacaaccagagactgatcgaggagctgaagaacagacagacccaggagagagccagactgcccaagatccagagaagcgaggccaagaccagaatggccatgttcaagaagagcctgagaatcaacagcaccgccacccccgaccaggacagagacaagatcaagcagttcgccgcccaggaggagaagagacagaagaacgagagaatggcccagcaccagaagcacgagaaccagatgagagacctgcagctgcagtgcgaggccaacgtgagagagctgcaccagctgcagaacgagaagtgccacctgctggtggagcacgagacccagaagctgaaggagctggacgaggagcacagccaggagctgaaggagtggagagagaagctgagacccagaaagaagaccctggaggaggagttcgccagaaagctgcaggagcaggaggtgttcttcaagatgaccggcgagagcgagtgcctgaaccccagcacccagagcagaatcagcaagttctaccccatccccagcctgcacagcaccggcagctag

SEQ ID NO: 13045 - DNA, 3708 bp, synthetic construct
  misc_feature 1..3708: note = Description of Artificial Sequence: Synthetic coding sequence
  source 1..3708: mol_type = other DNA
atgagcttcttcaacttcagaaagatcttcaagctgggcagcgagaagaagaagaagcagtacgagcacgtgaagagagacctgaaccccgaggacttctgggagatcatcggcgagctgggcgacggcgccttcggcaaggtgtacaaggcccagaacaaggagaccagcgtgctggccgccgccaaggtgatcgacaccaagagcgaggaggagctggaggactacatggtggagatcgacatcctggccagctgcgaccaccccaacatcgtgaagctgctggacgccttctactacgagaacaacctgtggatcctgatcgagttctgcgccggcggcgccgtggacgccgtgatgctggagctggagagacccctgaccgagagccagatccaggtggtgtgcaagcagaccctggacgccctgaactacctgcacgacaacaagatcatccacagagacctgaaggccggcaacatcctgttcaccctggacggcgacatcaagctggccgacttcggcgtgagcgccaagaacaccagaaccatccagagaagagacagcttcatcggcaccccctactggatggcccccgaggtggtgatgtgcgagaccagcaaggacagaccctacgactacaaggccgacgtgtggagcctgggcatcaccctgatcgagatggccgagatcgagcccccccaccacgagctgaaccccatgagagtgctgctgaagatcgccaagagcgagccccccaccctggcccagcccagcagatggagcagcaacttcaaggacttcctgaagaagtgcctggagaagaacgtggacgccagatggaccaccagccagctgctgcagcaccccttcgtgaccgtggacagcaacaagcccatcagagagctgatcgccgaggccaaggccgaggtgaccgaggaggtggaggacggcaaggaggaggacgaggaggaggagaccgagaacagcctgcccatccccgccagcaagagagccagcagcgacctgagcatcgccagcagcgaggaggacaagctgagccagaacgcctgcatcctggagagcgtgagcgagaagaccgagagaagcaacagcgaggacaagctgaacagcaagatcctgaacgagaagcccaccaccgacgagcccgagaaggccgtggaggacatcaacgagcacatcaccgacgcccagctggaggccatgaccgagctgcacgacagaaccgccgtgatcaaggagaacgagagagagaagagacccaagctggagaacctgcccgacaccgaggaccaggagaccgtggacatcaacagcgtgagcgagggcaaggagaacaacatcatgatcaccctggagaccaacatcgagcacaacctgaagagcgaggaggagaaggaccaggagaagcagcagatgttcgagaacaagctgatcaagagcgaggagatcaaggacaccatcctgcagaccgtggacctggtgagccaggagaccggcgagaaggaggccaacatccaggccgtggacagcgaggtgggcctgaccaaggaggacacccaggagaagctgggcgaggacgacaagacccagaaggacgtgatcagcaacaccagcgacgtgatcggcacctgcgaggccgccgacgtggcccagaaggtggacgaggacagcgccgaggacacccagagcaacgacggcaaggaggtggtggaggtgggccagaagctgatcaacaagcccatggtgggccccgaggccggcggcaccaaggaggtgcccatcaaggagatcgtggagatgaacgagatcgaggagggcaagaacaaggagcaggccatcaacagcagcgagaacatcatggacatcaacgaggagcccggcaccaccgagggcgaggagatcaccgagagcagcagcaccgaggagatggaggtgagaagcgtggtggccgacaccgaccagaaggccctgggcagcgaggtgcaggacgccagcaaggtgaccacccagatcgacaaggagaagaaggagatccccgtgagcatcaagaaggagcccgaggtgaccgtggtgagccagcccaccgagccccagcccgtgctgatccccagcatcaacatcaacagcgacagcggcgagaacaaggaggagatcggcagcctgagcaagaccgagaccatcctgccccccgagagcgagaaccccaaggagaacgacaacgacagcggcaccggcagcaccgccgacaccagcagcatcgacctgaacctgagcatcagcagcttcctgagcaagaccaaggacagcggcagcatcagcctgcaggagaccagaagacagaagaagaccctgaagaagaccagaaagttcatcgtggacggcgtggaggtgagcgtgaccaccagcaagatcgtgaccgacagcgacagcaagaccgaggagctgagattcctgagaagacaggagctgagagagctgagattcctgcagaaggaggagcagagagcccagcagcagctgaacagcaagctgcagcagcagagagagcagatcttcagaagattcgagcaggagatgatgagcaagaagagacagtacgaccaggagatcgagaacctggagaagcagcagaagcagaccatcgagagactggagcaggagcacaccaacagactgagagacgaggccaagagaatcaagggcgagcaggagaaggagctgagcaagttccagaacatgctgaagaacagaaagaaggaggtgatcaacgaggtggagaaggcccccaaggagctgagaaaggagctgatgaagagaagaaaggaggagctggcccagagccagcacgcccaggagcaggagttcgtgcagaagcagcagcaggagctggacggcagcctgaagaagatcatccagcagcagaaggccgagctggccaacatcgagagagagtgcctgaacaacaagcagcagctgatgagagccagagaggccgccatctgggagctggaggagagacacctgcaggagaagcaccagctgctgaagcagcagctgaaggaccagtacttcatgcagagacaccagctgctgaagagacacgagaaggagaccgagcagatgcagagatacaaccagagactgatcgaggagctgaagaacagacagacccaggagagagccagactgcccaagatccagagaagcgaggccaagaccagaatggccatgttcaagaagagcctgagaatcaacagcaccgccacccccgaccaggacagagacaagatcaagcagttcgccgcccaggaggagaagagacagaagaacgagagaatggcccagcaccagaagcacgagaaccagatgagagacctgcagctgcagtgcgaggccaacgtgagagagctgcaccagctgcagaacgagaagtgccacctgctggtggagcacgagacccagaagctgaaggagctggacgaggagcacagccaggagctgaaggagtggagagagaagctgagacccagaaagaagaccctggaggaggagttcgccagaaagctgcaggagcaggaggtgttcttcaagatgaccggcgagagcgagtgcctgaaccccagcacccagagcagaatcagcaagttctaccccatccccagcctgcacagcaccggcagctag

SEQ ID NO: 13046 - DNA, 3444 bp, synthetic construct
  misc_feature 1..3444: note = Description of Artificial Sequence: Synthetic coding sequence
  source 1..3444: mol_type = other DNA
atggacgagccccccttcagcgaggccgccctggagcaggccctgggcgagccctgcgacctggacgccgccctgctgaccgacatcgaggacatgctgcagctgatcaacaaccaggacagcgacttccccggcctgttcgaccccccctacgccggcagcggcgccggcggcaccgaccccgccagccccgacaccagcagccccggcagcctgagccccccccccgccaccctgagcagcagcctggaggccttcctgagcggcccccaggccgcccccagccccctgagccccccccagcccgcccccacccccctgaagatgtaccccagcatgcccgccttcagccccggccccggcatcaaggaggagagcgtgcccctgagcatcctgcagacccccaccccccagcccctgcccggcgccctgctgccccagagcttccccgcccccgcccccccccagttcagcagcacccccgtgctgggctaccccagcccccccggcggcttcagcaccggcagcccccccggcaacacccagcagcccctgcccggcctgcccctggccagcccccccggcgtgccccccgtgagcctgcacacccaggtgcagagcgtggtgccccagcagctgctgaccgtgaccgccgcccccaccgccgcccccgtgaccaccaccgtgaccagccagatccagcaggtgcccgtgctgctgcagccccacttcatcaaggccgacagcctgctgctgaccgccatgaagaccgacggcgccaccgtgaaggccgccggcctgagccccctggtgagcggcaccaccgtgcagaccggccccctgcccaccctggtgagcggcggcaccatcctggccaccgtgcccctggtggtggacgccgagaagctgcccatcaacagactggccgccggcagcaaggcccccgccagcgcccagagcagaggcgagaagagaaccgcccacaacgccatcgagaagagatacagaagcagcatcaacgacaagatcatcgagctgaaggacctggtggtgggcaccgaggccaagctgaacaagagcgccgtgctgagaaaggccatcgactacatcagattcctgcagcacagcaaccagaagctgaagcaggagaacctgagcctgagaaccgccgtgcacaagagcaagagcctgaaggacctggtgagcgcctgcggcagcggcggcaacaccgacgtgctgatggagggcgtgaagaccgaggtggaggacaccctgacccccccccccagcgacgccggcagccccttccagagcagccccctgagcctgggcagcagaggcagcggcagcggcggcagcggcagcgacagcgagcccgacagccccgtgttcgaggacagcaaggccaagcccgagcagagacccagcctgcacagcagaggcatgctggacagaagcagactggccctgtgcaccctggtgttcctgtgcctgagctgcaaccccctggccagcctgctgggcgccagaggcctgcccagccccagcgacaccaccagcgtgtaccacagccccggcagaaacgtgctgggcaccgagagcagagacggccccggctgggcccagtggctgctgccccccgtggtgtggctgctgaacggcctgctggtgctggtgagcctggtgctgctgttcgtgtacggcgagcccgtgaccagaccccacagcggccccgccgtgtacttctggagacacagaaagcaggccgacctggacctggccagaggcgacttcgcccaggccgcccagcagctgtggctggccctgagagccctgggcagacccctgcccaccagccacctggacctggcctgcagcctgctgtggaacctgatcagacacctgctgcagagactgtgggtgggcagatggctggccggcagagccggcggcctgcagcaggactgcgccctgagagtggacgccagcgccagcgccagagacgccgccctggtgtaccacaagctgcaccagctgcacaccatgggcaagcacaccggcggccacctgaccgccaccaacctggccctgagcgccctgaacctggccgagtgcgccggcgacgccgtgagcgtggccaccctggccgagatctacgtggccgccgccctgagagtgaagaccagcctgcccagagccctgcacttcctgaccagattcttcctgagcagcgccagacaggcctgcctggcccagagcggcagcgtgccccccgccatgcagtggctgtgccaccccgtgggccacagattcttcgtggacggcgactggagcgtgctgagcaccccctgggagagcctgtacagcctggccggcaaccccgtggaccccctggcccaggtgacccagctgttcagagagcacctgctggagagagccctgaactgcgtgacccagcccaaccccagccccggcagcgccgacggcgacaaggagttcagcgacgccctgggctacctgcagctgctgaacagctgcagcgacgccgccggcgcccccgcctacagcttcagcatcagcagcagcatggccaccaccaccggcgtggaccccgtggccaagtggtgggccagcctgaccgccgtggtgatccactggctgagaagagacgaggaggccgccgagagactgtgccccctggtggagcacctgcccagagtgctgcaggagagcgagagacccctgcccagagccgccctgcacagcttcaaggccgccagagccctgctgggctgcgccaaggccgagagcggccccgccagcctgaccatctgcgagaaggccagcggctacctgcaggacagcctggccaccacccccgccagcagcagcatcgacaaggccgtgcagctgttcctgtgcgacctgctgctggtggtgagaaccagcctgtggagacagcagcagccccccgcccccgcccccgccgcccagggcaccagcagcagaccccaggccagcgccctggagctgagaggcttccagagagacctgagcagcctgagaagactggcccagagcttcagacccgccatgagaagagtgttcctgcacgaggccaccgccagactgatggccggcgccagccccaccagaacccaccagctgctggacagaagcctgagaagaagagccggccccggcggcaagggcggcgccgtggccgagctggagcccagacccaccagaagagagcacgccgaggccctgctgctggccagctgctacctgccccccggcttcctgagcgcccccggccagagagtgggcatgctggccgaggccgccagaaccctggagaagctgggcgacagaagactgctgcacgactgccagcagatgctgatgagactgggcggcggcaccaccgtgaccagcagctag

SEQ ID NO: 13047 - DNA, 3216 bp, synthetic construct
  misc_feature 1..3216: note = Description of Artificial Sequence: Synthetic coding sequence
  source 1..3216: mol_type = other DNA
atggacgagccccccttcagcgaggccgccctggagcaggccctgggcgagccctgcgacctggacgccgccctgctgaccgacatcgaggacatgctgcagctgatcaacaaccaggacagcgacttccccggcctgttcgaccccccctacgccggcagcggcgccggcggcaccgaccccgccagccccgacaccagcagccccggcagcctgagccccccccccgccaccctgagcagcagcctggaggccttcctgagcggcccccaggccgcccccagccccctgagccccccccagcccgcccccacccccctgaagatgtaccccagcatgcccgccttcagccccggccccggcatcaaggaggagagcgtgcccctgagcatcctgcagacccccaccccccagcccctgcccggcgccctgctgccccagagcttccccgcccccgcccccccccagttcagcagcacccccgtgctgggctaccccagcccccccggcggcttcagcaccggcagcccccccggcaacacccagcagcccctgcccggcctgcccctggccagcccccccggcgtgccccccgtgagcctgcacacccaggtgcagagcgtggtgccccagcagctgctgaccgtgaccgccgcccccaccgccgcccccgtgaccaccaccgtgaccagccagatccagcaggtgcccgtgctgctgcagccccacttcatcaaggccgacagcctgctgctgaccgccatgaagaccgacggcgccaccgtgaaggccgccggcctgagccccctggtgagcggcaccaccgtgcagaccggccccctgcccaccctggtgagcggcggcaccatcctggccaccgtgcccctggtggtggacgccgagaagctgcccatcaacagactggccgccggcagcaaggcccccgccagcgcccagagcagaggcgagaagagaaccgcccacaacgccatcgagaagagatacagaagcagcatcaacgacaagatcatcgagctgaaggacctggtggtgggcaccgaggccaagctgaacaagagcgccgtgctgagaaaggccatcgactacatcagattcctgcagcacagcaaccagaagctgaagcaggagaacctgagcctgagaaccgccgtgcacaagagcaagagcctgaaggacctggtgagcgcctgcggcagcggcggcaacaccgacgtgctgatggagggcgtgaagaccgaggtggaggacaccctgacccccccccccagcgacgccggcagccccttccagagcagccccctgagcctgggcagcagaggcagcggcagcggcggcagcggcagcgacagcgagcccgacagccccgtgttcgaggacagcaaggccaagcccgagcagagacccagcctgcacagcagaggcatgctggacagaagcagactggccctgtgcaccctggtgttcctgtgcctgagctgcaaccccctggccagcctgctgggcgccagaggcctgcccagccccagcgacaccaccagcgtgtaccacagccccggcagaaacgtgctgggcaccgagagcagagacggccccggctgggcccagtggctgctgccccccgtggtgtggctgctgaacggcctgctggtgctggtgagcctggtgctgctgttcgtgtacggcgagcccgtgaccagaccccacagcggccccgccgtgtacttctggagacacagaaagcaggccgacctggacctggccagaggcgacttcgcccaggccgcccagcagctgtggctggccctgagagccctgggcagacccctgcccaccagccacctggacctggcctgcagcctgctgtggaacctgatcagacacctgctgcagagactgtgggtgggcagatggctggccggcagagccggcggcctgcagcaggactgcgccctgagagtggacgccagcgccagcgccagagacgccgccctggtgtaccacaagctgcaccagctgcacaccatgggcaagcacaccggcggccacctgaccgccaccaacctggccctgagcgccctgaacctggccgagtgcgccggcgacgccgtgagcgtggccaccctggccgagatctacgtggccgccgccctgagagtgaagaccagcctgcccagagccctgcacttcctgaccagattcttcctgagcagcgccagacaggcctgcctggcccagagcggcagcgtgccccccgccatgcagtggctgtgccaccccgtgggccacagattcttcgtggacggcgactggagcgtgctgagcaccccctgggagagcctgtacagcctggccggcaaccccgtggaccccctggcccaggtgacccagctgttcagagagcacctgctggagagagccctgaactgcgtgacccagcccaaccccagccccggcagcgccgacggcgacaaggagttcagcgacgccctgggctacctgcagctgctgaacagctgcagcgacgccgccggcgcccccgcctacagcttcagcatcagcagcagcatggccaccaccaccggcgtggaccccgtggccaagtggtgggccagcctgaccgccgtggtgatccactggctgagaagagacgaggaggccgccgagagactgtgccccctggtggagcacctgcccagagtgctgcaggagagcgagagacccctgcccagagccgccctgcacagcttcaaggccgccagagccctgctgggctgcgccaaggccgagagcggccccgccagcctgaccatctgcgagaaggccagcggctacctgcaggacagcctggccaccacccccgccagcagcagcatcgacaaggccgtgcagctgttcctgtgcgacctgctgctggtggtgagaaccagcctgtggagacagcagcagccccccgcccccgcccccgccgcccagggcaccagcagcagaccccaggccagcgccctggagctgagaggcttccagagagacctgagcagcctgagaagactggcccagagcttcagacccgccatgagaagactgatggacgtgctgaccagcgagagcgcctgggccctgccccagcacctgggcaagggcttccccagccccagcggccacaaggtgcccggctggcacggcagaatggactag

SEQ ID NO: 13048 - DNA, 3534 bp, synthetic construct
  misc_feature 1..3534: note = Description of Artificial Sequence: Synthetic coding sequence
  source 1..3534: mol_type = other DNA
atggacgagccccccttcagcgaggccgccctggagcaggccctgggcgagccctgcgacctggacgccgccctgctgaccgacatcgagggcgaggtgggcgccggcagaggcagagccaacggcctggacgcccccagagccggcgccgacagaggcgccatggactgcaccttcgaggacatgctgcagctgatcaacaaccaggacagcgacttccccggcctgttcgaccccccctacgccggcagcggcgccggcggcaccgaccccgccagccccgacaccagcagccccggcagcctgagccccccccccgccaccctgagcagcagcctggaggccttcctgagcggcccccaggccgcccccagccccctgagccccccccagcccgcccccacccccctgaagatgtaccccagcatgcccgccttcagccccggccccggcatcaaggaggagagcgtgcccctgagcatcctgcagacccccaccccccagcccctgcccggcgccctgctgccccagagcttccccgcccccgcccccccccagttcagcagcacccccgtgctgggctaccccagcccccccggcggcttcagcaccggcagcccccccggcaacacccagcagcccctgcccggcctgcccctggccagcccccccggcgtgccccccgtgagcctgcacacccaggtgcagagcgtggtgccccagcagctgctgaccgtgaccgccgcccccaccgccgcccccgtgaccaccaccgtgaccagccagatccagcaggtgcccgtgctgctgcagccccacttcatcaaggccgacagcctgctgctgaccgccatgaagaccgacggcgccaccgtgaaggccgccggcctgagccccctggtgagcggcaccaccgtgcagaccggccccctgcccaccctggtgagcggcggcaccatcctggccaccgtgcccctggtggtggacgccgagaagctgcccatcaacagactggccgccggcagcaaggcccccgccagcgcccagagcagaggcgagaagagaaccgcccacaacgccatcgagaagagatacagaagcagcatcaacgacaagatcatcgagctgaaggacctggtggtgggcaccgaggccaagctgaacaagagcgccgtgctgagaaaggccatcgactacatcagattcctgcagcacagcaaccagaagctgaagcaggagaacctgagcctgagaaccgccgtgcacaagagcaagagcctgaaggacctggtgagcgcctgcggcagcggcggcaacaccgacgtgctgatggagggcgtgaagaccgaggtggaggacaccctgacccccccccccagcgacgccggcagccccttccagagcagccccctgagcctgggcagcagaggcagcggcagcggcggcagcggcagcgacagcgagcccgacagccccgtgttcgaggacagcaaggccaagcccgagcagagacccagcctgcacagcagaggcatgctggacagaagcagactggccctgtgcaccctggtgttcctgtgcctgagctgcaaccccctggccagcctgctgggcgccagaggcctgcccagccccagcgacaccaccagcgtgtaccacagccccggcagaaacgtgctgggcaccgagagcagagacggccccggctgggcccagtggctgctgccccccgtggtgtggctgctgaacggcctgctggtgctggtgagcctggtgctgctgttcgtgtacggcgagcccgtgaccagaccccacagcggccccgccgtgtacttctggagacacagaaagcaggccgacctggacctggccagaggcgacttcgcccaggccgcccagcagctgtggctggccctgagagccctgggcagacccctgcccaccagccacctggacctggcctgcagcctgctgtggaacctgatcagacacctgctgcagagactgtgggtgggcagatggctggccggcagagccggcggcctgcagcaggactgcgccctgagagtggacgccagcgccagcgccagagacgccgccctggtgtaccacaagctgcaccagctgcacaccatgggcaagcacaccggcggccacctgaccgccaccaacctggccctgagcgccctgaacctggccgagtgcgccggcgacgccgtgagcgtggccaccctggccgagatctacgtggccgccgccctgagagtgaagaccagcctgcccagagccctgcacttcctgaccagattcttcctgagcagcgccagacaggcctgcctggcccagagcggcagcgtgccccccgccatgcagtggctgtgccaccccgtgggccacagattcttcgtggacggcgactggagcgtgctgagcaccccctgggagagcctgtacagcctggccggcaaccccgtggaccccctggcccaggtgacccagctgttcagagagcacctgctggagagagccctgaactgcgtgacccagcccaaccccagccccggcagcgccgacggcgacaaggagttcagcgacgccctgggctacctgcagctgctgaacagctgcagcgacgccgccggcgcccccgcctacagcttcagcatcagcagcagcatggccaccaccaccggcgtggaccccgtggccaagtggtgggccagcctgaccgccgtggtgatccactggctgagaagagacgaggaggccgccgagagactgtgccccctggtggagcacctgcccagagtgctgcaggagagcgagagacccctgcccagagccgccctgcacagcttcaaggccgccagagccctgctgggctgcgccaaggccgagagcggccccgccagcctgaccatctgcgagaaggccagcggctacctgcaggacagcctggccaccacccccgccagcagcagcatcgacaaggccgtgcagctgttcctgtgcgacctgctgctggtggtgagaaccagcctgtggagacagcagcagccccccgcccccgcccccgccgcccagggcaccagcagcagaccccaggccagcgccctggagctgagaggcttccagagagacctgagcagcctgagaagactggcccagagcttcagacccgccatgagaagagtgttcctgcacgaggccaccgccagactgatggccggcgccagccccaccagaacccaccagctgctggacagaagcctgagaagaagagccggccccggcggcaagggcggcgccgtggccgagctggagcccagacccaccagaagagagcacgccgaggccctgctgctggccagctgctacctgccccccggcttcctgagcgcccccggccagagagtgggcatgctggccgaggccgccagaaccctggagaagctgggcgacagaagactgctgcacgactgccagcagatgctgatgagactgggcggcggcaccaccgtgaccagcagctag

SEQ ID NO: 13049 - DNA, 3468 bp, synthetic construct
  misc_feature 1..3468: note = Description of Artificial Sequence: Synthetic coding sequence
  source 1..3468: mol_type = other DNA
tgaaagatcagaagagccctgaccggcgaggtgggcgccggcagaggcagagccaacggcctggacgcccccagagccggcgccgacagaggcgccatggactgcaccttcgaggacatgctgcagctgatcaacaaccaggacagcgacttccccggcctgttcgaccccccctacgccggcagcggcgccggcggcaccgaccccgccagccccgacaccagcagccccggcagcctgagccccccccccgccaccctgagcagcagcctggaggccttcctgagcggcccccaggccgcccccagccccctgagccccccccagcccgcccccacccccctgaagatgtaccccagcatgcccgccttcagccccggccccggcatcaaggaggagagcgtgcccctgagcatcctgcagacccccaccccccagcccctgcccggcgccctgctgccccagagcttccccgcccccgcccccccccagttcagcagcacccccgtgctgggctaccccagcccccccggcggcttcagcaccggcagcccccccggcaacacccagcagcccctgcccggcctgcccctggccagcccccccggcgtgccccccgtgagcctgcacacccaggtgcagagcgtggtgccccagcagctgctgaccgtgaccgccgcccccaccgccgcccccgtgaccaccaccgtgaccagccagatccagcaggtgcccgtgctgctgcagccccacttcatcaaggccgacagcctgctgctgaccgccatgaagaccgacggcgccaccgtgaaggccgccggcctgagccccctggtgagcggcaccaccgtgcagaccggccccctgcccaccctggtgagcggcggcaccatcctggccaccgtgcccctggtggtggacgccgagaagctgcccatcaacagactggccgccggcagcaaggcccccgccagcgcccagagcagaggcgagaagagaaccgcccacaacgccatcgagaagagatacagaagcagcatcaacgacaagatcatcgagctgaaggacctggtggtgggcaccgaggccaagctgaacaagagcgccgtgctgagaaaggccatcgactacatcagattcctgcagcacagcaaccagaagctgaagcaggagaacctgagcctgagaaccgccgtgcacaagagcaagagcctgaaggacctggtgagcgcctgcggcagcggcggcaacaccgacgtgctgatggagggcgtgaagaccgaggtggaggacaccctgacccccccccccagcgacgccggcagccccttccagagcagccccctgagcctgggcagcagaggcagcggcagcggcggcagcggcagcgacagcgagcccgacagccccgtgttcgaggacagcaaggccaagcccgagcagagacccagcctgcacagcagaggcatgctggacagaagcagactggccctgtgcaccctggtgttcctgtgcctgagctgcaaccccctggccagcctgctgggcgccagaggcctgcccagccccagcgacaccaccagcgtgtaccacagccccggcagaaacgtgctgggcaccgagagcagagacggccccggctgggcccagtggctgctgccccccgtggtgtggctgctgaacggcctgctggtgctggtgagcctggtgctgctgttcgtgtacggcgagcccgtgaccagaccccacagcggccccgccgtgtacttctggagacacagaaagcaggccgacctggacctggccagaggcgacttcgcccaggccgcccagcagctgtggctggccctgagagccctgggcagacccctgcccaccagccacctggacctggcctgcagcctgctgtggaacctgatcagacacctgctgcagagactgtgggtgggcagatggctggccggcagagccggcggcctgcagcaggactgcgccctgagagtggacgccagcgccagcgccagagacgccgccctggtgtaccacaagctgcaccagctgcacaccatgggcaagcacaccggcggccacctgaccgccaccaacctggccctgagcgccctgaacctggccgagtgcgccggcgacgccgtgagcgtggccaccctggccgagatctacgtggccgccgccctgagagtgaagaccagcctgcccagagccctgcacttcctgaccagattcttcctgagcagcgccagacaggcctgcctggcccagagcggcagcgtgccccccgccatgcagtggctgtgccaccccgtgggccacagattcttcgtggacggcgactggagcgtgctgagcaccccctgggagagcctgtacagcctggccggcaaccccgtggaccccctggcccaggtgacccagctgttcagagagcacctgctggagagagccctgaactgcgtgacccagcccaaccccagccccggcagcgccgacggcgacaaggagttcagcgacgccctgggctacctgcagctgctgaacagctgcagcgacgccgccggcgcccccgcctacagcttcagcatcagcagcagcatggccaccaccaccggcgtggaccccgtggccaagtggtgggccagcctgaccgccgtggtgatccactggctgagaagagacgaggaggccgccgagagactgtgccccctggtggagcacctgcccagagtgctgcaggagagcgagagacccctgcccagagccgccctgcacagcttcaaggccgccagagccctgctgggctgcgccaaggccgagagcggccccgccagcctgaccatctgcgagaaggccagcggctacctgcaggacagcctggccaccacccccgccagcagcagcatcgacaaggccgtgcagctgttcctgtgcgacctgctgctggtggtgagaaccagcctgtggagacagcagcagccccccgcccccgcccccgccgcccagggcaccagcagcagaccccaggccagcgccctggagctgagaggcttccagagagacctgagcagcctgagaagactggcccagagcttcagacccgccatgagaagagtgttcctgcacgaggccaccgccagactgatggccggcgccagccccaccagaacccaccagctgctggacagaagcctgagaagaagagccggccccggcggcaagggcggcgccgtggccgagctggagcccagacccaccagaagagagcacgccgaggccctgctgctggccagctgctacctgccccccggcttcctgagcgcccccggccagagagtgggcatgctggccgaggccgccagaaccctggagaagctgggcgacagaagactgctgcacgactgccagcagatgctgatgagactgggcggcggcaccaccgtgaccagcagctag

SEQ ID NO: 13050 - DNA, 2301 bp, synthetic construct
  misc_feature 1..2301: note = Description of Artificial Sequence: Synthetic coding sequence
  source 1..2301: mol_type = other DNA
atgctggcccacctgagcagagccgccccctgccccctggccgccggcgccgtggccgccgtggccgtggccgtgaccagaagcctgaccgcccagagcctgagaaccgccagactgggccccgccaccgtgccccccagccccctgcccgccatcagcagcgagccccacgacagagccggcaagaccctgaccgaccccaccagccacttcatcgacagaatcaccgaggcctggagccacgtgggcagccacagcaaggccaagcccgagcagagacccagcctgcacagcagaggcatgctggacagaagcagactggccctgtgcaccctggtgttcctgtgcctgagctgcaaccccctggccagcctgctgggcgccagaggcctgcccagccccagcgacaccaccagcgtgtaccacagccccggcagaaacgtgctgggcaccgagagcagagacggccccggctgggcccagtggctgctgccccccgtggtgtggctgctgaacggcctgctggtgctggtgagcctggtgctgctgttcgtgtacggcgagcccgtgaccagaccccacagcggccccgccgtgtacttctggagacacagaaagcaggccgacctggacctggccagaggcgacttcgcccaggccgcccagcagctgtggctggccctgagagccctgggcagacccctgcccaccagccacctggacctggcctgcagcctgctgtggaacctgatcagacacctgctgcagagactgtgggtgggcagatggctggccggcagagccggcggcctgcagcaggactgcgccctgagagtggacgccagcgccagcgccagagacgccgccctggtgtaccacaagctgcaccagctgcacaccatgggcaagcacaccggcggccacctgaccgccaccaacctggccctgagcgccctgaacctggccgagtgcgccggcgacgccgtgagcgtggccaccctggccgagatctacgtggccgccgccctgagagtgaagaccagcctgcccagagccctgcacttcctgaccagattcttcctgagcagcgccagacaggcctgcctggcccagagcggcagcgtgccccccgccatgcagtggctgtgccaccccgtgggccacagattcttcgtggacggcgactggagcgtgctgagcaccccctgggagagcctgtacagcctggccggcaaccccgtggaccccctggcccaggtgacccagctgttcagagagcacctgctggagagagccctgaactgcgtgacccagcccaaccccagccccggcagcgccgacggcgacaaggagttcagcgacgccctgggctacctgcagctgctgaacagctgcagcgacgccgccggcgcccccgcctacagcttcagcatcagcagcagcatggccaccaccaccggcgtggaccccgtggccaagtggtgggccagcctgaccgccgtggtgatccactggctgagaagagacgaggaggccgccgagagactgtgccccctggtggagcacctgcccagagtgctgcaggagagcgagagacccctgcccagagccgccctgcacagcttcaaggccgccagagccctgctgggctgcgccaaggccgagagcggccccgccagcctgaccatctgcgagaaggccagcggctacctgcaggacagcctggccaccacccccgccagcagcagcatcgacaaggccgtgcagctgttcctgtgcgacctgctgctggtggtgagaaccagcctgtggagacagcagcagccccccgcccccgcccccgccgcccagggcaccagcagcagaccccaggccagcgccctggagctgagaggcttccagagagacctgagcagcctgagaagactggcccagagcttcagacccgccatgagaagagtgttcctgcacgaggccaccgccagactgatggccggcgccagccccaccagaacccaccagctgctggacagaagcctgagaagaagagccggccccggcggcaagggcggcgccgtggccgagctggagcccagacccaccagaagagagcacgccgaggccctgctgctggccagctgctacctgccccccggcttcctgagcgcccccggccagagagtgggcatgctggccgaggccgccagaaccctggagaagctgggcgacagaagactgctgcacgactgccagcagatgctgatgagactgggcggcggcaccaccgtgaccagcagctag

SEQ ID NO: 13051 - DNA, 2682 bp, synthetic construct
  misc_feature 1..2682: note = Description of Artificial Sequence: Synthetic coding sequence
  source 1..2682: mol_type = other DNA
atgaagaccgacggcgccaccgtgaaggccgccggcctgagccccctggtgagcggcaccaccgtgcagaccggccccctgcccaccctggtgagcggcggcaccatcctggccaccgtgcccctggtggtggacgccgagaagctgcccatcaacagactggccgccggcagcaaggcccccgccagcgcccagagcagaggcgagaagagaaccgcccacaacgccatcgagaagagatacagaagcagcatcaacgacaagatcatcgagctgaaggacctggtggtgggcaccgaggccaagctgaacaagagcgccgtgctgagaaaggccatcgactacatcagattcctgcagcacagcaaccagaagctgaagcaggagaacctgagcctgagaaccgccgtgcacaagagcaagagcctgaaggacctggtgagcgcctgcggcagcggcggcaacaccgacgtgctgatggagggcgtgaagaccgaggtggaggacaccctgacccccccccccagcgacgccggcagccccttccagagcagccccctgagcctgggcagcagaggcagcggcagcggcggcagcggcagcgacagcgagcccgacagccccgtgttcgaggacagcaaggccaagcccgagcagagacccagcctgcacagcagaggcatgctggacagaagcagactggccctgtgcaccctggtgttcctgtgcctgagctgcaaccccctggccagcctgctgggcgccagaggcctgcccagccccagcgacaccaccagcgtgtaccacagccccggcagaaacgtgctgggcaccgagagcagagacggccccggctgggcccagtggctgctgccccccgtggtgtggctgctgaacggcctgctggtgctggtgagcctggtgctgctgttcgtgtacggcgagcccgtgaccagaccccacagcggccccgccgtgtacttctggagacacagaaagcaggccgacctggacctggccagaggcgacttcgcccaggccgcccagcagctgtggctggccctgagagccctgggcagacccctgcccaccagccacctggacctggcctgcagcctgctgtggaacctgatcagacacctgctgcagagactgtgggtgggcagatggctggccggcagagccggcggcctgcagcaggactgcgccctgagagtggacgccagcgccagcgccagagacgccgccctggtgtaccacaagctgcaccagctgcacaccatgggcaagcacaccggcggccacctgaccgccaccaacctggccctgagcgccctgaacctggccgagtgcgccggcgacgccgtgagcgtggccaccctggccgagatctacgtggccgccgccctgagagtgaagaccagcctgcccagagccctgcacttcctgaccagattcttcctgagcagcgccagacaggcctgcctggcccagagcggcagcgtgccccccgccatgcagtggctgtgccaccccgtgggccacagattcttcgtggacggcgactggagcgtgctgagcaccccctgggagagcctgtacagcctggccggcaaccccgtggaccccctggcccaggtgacccagctgttcagagagcacctgctggagagagccctgaactgcgtgacccagcccaaccccagccccggcagcgccgacggcgacaaggagttcagcgacgccctgggctacctgcagctgctgaacagctgcagcgacgccgccggcgcccccgcctacagcttcagcatcagcagcagcatggccaccaccaccggcgtggaccccgtggccaagtggtgggccagcctgaccgccgtggtgatccactggctgagaagagacgaggaggccgccgagagactgtgccccctggtggagcacctgcccagagtgctgcaggagagcgagagacccctgcccagagccgccctgcacagcttcaaggccgccagagccctgctgggctgcgccaaggccgagagcggccccgccagcctgaccatctgcgagaaggccagcggctacctgcaggacagcctggccaccacccccgccagcagcagcatcgacaaggccgtgcagctgttcctgtgcgacctgctgctggtggtgagaaccagcctgtggagacagcagcagccccccgcccccgcccccgccgcccagggcaccagcagcagaccccaggccagcgccctggagctgagaggcttccagagagacctgagcagcctgagaagactggcccagagcttcagacccgccatgagaagagtgttcctgcacgaggccaccgccagactgatggccggcgccagccccaccagaacccaccagctgctggacagaagcctgagaagaagagccggccccggcggcaagggcggcgccgtggccgagctggagcccagacccaccagaagagagcacgccgaggccctgctgctggccagctgctacctgccccccggcttcctgagcgcccccggccagagagtgggcatgctggccgaggccgccagaaccctggagaagctgggcgacagaagactgctgcacgactgccagcagatgctgatgagactgggcggcggcaccaccgtgaccagcagctag

SEQ ID NO: 13052 - DNA, 2955 bp, synthetic construct
  misc_feature 1..2955: note = Description of Artificial Sequence: Synthetic coding sequence
  source 1..2955: mol_type = other DNA
atggactgcaccttcgaggacatgctgcagctgatcaacaaccaggacagcgacttccccggcctgttcgaccccccctacgccggcagcggcgccggcggcaccgaccccgccagccccgacaccagcagccccggcagcctgagccccccccccgccaccctgagcagcagcctggaggccttcctgagcggcccccaggccgcccccagccccctgagccccccccagcccgcccccacccccctgaagatgtaccccagcatgcccgccttcagccccggccccggcatcaaggaggagagcgtgcccctgagcatcctgcagacccccaccccccagcccctgcccgtgcccaccctggtgagcggcggcaccatcctggccaccgtgcccctggtggtggacgccgagaagctgcccatcaacagactggccgccggcagcaaggcccccgccagcgcccagagcagaggcgagaagagaaccgcccacaacgccatcgagaagagatacagaagcagcatcaacgacaagatcatcgagctgaaggacctggtggtgggcaccgaggccaagctgaacaagagcgccgtgctgagaaaggccatcgactacatcagattcctgcagcacagcaaccagaagctgaagcaggagaacctgagcctgagaaccgccgtgcacaagagcaagagcctgaaggacctggtgagcgcctgcggcagcggcggcaacaccgacgtgctgatggagggcgtgaagaccgaggtggaggacaccctgacccccccccccagcgacgccggcagccccttccagagcagccccctgagcctgggcagcagaggcagcggcagcggcggcagcggcagcgacagcgagcccgacagccccgtgttcgaggacagcaaggccaagcccgagcagagacccagcctgcacagcagaggcatgctggacagaagcagactggccctgtgcaccctggtgttcctgtgcctgagctgcaaccccctggccagcctgctgggcgccagaggcctgcccagccccagcgacaccaccagcgtgtaccacagccccggcagaaacgtgctgggcaccgagagcagagacggccccggctgggcccagtggctgctgccccccgtggtgtggctgctgaacggcctgctggtgctggtgagcctggtgctgctgttcgtgtacggcgagcccgtgaccagaccccacagcggccccgccgtgtacttctggagacacagaaagcaggccgacctggacctggccagaggcgacttcgcccaggccgcccagcagctgtggctggccctgagagccctgggcagacccctgcccaccagccacctggacctggcctgcagcctgctgtggaacctgatcagacacctgctgcagagactgtgggtgggcagatggctggccggcagagccggcggcctgcagcaggactgcgccctgagagtggacgccagcgccagcgccagagacgccgccctggtgtaccacaagctgcaccagctgcacaccatgggcaagcacaccggcggccacctgaccgccaccaacctggccctgagcgccctgaacctggccgagtgcgccggcgacgccgtgagcgtggccaccctggccgagatctacgtggccgccgccctgagagtgaagaccagcctgcccagagccctgcacttcctgaccagattcttcctgagcagcgccagacaggcctgcctggcccagagcggcagcgtgccccccgccatgcagtggctgtgccaccccgtgggccacagattcttcgtggacggcgactggagcgtgctgagcaccccctgggagagcctgtacagcctggccggcaaccccgtggaccccctggcccaggtgacccagctgttcagagagcacctgctggagagagccctgaactgcgtgacccagcccaaccccagccccggcagcgccgacggcgacaaggagttcagcgacgccctgggctacctgcagctgctgaacagctgcagcgacgccgccggcgcccccgcctacagcttcagcatcagcagcagcatggccaccaccaccggcgtggaccccgtggccaagtggtgggccagcctgaccgccgtggtgatccactggctgagaagagacgaggaggccgccgagagactgtgccccctggtggagcacctgcccagagtgctgcaggagagcgagagacccctgcccagagccgccctgcacagcttcaaggccgccagagccctgctgggctgcgccaaggccgagagcggccccgccagcctgaccatctgcgagaaggccagcggctacctgcaggacagcctggccaccacccccgccagcagcagcatcgacaaggccgtgcagctgttcctgtgcgacctgctgctggtggtgagaaccagcctgtggagacagcagcagccccccgcccccgcccccgccgcccagggcaccagcagcagaccccaggccagcgccctggagctgagaggcttccagagagacctgagcagcctgagaagactggcccagagcttcagacccgccatgagaagagtgttcctgcacgaggccaccgccagactgatggccggcgccagccccaccagaacccaccagctgctggacagaagcctgagaagaagagccggccccggcggcaagggcggcgccgtggccgagctggagcccagacccaccagaagagagcacgccgaggccctgctgctggccagctgctacctgccccccggcttcctgagcgcccccggccagagagtgggcatgctggccgaggccgccagaaccctggagaagctgggcgacagaagactgctgcacgactgccagcagatgctgatgagactgggcggcggcaccaccgtgaccagcagctag

SEQ ID NO: 13053 - DNA, 3222 bp, synthetic construct
  misc_feature 1..3222: note = Description of Artificial Sequence: Synthetic coding sequence
  source 1..3222: mol_type = other DNA
atggactgcaccttcgaggacatgctgcagctgatcaacaaccaggacagcgacttccccggcctgttcgaccccccccagcccgcccccacccccctgaagatgtaccccagcatgcccgccttcagccccggccccggcatcaaggaggagagcgtgcccctgagcatcctgcagacccccaccccccagcccctgcccggcgccctgctgccccagagcttccccgcccccgcccccccccagttcagcagcacccccgtgctgggctaccccagcccccccggcggcttcagcaccggcagcccccccggcaacacccagcagcccctgcccggcctgcccctggccagcccccccggcgtgccccccgtgagcctgcacacccaggtgcagagcgtggtgccccagcagctgctgaccgtgaccgccgcccccaccgccgcccccgtgaccaccaccgtgaccagccagatccagcaggtgcccgtgctgctgcagccccacttcatcaaggccgacagcctgctgctgaccgccatgaagaccgacggcgccaccgtgaaggccgccggcctgagccccctggtgagcggcaccaccgtgcagaccggccccctgcccaccctggtgagcggcggcaccatcctggccaccgtgcccctggtggtggacgccgagaagctgcccatcaacagactggccgccggcagcaaggcccccgccagcgcccagagcagaggcgagaagagaaccgcccacaacgccatcgagaagagatacagaagcagcatcaacgacaagatcatcgagctgaaggacctggtggtgggcaccgaggccaagctgaacaagagcgccgtgctgagaaaggccatcgactacatcagattcctgcagcacagcaaccagaagctgaagcaggagaacctgagcctgagaaccgccgtgcacaagagcaagagcctgaaggacctggtgagcgcctgcggcagcggcggcaacaccgacgtgctgatggagggcgtgaagaccgaggtggaggacaccctgacccccccccccagcgacgccggcagccccttccagagcagccccctgagcctgggcagcagaggcagcggcagcggcggcagcggcagcgacagcgagcccgacagccccgtgttcgaggacagcaaggccaagcccgagcagagacccagcctgcacagcagaggcatgctggacagaagcagactggccctgtgcaccctggtgttcctgtgcctgagctgcaaccccctggccagcctgctgggcgccagaggcctgcccagccccagcgacaccaccagcgtgtaccacagccccggcagaaacgtgctgggcaccgagagcagagacggccccggctgggcccagtggctgctgccccccgtggtgtggctgctgaacggcctgctggtgctggtgagcctggtgctgctgttcgtgtacggcgagcccgtgaccagaccccacagcggccccgccgtgtacttctggagacacagaaagcaggccgacctggacctggccagaggcgacttcgcccaggccgcccagcagctgtggctggccctgagagccctgggcagacccctgcccaccagccacctggacctggcctgcagcctgctgtggaacctgatcagacacctgctgcagagactgtgggtgggcagatggctggccggcagagccggcggcctgcagcaggactgcgccctgagagtggacgccagcgccagcgccagagacgccgccctggtgtaccacaagctgcaccagctgcacaccatgggcaagcacaccggcggccacctgaccgccaccaacctggccctgagcgccctgaacctggccgagtgcgccggcgacgccgtgagcgtggccaccctggccgagatctacgtggccgccgccctgagagtgaagaccagcctgcccagagccctgcacttcctgaccagattcttcctgagcagcgccagacaggcctgcctggcccagagcggcagcgtgccccccgccatgcagtggctgtgccaccccgtgggccacagattcttcgtggacggcgactggagcgtgctgagcaccccctgggagagcctgtacagcctggccggcaaccccgtggaccccctggcccaggtgacccagctgttcagagagcacctgctggagagagccctgaactgcgtgacccagcccaaccccagccccggcagcgccgacggcgacaaggagttcagcgacgccctgggctacctgcagctgctgaacagctgcagcgacgccgccggcgcccccgcctacagcttcagcatcagcagcagcatggccaccaccaccggcgtggaccccgtggccaagtggtgggccagcctgaccgccgtggtgatccactggctgagaagagacgaggaggccgccgagagactgtgccccctggtggagcacctgcccagagtgctgcaggagagcgagagacccctgcccagagccgccctgcacagcttcaaggccgccagagccctgctgggctgcgccaaggccgagagcggccccgccagcctgaccatctgcgagaaggccagcggctacctgcaggacagcctggccaccacccccgccagcagcagcatcgacaaggccgtgcagctgttcctgtgcgacctgctgctggtggtgagaaccagcctgtggagacagcagcagccccccgcccccgcccccgccgcccagggcaccagcagcagaccccaggccagcgccctggagctgagaggcttccagagagacctgagcagcctgagaagactggcccagagcttcagacccgccatgagaagagtgttcctgcacgaggccaccgccagactgatggccggcgccagccccaccagaacccaccagctgctggacagaagcctgagaagaagagccggccccggcggcaagggcggcgccgtggccgagctggagcccagacccaccagaagagagcacgccgaggccctgctgctggccagctgctacctgccccccggcttcctgagcgcccccggccagagagtgggcatgctggccgaggccgccagaaccctggagaagctgggcgacagaagactgctgcacgactgccagcagatgctgatgagactgggcggcggcaccaccgtgaccagcagctag

SEQ ID NO: 13054 - DNA, 1413 bp, synthetic construct
  misc_feature 1..1413: note = Description of Artificial Sequence: Synthetic coding sequence
  source 1..1413: mol_type = other DNA
atggacgagccccccttcagcgaggccgccctggagcaggccctgggcgagccctgcgacctggacgccgccctgctgaccgacatcgaggacatgctgcagctgatcaacaaccaggacagcgacttccccggcctgttcgaccccccctacgccggcagcggcgccggcggcaccgaccccgccagccccgacaccagcagccccggcagcctgagccccccccccgccaccctgagcagcagcctggaggccttcctgagcggcccccaggccgcccccagccccctgagccccccccagcccgcccccacccccctgaagatgtaccccagcatgcccgccttcagccccggccccggcatcaaggaggagagcgtgcccctgagcatcctgcagacccccaccccccagcccctgcccggcgccctgctgccccagagcttccccgcccccgcccccccccagttcagcagcacccccgtgctgggctaccccagcccccccggcggcttcagcaccggcagcccccccggcaacacccagcagcccctgcccggcctgcccctggccagcccccccggcgtgccccccgtgagcctgcacacccaggtgcagagcgtggtgccccagcagctgctgaccgtgaccgccgcccccaccgccgcccccgtgaccaccaccgtgaccagccagatccagcaggtgcccgtgctgctgcagccccacttcatcaaggccgacagcctgctgctgaccgccatgaagaccgacggcgccaccgtgaaggccgccggcctgagccccctggtgagcggcaccaccgtgcagaccggccccctgcccaccctggtgagcggcggcaccatcctggccaccgtgcccctggtggtggacgccgagaagctgcccatcaacagactggccgccggcagcaaggcccccgccagcgcccagagcagaggcgagaagagaaccgcccacaacgccatcgagaagagatacagaagcagcatcaacgacaagatcatcgagctgaaggacctggtggtgggcaccgaggccaagctgaacaagagcgccgtgctgagaaaggccatcgactacatcagattcctgcagcacagcaaccagaagctgaagcaggagaacctgagcctgagaaccgccgtgcacaagagcaagagcctgaaggacctggtgagcgcctgcggcagcggcggcaacaccgacgtgctgatggagggcgtgaagaccgaggtggaggacaccctgacccccccccccagcgacgccggcagccccttccagagcagccccctgagcctgggcagcagaggcagcggcagcggcggcagcggcagcgacagcgagcccgacagccccgtgttcgaggacagcaagaccgagtag

SEQ ID NO: 13055 - DNA, 645 bp, synthetic construct
  misc_feature 1..645: note = Description of Artificial Sequence: Synthetic coding sequence
  source 1..645: mol_type = other DNA
ctgatgcccgcctgcctgcccggcaagcacaccggcggccacctgaccgccaccaacctggccctgagcgccctgaacctggccgagtgcgccggcgacgccgtgagcgtggccaccctggccgagatctacgtggccgccgccctgagagtgaagaccagcctgcccagagccctgcacttcctgaccagattcttcctgagcagcgccagacaggcctgcctggcccagagcggcagcgtgccccccgccatgcagtggctgtgccaccccgtgggccacagattcttcgtggacggcgactggagcgtgctgagcaccccctgggagagcctgtacagcctggccggcaaccccgtggaccccctggcccaggtgacccagctgttcagagagcacctgctggagagagccctgaactgcgtgacccagcccaaccccagccccggcagcgccgacggcgacaaggagttcagcgacgccctgggctacctgcagctgctgaacagctgcagcgacgccgccggcgcccccgcctacagcttcagcatcagcagcagcatggccaccaccaccggcgacccctgccccggccagctgtgcacccccagcagactgcccggcccctgctgggccgtgccctag

SEQ ID NO: 13056 - DNA, 747 bp, synthetic construct
  misc_feature 1..747: note = Description of Artificial Sequence: Synthetic coding sequence
  source 1..747: mol_type = other DNA
atggagagagccagcctgatccagaaggccaagctggccgagcaggccgagagatacgaggacatggccgccttcatgaagggcgccgtggagaagggcgaggagctgagctgcgaggagagaaacctgctgagcgtggcctacaagaacgtggtgggcggccagagagccgcctggagagtgctgagcagcatcgagcagaagagcaacgaggagggcagcgaggagaagggccccgaggtgagagagtacagagagaaggtggagaccgagctgcagggcgtgtgcgacaccgtgctgggcctgctggacagccacctgatcaaggaggccggcgacgccgagagcagagtgttctacctgaagatgaagggcgactactacagatacctggccgaggtggccaccggcgacgacaagaagagaatcatcgacagcgccagaagcgcctaccaggaggccatggacatcagcaagaaggagatgccccccaccaaccccatcagactgggcctggccctgaacttcagcgtgttccactacgagatcgccaacagccccgaggaggccatcagcctggccaagaccaccttcgacgaggccatggccgacctgcacaccctgagcgaggacagctacaaggacagcaccctgatcatgcagctgctgagagacaacctgaccctgtggaccgccgacaacgccggcgaggagggcggcgaggccccccaggagccccagagctag

SEQ ID NO: 13057 - DNA, 651 bp, synthetic construct
  misc_feature 1..651: note = Description of Artificial Sequence: Synthetic coding sequence
  source 1..651: mol_type = other DNA
atggagagagccagcctgatccagaaggccaagctggccgagcaggccgagagatacgaggacatggccgccttcatgaagggcgccgtggagaagggcgaggagctgagctgcgaggagagaaacctgctgagcgtggcctacaagaacgtggtgggcggccagagagccgcctggagagtgctgagcagcatcgagcagaagagcaacgaggagggcagcgaggagaagggccccgaggtgagagagtacagagtgttctacctgaagatgaagggcgactactacagatacctggccgaggtggccaccggcgacgacaagaagagaatcatcgacagcgccagaagcgcctaccaggaggccatggacatcagcaagaaggagatgccccccaccaaccccatcagactgggcctggccctgaacttcagcgtgttccactacgagatcgccaacagccccgaggaggccatcagcctggccaagaccaccttcgacgaggccatggccgacctgcacaccctgagcgaggacagctacaaggacagcaccctgatcatgcagctgctgagagacaacctgaccctgtggaccgccgacaacgccggcgaggagggcggcgaggccccccaggagccccagagctag

SEQ ID NO: 13058 - DNA, 3702 bp, synthetic construct
  misc_feature 1..3702: note = Description of Artificial Sequence: Synthetic coding sequence
  source 1..3702: mol_type = other DNA
atgggcttcctgaagctgatcgagatcgagaacttcaagagctacaagggcagacagatcatcggccccttccagagattcaccgccatcatcggccccaacggcagcggcaagagcaacctgatggacgccatcagcttcgtgctgggcgagaagaccagcaacctgagagtgaagaccctgagagacctgatccacggcgcccccgtgggcaagcccgccgccaacagagccttcgtgagcatggtgtacagcgaggagggcgccgaggacagaaccttcgccagagtgatcgtgggcggcagcagcgagtacaagatcaacaacaaggtggtgcagctgcacgagtacagcgaggagctggagaagctgggcatcctgatcaaggccagaaacttcctggtgttccagggcgccgtggagagcatcgccatgaagaaccccaaggagagaaccgccctgttcgaggagatcagcagaagcggcgagctggcccaggagtacgacaagagaaagaaggagatggtgaaggccgaggaggacacccagttcaactaccacagaaagaagaacatcgccgccgagagaaaggaggccaagcaggagaaggaggaggccgacagataccagagactgaaggacgaggtggtgagagcccaggtgcagctgcagctgttcaagctgtaccacaacgaggtggagatcgagaagctgaacaaggagctggccagcaagaacaaggagatcgagaaggacaagaagagaatggacaaggtggaggacgagctgaaggagaagaagaaggagctgggcaagatgatgagagagcagcagcagatcgagaaggagatcaaggagaaggacagcgagctgaaccagaagagaccccagtacatcaaggccaaggagaacaccagccacaagatcaagaagctggaggccgccaagaagagcctgcagaacgcccagaagcactacaagaagagaaagggcgacatggacgagctggagaaggagatgctgagcgtggagaaggccagacaggagttcgaggagagaatggaggaggagagccagagccagggcagagacctgaccctggaggagaaccaggtgaagaagtaccacagactgaaggaggaggccagcaagagagccgccaccctggcccaggagctggagaagttcaacagagaccagaaggccgaccaggacagactggacctggaggagagaaagaaggtggagaccgaggccaagatcaagcagaagctgagagagatcgaggagaaccagaagagaatcgagaagctggaggagtacatcaccaccagcaagcagagcctggaggagcagaagaagctggagggcgagctgaccgaggaggtggagatggccaagagaagaatcgacgagatcaacaaggagctgaaccaggtgatggagcagctgggcgacgccagaatcgacagacaggagagcagcagacagcagagaaaggccgagatcatggagagcatcaagagactgtaccccggcagcgtgtacggcagactgatcgacctgtgccagcccacccagaagaagtaccagatcgccgtgaccaaggtgctgggcaagaacatggacgccatcatcgtggacagcgagaagaccggcagagactgcatccagtacatcaaggagcagagaggcgagcccgagaccttcctgcccctggactacctggaggtgaagcccaccgacgagaagctgagagagctgaagggcgccaagctggtgatcgacgtgatcagatacgagcccccccacatcaagaaggccctgcagtacgcctgcggcaacgccctggtgtgcgacaacgtggaggacgccagaagaatcgccttcggcggccaccagagacacaagaccgtggccctggacggcaccctgttccagaagagcggcgtgatcagcggcggcgccagcgacctgaaggccaaggccagaagatgggacgagaaggccgtggacaagctgaaggagaagaaggagagactgaccgaggagctgaaggagcagatgaaggccaagagaaaggaggccgagctgagacaggtgcagagccaggcccacggcctgcagatgagactgaagtacagccagagcgacctggagcagaccaagaccagacacctggccctgaacctgcaggagaagagcaagctggagagcgagctggccaacttcggccccagaatcaacgacatcaagagaatcatccagagcagagagagagagatgaaggacctgaaggagaagatgaaccaggtggaggacgaggtgttcgaggagttctgcagagagatcggcgtgagaaacatcagagagttcgaggaggagaaggtgaagagacagaacgagatcgccaagaagagactggagttcgagaaccagaagaccagactgggcatccagctggacttcgagaagaaccagctgaaggaggaccaggacaaggtgcacatgtgggagcagaccgtgaagaaggacgagaacgagatcgagaagctgaagaaggaggagcagagacacatgaagatcatcgacgagaccatggcccagctgcaggacctgaagaaccagcacctggccaagaagagcgaggtgaacgacaagaaccacgagatggaggagatcagaaagaagctgggcggcgccaacaaggagatgacccacctgcagaaggaggtgaccgccatcgagaccaagctggagcagaagagaagcgacagacacaacctgctgcaggcctgcaagatgcaggacatcaagctgcccctgagcaagggcaccatggacgacatcagccaggaggagggcagcagccagggcgaggacagcgtgagcggcagccagagaatcagcagcatctacgccagagaggccctgatcgagatcgactacggcgacctgtgcgaggacctgaaggacgcccaggccgaggaggagatcaagcaggagatgaacaccctgcagcagaagctgaacgagcagcagagcgtgctgcagagaatcgccgcccccaacatgaaggccatggagaagctggagagcgtgagagacaagttccaggagaccagcgacgagttcgaggccgccagaaagagagccaagaaggccaagcaggccttcgagcagatcaagaaggagagattcgacagattcaacgcctgcttcgagagcgtggccaccaacatcgacgagatctacaaggccctgagcagaaacagcagcgcccaggccttcctgggccccgagaaccccgaggagccctacctggacggcatcaactacaactgcgtggcccccggcaagagattcagacccatggacaacctgagcggcggcgagaagaccgtggccgccctggccctgctgttcgccatccacagctacaagcccgcccccttcttcgtgctggacgagatcgacgccgccctggacaacaccaacatcggcaaggtggccaactacatcaaggagcagagcacctgcaacttccaggccatcgtgatcagcctgaaggaggagttctacaccaaggccgagagcctgatcggcgtgtaccccgagcagggcgactgcgtgatcagcaaggtgctgaccttcgacctgaccaagtaccccgacgccaaccccaaccccaacgagcagtag

SEQ ID NO: 13059 - DNA, 612 bp, synthetic construct
  misc_feature 1..612: note = Description of Artificial Sequence: Synthetic coding sequence
  source 1..612: mol_type = other DNA
atgggcttcctgaagctgatcgagatcgagaacttcaagagctacaagggcagacagatcatcggccccttccagagattcaccgccatcatcggccccaacggcagcggcaagagcaacctgatggacgccatcagcttcgtgctgggcgagaagaccagcaacctgagagtgaagaccctgagagacctgatccacggcgcccccgtgggcaagcccgccgccaacagagccttcgtgagcatggtgtacagcgaggagggcgccgaggacagaaccttcgccagagtgatcgtgggcggcagcagcgagtacaagatcaacaacaaggtggtgcagctgcacgagtacagcgaggagctggagaagctgggcatcctgatcaaggccagaaacttcctggtgttccagggctgctgcggcatctactgccacgagacccccaagagaggccagctgtacctgaagatcagcagaagcggcgagctggcccaggagtacgacaagagaaagaaggagatggtgaaggccgaggaggacacccagttcaactaccacagaaagaagaacatcgccgccgagagaaaggaggccaagcaggagaaggagtag

SEQ ID NO: 13060 - DNA, 1551 bp, synthetic construct
  misc_feature 1..1551: note = Description of Artificial Sequence: Synthetic coding sequence
  source 1..1551: mol_type = other DNA
atgggcttcctgaagctgatcgagatcgagaacttcaagagctacaagggcagacagatcatcggccccttccagagattcaccgccatcatcggccccaacggcagcggcaagagcaacctgatggacgccatcagcttcgtgctgggcgagaagaccagcaacctgagagtgaagaccctgagagacctgatccacggcgcccccgtgggcaagcccgccgccaacagagccttcgtgagcatggtgtacagcgaggagggcgccgaggacagaaccttcgccagagtgatcgtgggcggcagcagcgagtacaagatcaacaacaaggtggtgcagctgcacgagtacagcgaggagctggagaagctgggcatcctgatcaaggccagaaacttcctggtgttccaggtgaagaagtaccacagactgaaggaggaggccagcaagagagccgccaccctggcccaggagctggagaagttcaacagagaccagaaggccgaccaggacagactggacctggaggagagaaagaaggtggagaccgaggccaagatcaagcagaagctgagagagatcgaggagaaccagaagagaatcgagaagctggaggagtacatcaccaccagcaagcagagcctggaggagcagaagaagctggagggcgagctgaccgaggaggtggagatggccaagagaagaatcgacgagatcaacaaggagctgaaccaggtgatggagcagctgggcgacgccagaatcgacagacaggagagcagcagacagcagagaaaggccgagatcatggagagcatcaagagactgtaccccggcagcgtgtacggcagactgatcgacctgtgccagcccacccagaagaagtaccagatcgccgtgaccaaggtgctgggcaagaacatggacgccatcatcgtggacagcgagaagaccggcagagactgcatccagtacatcaaggagcagagaggcgagcccgagaccttcctgcccctggactacctggaggtgaagcccaccgacgagaagctgagagagctgaagggcgccaagctggtgatcgacgtgatcagatacgagcccccccacatcaagaaggccctgcagtacgcctgcggcaacgccctggtgtgcgacaacgtggaggacgccagaagaatcgccttcggcggccaccagagacacaagaccgtggccctggacggcaccctgttccagaagagcggcgtgatcagcggcggcgccagcgacctgaaggccaaggccagaagatgggacgagaaggccgtggacaagctgaaggagaagaaggagagactgaccgaggagctgaaggagcagatgaaggccaagagaaaggaggccgagctgagacaggtgcagagccaggcccacggcctgcagatgagactgaagtacagccagagcgacctggagcagaccaagaccagacacctggccctgaacctgcaggtgggccccggcctgcagccctgcagccccaaggccatccacaccttcctggcctag

SEQ ID NO: 13061 - DNA, 870 bp, synthetic construct
  misc_feature 1..870: note = Description of Artificial Sequence: Synthetic coding sequence
  source 1..870: mol_type = other DNA
tgatggtacacccccacccccttctacagcagcctggaggccgccctgctgaacttcagacccagcgcccccgtgttcagaatgctggaggtgagcatccccaccccccacagatacgtgagaggcaagagcaacctgatggacgccatcagcttcgtgctgggcgagaagaccagcaacctgagagtgaagaccctgagagacctgatccacggcgcccccgtgggcaagcccgccgccaacagagccttcgtgagcatggtgtacagcgaggagggcgccgaggacagaaccttcgccagagtgatcgtgggcggcagcagcgagtacaagatcaacaacaaggtggtgcagctgcacgagtacagcgaggagctggagaagctgggcatcctgatcaaggccagaaacttcctggtgttccagggcgccgtggagagcatcgccatgaagaaccccaaggagagaaccgccctgttcgaggagatcagcagaagcggcgagctggcccaggagtacgacaagagaaagaaggagatggtgaaggccgaggaggacacccagttcaactaccacagaaagaagaacatcgccgccgagagaaaggaggccaagcaggagaaggaggaggccgacagataccagagactgaaggacgaggtggtgagagcccaggtgcagctgcagctgttcaagctgtaccacaacgaggtggagatcgagaagctgaacaaggagctggccagcaagaacaaggagatcgagaaggacaagaagagaatggacaaggtggaggacgagctgaaggagaagaagaaggagctgggcaagatgatgagagagcagcagcagatcgagaaggagatctag

SEQ ID NO: 13062 - DNA, 1995 bp, synthetic construct
  misc_feature 1..1995: note = Description of Artificial Sequence: Synthetic coding sequence
  source 1..1995: mol_type = other DNA
atgagcggcgtgagaggcctgagcagactgctgagcgccagaagactggccctggccaaggcctggcccaccgtgctgcagaccggcaccagaggcttccacttcaccgtggacggcaacaagagagccagcgccaaggtgagcgacagcatcagcgcccagtaccccgtggtggaccacgagttcgacgccgtggtggtgggcgccggcggcgccggcctgagagccgccttcggcctgagcgaggccggcttcaacaccgcctgcgtgaccaagctgttccccaccagaagccacaccgtggccgcccagggcggcatcaacgccgccctgggcaacatggaggaggacaactggagatggcacttctacgacaccgtgaagggcagcgactggctgggcgaccaggacgccatccactacatgaccgagcaggcccccgccgccgtggtggagctggagaactacggcatgcccttcagcagaaccgaggacggcaagatctaccagagagccttcggcggccagagcctgaagttcggcaagggcggccaggcccacagatgctgctgcgtggccgacagaaccggccacagcctgctgcacaccctgtacggcagaagcctgagatacgacaccagctacttcgtggagtacttcgccctggacctgctgatggagaacggcgagtgcagaggcgtgatcgccctgtgcatcgaggacggcagcatccacagaatcagagccaagaacaccgtggtggccaccggcggctacggcagaacctacttcagctgcaccagcgcccacaccagcaccggcgacggcaccgccatgatcaccagagccggcctgccctgccaggacctggagttcgtgcagttccaccccaccggcatctacggcgccggctgcctgatcaccgagggctgcagaggcgagggcggcatcctgatcaacagccagggcgagagattcatggagagatacgcccccgtggccaaggacctggccagcagagacgtggtgagcagaagcatgaccctggagatcagagagggcagaggctgcggccccgagaaggaccacgtgtacctgcagctgcaccacctgccccccgagcagctggccaccagactgcccggcatcagcgagaccgccatgatcttcgccggcgtggacgtgaccaaggagcccatccccgtgctgcccaccgtgcactacaacatgggcggcatccccaccaactacaagggccaggtgctgagacacgtgaacggccaggaccagatcgtgcccggcctgtacgcctgcggcgaggccgcctgcgccagcgtgcacggcgccaacagactgggcgccaacagcctgctggacctggtggtgttcggcagagcctgcgccctgagcatcgaggagagctgcagacccggcgacaaggtgccccccatcaagcccaacgccggcgaggagagcgtgatgaacctggacaagctgagattcgccgacggcagcatcagaaccagcgagctgagactgagcatgcagaagagcatgcagaaccacgccgccgtgttcagagtgggcagcgtgctgcaggagggctgcggcaagatcagcaagctgtacggcgacctgaagcacctgaagaccttcgacagaggcatggtgtggaacaccgacctggtggagaccctggagctgcagaacctgatgctgtgcgccctgcagaccatctacggcgccgaggccagaaaggagagcagaggcgcccacgccagagaggactacaaggtgagaatcgacgagtacgactacagcaagcccatccagggccagcagaagaagcccttcgaggagcactggagaaagcacaccctgagctacgtggacgtgggcaccggcaaggtgaccctggagtacagacccgtgatcgacaagaccctgaacgaggccgactgcgccaccgtgccccccgccatcagaagctactag

SEQ ID NO: 13063 - DNA, 1560 bp, synthetic construct
  misc_feature 1..1560: note = Description of Artificial Sequence: Synthetic coding sequence
  source 1..1560: mol_type = other DNA
atgagcggcgtgagaggcctgagcagactgctgagcgccagaagactggccctggccaaggcctggcccaccgtgctgcagaccggcaccagaggcttccacttcaccgtggacggcaacaagagagccagcgccaaggtgagcgacagcatcagcgcccagtaccccgtggtggaccacgagttcgacgccgtggtggtgggcgccggcggcgccggcctgagagccgccttcggcctgagcgaggccggcttcaacaccgcctgcgtgaccaagctgttccccaccagaagccacaccgtggccgcccagggcggcatcaacgccgccctgggcaacatggaggaggacaactggagatggcacttctacgacaccagcaccggcgacggcaccgccatgatcaccagagccggcctgccctgccaggacctggagttcgtgcagttccaccccaccggcatctacggcgccggctgcctgatcaccgagggctgcagaggcgagggcggcatcctgatcaacagccagggcgagagattcatggagagatacgcccccgtggccaaggacctggccagcagagacgtggtgagcagaagcatgaccctggagatcagagagggcagaggctgcggccccgagaaggaccacgtgtacctgcagctgcaccacctgccccccgagcagctggccaccagactgcccggcatcagcgagaccgccatgatcttcgccggcgtggacgtgaccaaggagcccatccccgtgctgcccaccgtgcactacaacatgggcggcatccccaccaactacaagggccaggtgctgagacacgtgaacggccaggaccagatcgtgcccggcctgtacgcctgcggcgaggccgcctgcgccagcgtgcacggcgccaacagactgggcgccaacagcctgctggacctggtggtgttcggcagagcctgcgccctgagcatcgaggagagctgcagacccggcgacaaggtgccccccatcaagcccaacgccggcgaggagagcgtgatgaacctggacaagctgagattcgccgacggcagcatcagaaccagcgagctgagactgagcatgcagaagagcatgcagaaccacgccgccgtgttcagagtgggcagcgtgctgcaggagggctgcggcaagatcagcaagctgtacggcgacctgaagcacctgaagaccttcgacagaggcatggtgtggaacaccgacctggtggagaccctggagctgcagaacctgatgctgtgcgccctgcagaccatctacggcgccgaggccagaaaggagagcagaggcgcccacgccagagaggactacaaggtgagaatcgacgagtacgactacagcaagcccatccagggccagcagaagaagcccttcgaggagcactggagaaagcacaccctgagctacgtggacgtgggcaccggcaaggtgaccctggagtacagacccgtgatcgacaagaccctgaacgaggccgactgcgccaccgtgccccccgccatcagaagctactag

SEQ ID NO: 13064 - DNA, 6645 bp, synthetic construct
  misc_feature 1..6645: note = Description of Artificial Sequence: Synthetic coding sequence
  source 1..6645: mol_type = other DNA
atgaagagaaaggagagaatcgccagaagactggagggcatcgagaacgacacccagcccatcctgctgcagagctgcaccggcctggtgacccacagactgctggaggaggacacccccagatacatgagagccagcgaccccgccagcccccacatcggcagaagcaacgaggaggaggagaccagcgacagcagcctggagaagcagaccagaagcaagtactgcaccgagaccagcggcgtgcacggcgacagcccctacggcagcggcaccatggacacccacagcctggagagcaaggccgagagaatcgccagatacaaggccgagagaagaagacagctggccgagaagtacggcctgaccctggaccccgaggccgacagcgagtacctgagcagatacaccaagagcagaaaggagcccgacgccgtggagaagagaggcggcaagagcgacaagcaggaggagagcagcagagacgccagcagcctgtaccccggcaccgagaccatgggcctgagaacctgcgccggcgagagcaaggactacgccctgcacgtgggcgacggcagcagcgaccccgaggtgctgctgaacatcgagaaccagagaagaggccaggagctgagcgccaccagacaggcccacgacctgagccccgccgccgagagcagcagcaccttcagcttcagcggcagagacagcagcttcaccgaggtgcccagaagccccaagcacgcccacagcagcagcctgcagcaggccgccagcagaagccccagcttcggcgacccccagctgagccccgaggccagacccagcaccggcaagcccaagcacgagtggttcctgcagaaggacagcgagggcgacacccccagcctgatcaactggcccagcagagtgaaggtgagagagaagctggtgaaggaggagagcgccagaaacagccccgagctggccagcgagagcgtgacccagagaagacaccagcccgcccccgtgcactacgtgagcttccagagcgagcacagcgccttcgacagagtgcccagcaaggccgccggcagcaccagacagcccatcagaggctacgtgcagcccgccgacaccggccacaccgccaagctggtgacccccgagacccccgagaacgccagcgagtgcagctgggtggccagcgccacccagaacgtgcccaagccccccagcctgaccgtgctggagggcgacggcagagacagccccgtgctgcacgtgtgcgagagcaaggccgaggaggaggagggcgagggcgagggcgaggagaaggaggaggacgtgtgcttcaccgaggccctggagcagagcaagaagaccctgctggccctggagggcgacggcctggtgagaagccccgaggaccccagcagaaacgaggacttcggcaagcccgccgtgagcaccgtgaccctggagcaccagaaggagctggagaacgtggcccagcccccccaggccccccaccagcccaccgagagaaccggcagaagcgagatggtgctgtacatccagagcgagcccgtgagccaggacgccaagcccaccggccacaacagagaggccagcaagaagagaaaggtgagaaccagaagcctgagcgacttcaccggccccccccagctgcaggccctgaagtacaaggaccccgccagcagaagagagctggagctgcccagcagcaagaccgagggcccctacggcgagatcagcatgctggacaccaaggtgagcgtggcccagctgagaagcgccttcctggccagcgccaacgcctgcagaagacccgagctgaagagcagagtggagagaagcgccgagggccccggcctgcccaccggcgtggagagagagagaggcagcagaaagcccagaagatacttcagccccggcgagagcagaaagaccagcgagagattcagaacccagcccatcaccagcgccgagagaaaggagagcgacagatgcaccagccacagcgagacccccaccgtggacgacgaggagaaggtggacgagagagccaagctgagcgtggccgccaagagactgctgttcagagagatggagaagagcttcgacgagcagaacgtgcccaagagaagaagcagaaacaccgccgtggagcagagactgagaagactgcaggacagaagcctgacccagcccatcaccaccgaggaggtggtgatcgccgccaccgagcccatccccgccagctgcagcggcggcacccaccccgtgatggccagactgcccagccccaccgtggccagaagcgccgtgcagcccgccagactgcaggccagcgcccaccagaaggccctggccaaggaccagaccaacgagggcaaggagctggccgagcagggcgagcccgacagcagcaccctgagcctggccgagaagctggccctgttcaacaagctgagccagcccgtgagcaaggccatcagcaccagaaacagaatcgacaccagacagagaagaatgaacgccagataccagacccagcccgtgaccctgggcgaggtggagcaggtgcagagcggcaagctgatccccttcagccccgccgtgaacaccagcgtgagcaccgtggccagcaccgtggcccccatgtacgccggcgacctgagaaccaagccccccctggaccacaacgccagcgccaccgactacaagttcagcagcagcatcgagaacagcgacagccccgtgagaagcatcctgaagagccaggcctggcagcccctggtggagggcagcgagaacaagggcatgctgagagagtacggcgagaccgagagcaagagagccctgaccggcagagacagcggcatggagaagtacggcagcttcgaggaggccgaggccagctaccccatcctgaacagagccagagagggcgacagccacaaggagagcaagtacgccgtgcccagaagaggcagcctggagagagccaacccccccatcacccacctgggcgacgagcccaaggagttcagcatggccaagatgaacgcccagggcaacctggacctgagagacagactgcccttcgaggagaaggtggaggtggagaacgtgatgaagagaaagttcagcctgagagccgccgagttcggcgagcccaccagcgagcagaccggcaccgccgccggcaagaccatcgcccagaccaccgcccccgtgagctggaagccccaggacagcagcgagcagccccaggagaagctgtgcaagaacccctgcgccatgttcgccgccggcgagatcaagacccccaccggcgagggcctgctggacagccccagcaagaccatgagcatcaaggagagactggccctgctgaagaagagcggcgaggaggactggagaaacagactgagcagaagacaggagggcggcaaggcccccgccagcagcctgcacacccaggaggccggcagaagcctgatcaagaagagagtgaccgagagcagagagagccagatgaccatcgaggagagaaagcagctgatcaccgtgagagaggaggcctggaagaccagaggcagaggcgccgccaacgacagcacccagttcaccgtggccggcagaatggtgaagaagggcctggccagccccaccgccatcacccccgtggccagccccatctgcggcaagaccagaggcaccacccccgtgagcaagcccctggaggacatcgaggccagacccgacatgcagctggagagcgacctgaagctggacagactggagaccttcctgagaagactgaacaacaaggtgggcggcatgcacgagaccgtgctgaccgtgaccggcaagagcgtgaaggaggtgatgaagcccgacgacgacgagaccttcgccaagttctacagaagcgtggactacaacatgcccagaagccccgtggagatggacgaggacttcgacgtgatcttcgacccctacgcccccaagctgaccagcagcgtggccgagcacaagagagccgtgagacccaagagaagagtgcaggccagcaagaaccccctgaagatgctggccgccagagaggacctgctgcaggagtacaccgagcagagactgaacgtggccttcatggagagcaagagaatgaaggtggagaagatgagcagcaacagcaacttcagcgaggtgaccctggccggcctggccagcaaggagaacttcagcaacgtgagcctgagaagcgtgaacctgaccgagcagaacagcaacaacagcgccgtgccctacaagagactgatgctgctgcagatcaagggcagaagacacgtgcagaccagactggtggagcccagagccagcgccctgaacagcggcgactgcttcctgctgctgagcccccactgctgcttcctgtgggtgggcgagttcgccaacgtgatcgagaaggccaaggccagcgagctggccaccctgatccagaccaagagagagctgggctgcagagccacctacatccagaccatcgaggagggcatcaacacccacacccacgccgccaaggacttctggaagctgctgggcggccagaccagctaccagagcgccggcgaccccaaggaggacgagctgtacgaggccgccatcatcgagaccaactgcatctacagactgatggacgacaagctggtgcccgacgacgactactggggcaagatccccaagtgcagcctgctgcagcccaaggaggtgctggtgttcgacttcggcagcgaggtgtacgtgtggcacggcaaggaggtgaccctggcccagagaaagatcgccttccagctggccaagcacctgtggaacggcaccttcgactacgagaactgcgacatcaaccccctggaccccggcgagtgcaaccccctgatccccagaaagggccagggcagacccgactgggccatcttcggcagactgaccgagcacaacgagaccatcctgttcaaggagaagttcctggactggaccgagctgaagagaagcaacgagaagaaccccggcgagctggcccagcacaaggaggaccccagaaccgacgtgaaggcctacgacgtgaccagaatggtgagcatgccccagaccaccgccggcaccatcctggacggcgtgaacgtgggcagaggctacggcctggtggagggccacgacagaagacagttcgagatcaccagcgtgagcgtggacgtgtggcacatcctggagttcgactacagcagactgcccaagcagagcatcggccagttccacgagggcgacgcctacgtggtgaagtggaagttcatggtgagcaccgccgtgggcagcagacagaagggcgagcacagcgtgagagccgccggcaaggagaagtgcgtgtacttcttctggcagggcagacacagcaccgtgagcgagaagggcaccagcgccctgatgaccgtggagctggacgaggagagaggcgcccaggtgcaggtgctgcagggcaaggagcccccctgcttcctgcagtgcttccagggcggcatggtggtgcacagcggcagaagagaggaggaggaggagaacgtgcagagcgagtggagactgtactgcgtgagaggcgaggtgcccgtggagggcaacctgctggaggtggcctgccactgcagcagcctgagaagcagaaccagcatggtggtgctgaacgtgaacaaggccctgatctacctgtggcacggctgcaaggcccaggcccacaccaaggaggtgggcagaaccgccgccaacaagatcaaggagcagtgccccctggaggccggcctgcacagcagcagcaaggtgaccatccacgagtgcgacgagggcagcgagcccctgggcttctgggacgccctgggcagaagagacagaaaggcctacgactgcatgctgcaggaccccggcagcttcaacttcgcccccagactgttcatcctgagcagcagcagcggcgacttcgccgccaccgagttcgtgtaccccgccagagcccccagcgtggtgagcagcatgcccttcctgcaggaggacctgtacagcgccccccagcccgccctgttcctggtggacaaccaccacgaggtgtacctgtggcagggctggtggcccatcgagaacaagatcaccggcagcgccagaatcagatgggccagcgacagaaagagcgccatggagaccgtgctgcagtactgcaagggcaagaacctgaagaagcccgcccccaagagctacctgatccacgccggcctggagcccctgaccttcaccaacatgttccccagctgggagcacagagaggacatcgccgagatcaccgagatggacaccgaggtgagcaaccagatcaccctggtggaggacgtgctggccaagctgtgcaagaccatctaccccctggccgacctgctggccagacccctgcccgagggcgtggaccccctgaagctggagatctacctgaccgacgaggacttcgagttcgccctggacatgaccagagacgagtacaacgccctgcccgcctggaagcaggtgaacctgaagaaggccaagggcctgttctag

SEQ ID NO: 13065 - DNA, 6645 bp, synthetic construct; identical to SEQ ID NO: 13064
  misc_feature 1..6645: note = Description of Artificial Sequence: Synthetic coding sequence
  source 1..6645: mol_type = other DNA

SEQ ID NO: 13066 - DNA, 5367 bp, synthetic construct
  misc_feature 1..5367: note = Description of Artificial Sequence: Synthetic coding sequence
  source 1..5367: mol_type = other DNA
atgaagagaaaggagagaatcgccagaagactggagggcatcgagaacgacacccagcccatcctgctgcagagctgcaccggcctggtgacccacagactgctggaggaggacacccccagatacatgagagccagcgaccccgccagcccccacatcggcagaagcaacgaggaggaggagaccagcgacagcagcctggagaagcagaccagaagcaagtactgcaccgagaccagcggcgtgcacggcgacagcccctacggcagcggcaccatggacacccacagcctggagagcaaggccgagagaatcgccagatacaaggccgagagaagaagacagctggccgagaagtacggcctgaccctggaccccgaggccgacagcgagtacctgagcagatacaccaagagcagaaaggagcccgacgccgtggagaagagaggcggcaagagcgacaagcaggaggagagcagcagagacgccagcagcctgtaccccggcaccgagaccatgggcctgagaacctgcgccggcgagagcaaggactacgccctgcacgtgggcgacggcagcagcgaccccgaggtgctgctgaacatcgagaaccagagaagaggccaggagctgagcgccaccagacaggcccacgacctgagccccgccgccgagagcagcagcaccttcagcttcagcggcagagacagcagcttcaccgaggtgcccagaagccccaagcacgcccacagcagcagcctgcagcaggccgccagcagaagccccagcttcggcgacccccagctgagccccgaggccagacccagatgcaccagccacagcgagacccccaccgtggacgacgaggagaaggtggacgagagagccaagctgagcgtggccgccaagagactgctgttcagagagatggagaagagcttcgacgagcagaacgtgcccaagagaagaagcagaaacaccgccgtggagcagagactgagaagactgcaggacagaagcctgacccagcccatcaccaccgaggaggtggtgatcgccgccaccctgcaggccagcgcccaccagaaggccctggccaaggaccagaccaacgagggcaaggagctggccgagcagggcgagcccgacagcagcaccctgagcctggccgagaagctggccctgttcaacaagctgagccagcccgtgagcaaggccatcagcaccagaaacagaatcgacaccagacagagaagaatgaacgccagataccagacccagcccgtgaccctgggcgaggtggagcaggtgcagagcggcaagctgatccccttcagccccgccgtgaacaccagcgtgagcaccgtggccagcaccgtggcccccatgtacgccggcgacctgagaaccaagccccccctggaccacaacgccagcgccaccgactacaagttcagcagcagcatcgagaacagcgacagccccgtgagaagcatcctgaagagccaggcctggcagcccctggtggagggcagcgagaacaagggcatgctgagagagtacggcgagaccgagagcaagagagccctgaccggcagagacagcggcatggagaagtacggcagcttcgaggaggccgaggccagctaccccatcctgaacagagccagagagggcgacagccacaaggagagcaagtacgccgtgcccagaagaggcagcctggagagagccaacccccccatcacccacctgggcgacgagcccaaggagttcagcatggccaagatgaacgcccagggcaacctggacctgagagacagactgcccttcgaggagaaggtggaggtggagaacgtgatgaagagaaagttcagcctgagagccgccgagttcggcgagcccaccagcgagcagaccggcaccgccgccggcaagaccatcgcccagaccaccgcccccgtgagctggaagccccaggacagcagcgagcagccccaggagaagctgtgcaagaacccctgcgccatgttcgccgccggcgagatcaagacccccaccggcgagggcctgctggacagccccagcaagaccatgagcatcaaggagagactggccctgctgaagaagagcggcgaggaggactggagaaacagactgagcagaagacaggagggcggcaaggcccccgccagcagcctgcacacccaggaggccggcagaagcctgatcaagaagagagtgaccgagagcagagagagccagatgaccatcgaggagagaaagcagctgatcaccgtgagagaggaggcctggaagaccagaggcagaggcgccgccaacgacagcacccagttcaccgtggccggcagaatggtgaagaagggcctggccagccccaccgccatcacccccgtggccagccccatctgcggcaagaccagaggcaccacccccgtgagcaagcccctggaggacatcgaggccagacccgacatgcagctggagagcgacctgaagctggacagactggagaccttcctgagaagactgaacaacaaggtgggcggcatgcacgagaccgtgctgaccgtgaccggcaagagcgtgaaggaggtgatgaagcccgacgacgacgagaccttcgccaagttctacagaagcgtggactacaacatgcccagaagccccgtggagatggacgaggacttcgacgtgatcttcgacccctacgcccccaagctgaccagcagcgtggccgagcacaagagagccgtgagacccaagagaagagtgcaggccagcaagaaccccctgaagatgctggccgccagagaggacctgctgcaggagtacaccgagcagagactgaacgtggccttcatggagagcaagagaatgaaggtggagaagatgagcagcaacagcaacttcagcgaggtgaccctggccggcctggccagcaaggagaacttcagcaacgtgagcctgagaagcgtgaacctgaccgagcagaacagcaacaacagcgccgtgccctacaagagactgatgctgctgcagatcaagggcagaagacacgtgcagaccagactggtggagcccagagccagcgccctgaacagcggcgactgcttcctgctgctgagcccccactgctgcttcctgtgggtgggcgagttcgccaacgtgatcgagaaggccaaggccagcgagctggccaccctgatccagaccaagagagagctgggctgcagagccacctacatccagaccatcgaggagggcatcaacacccacacccacgccgccaaggacttctggaagctgctgggcggccagaccagctaccagagcgccggcgaccccaaggaggacgagctgtacgaggccgccatcatcgagaccaactgcatctacagactgatggacgacaagctggtgcccgacgacgactactggggcaagatccccaagtgcagcctgctgcagcccaaggaggtgctggtgttcgacttcggcagcgaggtgtacgtgtggcacggcaaggaggtgaccctggcccagagaaagatcgccttccagctggccaagcacctgtggaacggcaccttcgactacgagaactgcgacatcaaccccctggaccccggcgagtgcaaccccctgatccccagaaagggccagggcagacccgactgggccatcttcggcagactgaccgagcacaacgagaccatcctgttcaaggagaagttcctggactggaccgagctgaagagaagcaacgagaagaaccccggcgagctggcccagcacaaggaggaccccagaaccgacgtgaaggcctacgacgtgaccagaatggtgagcatgccccagaccaccgccggcaccatcctggacggcgtgaacgtgggcagaggctacggcctggtggagggccacgacagaagacagttcgagatcaccagcgtgagcgtggacgtgtggcacatcctggagttcgactacagcagactgcccaagcagagcatcggccagttccacgagggcgacgcctacgtggtgaagtggaagttcatggtgagcaccgccgtgggcagcagacagaagggcgagcacagcgtgagagccgccggcaaggagaagtgcgtgtacttcttctggcagggcagacacagcaccgtgagcgagaagggcaccagcgccctgatgaccgtggagctggacgaggagagaggcgcccaggtgcaggtgctgcagggcaaggagcccccctgcttcctgcagtgcttccagggcggcatggtggtgcacagcggcagaagagaggaggaggaggagaacgtgcagagcgagtggagactgtactgcgtgagaggcgaggtgcccgtggagggcaacctgctggaggtggcctgccactgcagcagcctgagaagcagaaccagcatggtggtgctgaacgtgaacaaggccctgatctacctgtggcacggctgcaaggcccaggcccacaccaaggaggtgggcagaaccgccgccaacaagatcaaggagcagtgccccctggaggccggcctgcacagcagcagcaaggtgaccatccacgagtgcgacgagggcagcgagcccctgggcttctgggacgccctgggcagaagagacagaaaggcctacgactgcatgctgcaggaccccggcagcttcaacttcgcccccagactgttcatcctgagcagcagcagcggcgacttcgccgccaccgagttcgtgtaccccgccagagcccccagcgtggtgagcagcatgcccttcctgcaggaggacctgtacagcgccccccagcccgccctgttcctggtggacaaccaccacgaggtgtacctgtggcagggctggtggcccatcgagaacaagatcaccggcagcgccagaatcagatgggccagcgacagaaagagcgccatggagaccgtgctgcagtactgcaagggcaagaacctgaagaagcccgcccccaagagctacctgatccacgccggcctggagcccctgaccttcaccaacatgttccccagctgggagcacagagaggacatcgccgagatcaccgagatggacaccgaggtgagcaaccagatcaccctggtggaggacgtgctggccaagctgtgcaagaccatctaccccctggccgacctgctggccagacccctgcccgagggcgtggaccccctgaagctggagatctacctgaccgacgaggacttcgagttcgccctggacatgaccagagacgagtacaacgccctgcccgcctggaagcaggtgaacctgaagaaggccaagggcctgttctag

SEQ ID NO: 13067 - DNA, 3387 bp, synthetic construct
  misc_feature 1..3387: note = Description of Artificial Sequence: Synthetic coding sequence
  source 1..3387: mol_type = other DNA
atgttcgccgccggcgagatcaagacccccaccggcgagggcctgctggacagccccagcaagaccatgagcatcaaggagagactggccctgctgaagaagagcggcgaggaggactggagaaacagactgagcagaagacaggagggcggcaaggcccccgccagcagcctgcacacccaggaggccggcagaagcctgatcaagaaggaggagggcggcgtggccgacgacagcgccatcagcaacctgctgtggagagtgaccgagagcagagagagccagatgaccatcgaggagagaaagcagctgatcaccgtgagagaggaggcctggaagaccagaggcagaggcgccgccaacgacagcacccagttcaccgtggccggcagaatggtgaagaagggcctggccagccccaccgccatcacccccgtggccagccccatctgcggcaagaccagaggcaccacccccgtgagcaagcccctggaggacatcgaggccagacccgacatgcagctggagagcgacctgaagctggacagactggagaccttcctgagaagactgaacaacaaggtgggcggcatgcacgagaccgtgctgaccgtgaccggcaagagcgtgaaggaggtgatgaagcccgacgacgacgagaccttcgccaagttctacagaagcgtggactacaacatgcccagaagccccgtggagatggacgaggacttcgacgtgatcttcgacccctacgcccccaagctgaccagcagcgtggccgagcacaagagagccgtgagacccaagagaagagtgcaggccagcaagaaccccctgaagatgctggccgccagagaggacctgctgcaggagtacaccgagcagagactgaacgtggccttcatggagagcaagagaatgaaggtggagaagatgagcagcaacagcaacttcagcgaggtgaccctggccggcctggccagcaaggagaacttcagcaacgtgagcctgagaagcgtgaacctgaccgagcagaacagcaacaacagcgccgtgccctacaagagactgatgctgctgcagatcaagggcagaagacacgtgcagaccagactggtggagcccagagccagcgccctgaacagcggcgactgcttcctgctgctgagcccccactgctgcttcctgtgggtgggcgagttcgccaacgtgatcgagaaggccaaggccagcgagctggccaccctgatccagaccaagagagagctgggctgcagagccacctacatccagaccatcgaggagggcatcaacacccacacccacgccgccaaggacttctggaagctgctgggcggccagaccagctaccagagcgccggcgaccccaaggaggacgagctgtacgaggccgccatcatcgagaccaactgcatctacagactgatggacgacaagctggtgcccgacgacgactactggggcaagatccccaagtgcagcctgctgcagcccaaggaggtgctggtgttcgacttcggcagcgaggtgtacgtgtggcacggcaaggaggtgaccctggcccagagaaagatcgccttccagctggccaagcacctgtggaacggcaccttcgactacgagaactgcgacatcaaccccctggaccccggcgagtgcaaccccctgatccccagaaagggccagggcagacccgactgggccatcttcggcagactgaccgagcacaacgagaccatcctgttcaaggagaagttcctggactggaccgagctgaagagaagcaacgagaagaaccccggcgagctggcccagcacaaggaggaccccagaaccgacgtgaaggcctacgacgtgaccagaatggtgagcatgccccagaccaccgccggcaccatcctggacggcgtgaacgtgggcagaggctacggcctggtggagggccacgacagaagacagttcgagatcaccagcgtgagcgtggacgtgtggcacatcctggagttcgactacagcagactgcccaagcagagcatcggccagttccacgagggcgacgcctacgtggtgaagtggaagttcatggtgagcaccgccgtgggcagcagacagaagggcgagcacagcgtgagagccgccggcaaggagaagtgcgtgtacttcttctggcagggcagacacagcaccgtgagcgagaagggcaccagcgccctgatgaccgtggagctggacgaggagagaggcgcccaggtgcaggtgctgcagggcaaggagcccccctgcttcctgcagtgcttccagggcggcatggtggtgcacagcggcagaagagaggaggaggaggagaacgtgcagagcgagtggagactgtactgcgtgagaggcgaggtgcccgtggagggcaacctgctggaggtggcctgccactgcagcagcctgagaagcagaaccagcatggtggtgctgaacgtgaacaaggccctgatctacctgtggcacggctgcaaggcccaggcccacaccaaggaggtgggcagaaccgccgccaacaagatcaaggagcagtgccccctggaggccggcctgcacagcagcagcaaggtgaccatccacgagtgcgacgagggcagcgagcccctgggcttctgggacgccctgggcagaagagacagaaaggcctacgactgcatgctgcaggaccccggcagcttcaacttcgcccccagactgttcatcctgagcagcagcagcggcgacttcgccgccaccgagttcgtgtaccccgccagagcccccagcgtggtgagcagcatgcccttcctgcaggaggacctgtacagcgccccccagcccgccctgttcctggtggacaaccaccacgaggtgtacctgtggcagggctggtggcccatcgagaacaagatcaccggcagcgccagaatcagatgggccagcgacagaaagagcgccatggagaccgtgctgcagtactgcaagggcaagaacctgaagaagcccgcccccaagagctacctgatccacgccggcctggagcccctgaccttcaccaacatgttccccagctgggagcacagagaggacatcgccgagatcaccgagatggacaccgaggtgagcaaccagatcaccctggtggaggacgtgctggccaagctgtgcaagaccatctaccccctggccgacctgctggccagacccctgcccgagggcgtggaccccctgaagctggagatctacctgaccgacgaggacttcgagttcgccctggacatgaccagagacgagtacaacgccctgcccgcctggaagcaggtgaacctgaagaaggccaagggcctgttctag

SEQ ID NO: 13068 - DNA, 2301 bp, synthetic construct
  misc_feature 1..2301: note = Description of Artificial Sequence: Synthetic coding sequence
  source 1..2301: mol_type = other DNA
atgaagagaaagttcagcctgagagccgccgagttcggcgagcccaccagcgagcagaccggcaccgccgccggcaagaccatcgcccagaccaccgcccccgtgagctggaagccccaggacagcagcgagcagccccaggagaagctgtgcaagaacccctgcgccatgttcgccgccggcgagatcaagacccccaccggcgagggcctgctggacagccccagcaagaccatgagcatcaaggagagactggccctgctgaagaagagcggcgaggaggactggagaaacagactgagcagaagacaggagggcggcaaggcccccgccagcagcctgcacacccaggaggccggcagaagcctgatcaagaagagagtgaccgagagcagagagagccagatgaccatcgaggagagaaagcagctgatcaccgtgagagaggaggcctggaagaccagaggcagaggcgccgccaacgacagcacccagttcaccgtggccggcagaatggtgaagaagggcctggccagccccaccgccatcacccccgtggccagccccatctgcggcaagaccagaggcaccacccccgtgagcaagcccctggaggacatcgaggccagacccgacatgcagctggagagcgacctgaagctggacagactggagaccttcctgagaagactgaacaacaaggtgggcggcatgcacgagaccgtgctgaccgtgaccggcaagagcgtgaaggaggtgatgaagcccgacgacgacgagaccttcgccaagttctacagaagcgtggactacaacatgcccagaagccccgtggagatggacgaggacttcgacgtgatcttcgacccctacgcccccaagctgaccagcagcgtggccgagcacaagagagccgtgagacccaagagaagagtgcaggccagcaagaaccccctgaagatgctggccgccagagaggacctgctgcaggagtacaccgagcagagactgaacgtggccttcatggagagcaagagaatgaaggtggagaagatgagcagcaacagcaacttcagcgaggtgaccctggccggcctggccagcaaggagaacttcagcaacgtgagcctgagaagcgtgaacctgaccgagcagaacagcaacaacagcgccgtgccctacaagagactgatgctgctgcagatcaagggcagaagacacgtgcagaccagactggtggagcccagagccagcgccctgaacagcggcgactgcttcctgctgctgagcccccactgctgcttcctgtgggtgggcgagttcgccaacgtgatcgagaaggccaaggccagcgagctggccaccctgatccagaccaagagagagctgggctgcagagccacctacatccagaccatcgaggagggcatcaacacccacacccacgccgccaaggacttctggaagctgctgggcggccagaccagctaccagagcgccggcgaccccaaggaggacgagctgtacgaggccgccatcatcgagaccaactgcatctacagactgatggacgacaagctggtgcccgacgacgactactggggcaagatccccaagtgcagcctgctgcagcccaaggaggtgctggtgttcgacttcggcagcgaggtgtacgtgtggcacggcaaggaggtgaccctggcccagagaaagatcgccttccagctggccaagcacctgtggaacggcaccttcgactacgagaactgcgacatcaaccccctggaccccggcgagtgcaaccccctgatccccagaaagggccagggcagacccgactgggccatcttcggcagactgaccgagcacaacgagaccatcctgttcaaggagaagttcctggactggaccgagctgaagagaagcaacgagaagaaccccggcgagctggcccagcacaaggaggaccccagaaccgacgtgaaggcctacgacgtgaccagaatggtgagcatgccccagaccaccgccggcaccatcctggacggcgtgaacgtgggcagaggctacggcctggtggagggccacgacagaagacagttcgagatcaccagcgtgagcgtggacgtgtggcacatcctggagttcgactacagcagactgcccaagcagagcatcggccagttccacgagggcgacgcctacgtggtgaagtggaagttcatggtgagcaccgccgtgctgagagcctggagaggcgccagaggcagagagttcgccggcagcggcctgagcctgtag

SEQ ID NO: 13069 - DNA, 1758 bp, synthetic construct
  misc_feature 1..1758: note = Description of Artificial Sequence: Synthetic coding sequence
  source 1..1758: mol_type = other DNA
atgaacagcagcgacgtgagcagcctgaagcaccccagcagcctggccagccccaccgccatcacccccgtggccagccccatctgcggcaagaccagaggcaccacccccgtgagcaagcccctggaggacatcgaggccagacccgacatgcagctggagagcgacctgaagctggacagactggagaccttcctgagaagactgaacaacaaggtgggcggcatgcacgagaccgtgctgaccgtgaccggcaagagcgtgaaggaggtgatgaagcccgacgacgacgagaccttcgccaagttctacagaagcgtggactacaacatgcccagaagccccgtggagatggacgaggacttcgacgtgatcttcgacccctacgcccccaagctgaccagcagcgtggccgagcacaagagagccgtgagacccaagagaagagtgcaggccagcaagaaccccctgaagatgctggccgccagagaggacctgctgcaggagtacaccgagcagagactgaacgtggccttcatggagagcaagagaatgaaggtggagaagatgagcagcaacagcaacttcagcgaggtgaccctggccggcctggccagcaaggagaacttcagcaacgtgagcctgagaagcgtgaacctgaccgagcagaacagcaacaacagcgccgtgccctacaagagactgatgctgctgcagatcaagggcagaagacacgtgcagaccagactggtggagcccagagccagcgccctgaacagcggcgactgcttcctgctgctgagcccccactgctgcttcctgtgggtgggcgagttcgccaacgtgatcgagaaggccaaggccagcgagctggccaccctgatccagaccaagagagagctgggctgcagagccacctacatccagaccatcgaggagggcatcaacacccacacccacgccgccaaggacttctggaagctgctgggcggccagaccagctaccagagcgccggcgaccccaaggaggacgagctgtacgaggccgccatcatcgagaccaactgcatctacagactgatggacgacaagctggtgcccgacgacgactactggggcaagatccccaagtgcagcctgctgcagcccaaggaggtgctggtgttcgacttcggcagcgaggtgtacgtgtggcacggcaaggaggtgaccctggcccagagaaagatcgccttccagctggccaagcacctgtggaacggcaccttcgactacgagaactgcgacatcaaccccctggaccccggcgagtgcaaccccctgatccccagaaagggccagggcagacccgactgggccatcttcggcagactgaccgagcacaacgagaccatcctgttcaaggagaagttcctggactggaccgagctgaagagaagcaacgagaagaaccccggcgagctggcccagcacaaggaggaccccagaaccgacgtgaaggcctacgacgtgaccagaatggtgagcatgccccagaccaccgccggcaccatcctggacggcgtgaacgtgggcagaggctacggcctggtggagggccacgacagaagacagttcgagatcaccagcgtgagcgtggacgtgtggcacatcctggagttcgactacagcagactgcccaagcagagcatcggccagttccacgagggcgacgcctacgtggtgaagtggaagttcatggtgagcaccgccggctag

SEQ ID NO: 13070 - DNA, 636 bp, synthetic construct
  misc_feature 1..636: note = Description of Artificial Sequence: Synthetic coding sequence
  source 1..636: mol_type = other DNA
atggtggcccacaaccaggtggccgccgacaacgccgtgagcaccgccgccgagcccagaagaagacccgagcccagcagcagcagcagcagcagccccgccgcccccgccagacccagaccctgccccgccgtgcccgcccccgcccccggcgacacccacttcagaaccttcagaagccacgccgactacagaagaatcaccagagccagcgccctgctggacgcctgcggcttctactggggccccctgagcgtgcacggcgcccacgagagactgagagccgagcccgtgggcaccttcctggtgagagacagcagacagagaaactgcttcttcgccctgagcgtgaagatggccagcggccccaccagcatcagagtgcacttccaggccggcagattccacctggacggcagcagagagagcttcgactgcctgttcgagctgctggagcactacgtggccgcccccagaagaatgctgggcgcccccctgagacagagaagagtgagacccctgcaggagctgtgcagacagagaatcgtggccaccgtgggcagagagaacctggccagaatccccctgaaccccgtgctgagagactacctgagcagcttccccttccagatctag

SEQ ID NO: 13071 - DNA, 678 bp, synthetic construct
  misc_feature 1..678: note = Description of Artificial Sequence: Synthetic coding sequence
  source 1..678: mol_type = other DNA
atggtgacccacagcaagttccccgccgccggcatgagcagacccctggacaccagcctgagactgaagaccttcagcagcaagagcgagtaccagctggtggtgaacgccgtgagaaagctgcaggagagcggcttctactggagcgccgtgaccggcggcgaggccaacctgctgctgagcgccgagcccgccggcaccttcctgatcagagacagcagcgaccagagacacttcttcaccctgagcgtgaagacccagagcggcaccaagaacctgagaatccagtgcgagggcggcagcttcagcctgcagagcgaccccagaagcacccagcccgtgcccagattcgactgcgtgctgaagctggtgcaccactacatgcccccccccggcgcccccagcttccccagcccccccaccgagcccagcagcgaggtgcccgagcagcccagcgcccagcccctgcccggcagcccccccagaagagcctactacatctacagcggcggcgagaagatccccctggtgctgagcagacccctgagcagcaacgtggccaccctgcagcacctgtgcagaaagaccgtgaacggccacctggacagctacgagaaggtgacccagctgcccggccccatcagagagttcctggaccagtacgacgcccccctgtag

SEQ ID NO: 13072 - DNA, 1302 bp, synthetic construct
  misc_feature 1..1302: note = Description of Artificial Sequence: Synthetic coding sequence
  source 1..1302: mol_type = other DNA
atggccgagctgagacccagcggcgcccccggccccaccgccccccccgcccccggccccaccgccccccccgccttcgccagcctgttcccccccggcctgcacgccatctacggcgagtgcagaagactgtaccccgaccagcccaaccccctgcaggtgaccgccatcgtgaagtactggctgggcggccccgaccccctggactacgtgagcatgtacagaaacgtgggcagccccagcgccaacatccccgagcactggcactacatcagcttcggcctgagcgacctgtacggcgacaacagagtgcacgagttcaccggcaccgacggccccagcggcttcggcttcgagctgaccttcagactgaagagagagaccggcgagagcgccccccccacctggcccgccgagctgatgcagggcctggccagatacgtgttccagagcgagaacaccttctgcagcggcgaccacgtgagctggcacagccccctggacaacagcgagagcagaatccagcacatgctgctgaccgaggacccccagatgcagcccgtgcagacccccttcggcgtggtgaccttcctgcagatcgtgggcgtgtgcaccgaggagctgcacagcgcccagcagtggaacggccagggcatcctggagctgctgagaaccgtgcccatcgccggcggcccctggctgatcaccgacatgagaagaggcgagaccatcttcgagatcgacccccacctgcaggagagagtggacaagggcatcgagaccgacggcagcaacctgagcggcgtgagcgccaagtgcgcctgggacgacctgagcagaccccccgaggacgacgaggacagcagaagcatctgcatcggcacccagcccagaagactgagcggcaaggacaccgagcagatcagagagaccctgagaagaggcctggagatcaacagcaagcccgtgctgccccccatcaacccccagagacagaacggcctggcccacgacagagcccccagcagaaaggacagcctggagagcgacagcagcaccgccatcatcccccacgagctgatcagaaccagacagctggagagcgtgcacctgaagttcaaccaggagagcggcgccctgatccccctgtgcctgagaggcagactgctgcacggcagacacttcacctacaagagcatcaccggcgacatggccatcaccttcgtgagcaccggcgtggagggcgccttcgccaccgaggagcacccctacgccgcccacggcccctggctgcagctgtag

SEQ ID NO: 13073 - DNA, 1455 bp, synthetic construct
  misc_feature 1..1455: note = Description of Artificial Sequence: Synthetic coding sequence
  source 1..1455: mol_type = other DNA
atggccgagctgagacccagcggcgcccccggccccaccgccccccccgcccccggccccaccgccccccccgccttcgccagcctgttcccccccggcctgcacgccatctacggcgagtgcagaagactgtaccccgaccagcccaaccccctgcaggtgaccgccatcgtgaagtactggctgggcggccccgaccccctggactacgtgagcatgtacagaaacgtgggcagccccagcgccaacatccccgagcactggcactacatcagcttcggcctgagcgacctgtacggcgacaacagagtgcacgagttcaccggcaccgacggccccagcggcttcggcttcgagctgaccttcagactgaagagagagaccggcgagagcgccccccccacctggcccgccgagctgatgcagggcctggccagatacgtgttccagagcgagaacaccttctgcagcggcgaccacgtgagctggcacagccccctggacaacagcgagagcagaatccagcacatgctgctgaccgaggacccccagatgcagcccgtgcagacccccttcggcgtggtgaccttcctgcagatcgtgggcgtgtgcaccgaggagctgcacagcgcccagcagtggaacggccagggcatcctggagctgctgagaaccgtgcccatcgccggcggcccctggctgatcaccgacatgagaagaggcgagaccatcttcgagatcgacccccacctgcaggagagagtggacaagggcatcgagaccgacggcagcaacctgagcggcgtgagcgccaagtgcgcctgggacgacctgagcagaccccccgaggacgacgaggacagcagaagcatctgcatcggcacccagcccagaagactgagcggcaaggacaccgagcagatcagagagaccctgagaagaggcctggagatcaacagcaagcccgtgctgccccccatcaacccccagagacagaacggcctggcccacgacagagcccccagcagaaaggacagcctggagagcgacagcagcaccgccatcatcccccacgagctgatcagaaccagacagctggagagcgtgcacctgaagttcaaccaggagagcggcgccctgatccccctgtgcctgagaggcagactgctgcacggcagacacttcacctacaagagcatcaccggcgacatggccatcaccttcgtgagcaccggcgtggagggcgccttcgccaccgaggagcacccctacgccgcccacggcccctggctgcagatcctgctgaccgaggagttcgtggagaagatgctggaggacctggaggacctgaccagccccgaggagttcaagctgcccaaggagtacagctggcccgagaagaagctgaaggtgagcatcctgcccgacgtggtgttcgacagccccctgcactag

SEQ ID NO: 13074 - DNA, 240 bp, synthetic construct
  misc_feature 1..240: note = Description of Artificial Sequence: Synthetic coding sequence
  source 1..240: mol_type = other DNA
atggccagaagcagactgaccgccaccagcgtgagccaggtgcaggagaacggcttcgtgaagaagctggagcccaagagcggctggatgaccttcctggaggtgaccggcaagatctgcgagatgctgttctgccccgaggccatcctgctgaccagaaaggacaccccctactgcgagaccggcctgatcttcctgaccctgaccaagaccatcgccaacacctacttctacttctag

SEQ ID NO: 13075 - DNA, 240 bp, synthetic construct; identical to SEQ ID NO: 13074
  misc_feature 1..240: note = Description of Artificial Sequence: Synthetic coding sequence
  source 1..240: mol_type = other DNA

SEQ ID NO: 13076 - DNA, 1245 bp, synthetic construct
  misc_feature 1..1245: note = Description of Artificial Sequence: Synthetic coding sequence
  source 1..1245: mol_type = other DNA
atgaacctgcagagatactggggcgagatccccatcagcagcagccagaccaacagaagcagcttcgacctgctgcccagagagttcagactggtggaggtgcacgacccccccctgcaccagcccagcgccaacaagcccaagccccccaccatgctggacatccccagcgagccctgcagcctgaccatccacaccatccagctgatccagcacaacagaagactgagaaacctgatcgccaccgcccaggcccagaaccagcagcagaccgagggcgtgaagaccgaggagagcgagcccctgcccagctgccccggcagcccccccctgcccgacgacctgctgcccctggactgcaagaaccccaacgcccccttccagatcagacacagcgaccccgagagcgacttctacagaggcaagggcgagcccgtgaccgagctgagctggcacagctgcagacagctgctgtaccaggccgtggccaccatcctggcccacgccggcttcgactgcgccaacgagagcgtgctggagaccctgaccgacgtggcccacgagtactgcctgaagttcaccaagctgctgagattcgccgtggacagagaggccagactgggccagacccccttccccgacgtgatggagcaggtgttccacgaggtgggcatcggcagcgtgctgagcctgcagaagttctggcagcacagaatcaaggactaccacagctacatgctgcagatcagcaagcagctgagcgaggagtacgagagaatcgtgaaccccgagaaggccaccgaggacgccaagcccgtgaagatcaaggaggagcccgtgagcgacatcaccttccccgtgagcgaggagctggaggccgacctggccagcggcgaccagagcctgcccatgggcgtgctgggcgcccagagcgagagattccccagcaacctggaggtggaggccagcccccaggccagcagcgccgaggtgaacgccagccccctgtggaacctggcccacgtgaagatggagccccaggagagcgaggagggcaacgtgagcggccacggcgtgctgggcagcgacgtgttcgaggagcccatgagcggcatgagcgaggccggcatcccccagagccccgacgacagcgacagcagctacggcagccacagcaccgacagcctgatgggcagcagccccgtgttcaaccagagatgcaagaagagaatgagaaagatctag

SEQ ID NO: 13077 - DNA, 840 bp, synthetic construct
  misc_feature 1..840: note = Description of Artificial Sequence: Synthetic coding sequence
  source 1..840: mol_type = other DNA
atgaacctgcagagcggcaagggcgagcccgtgaccgagctgagctggcacagctgcagacagctgctgtaccaggccgtggccaccatcctggcccacgccggcttcgactgcgccaacgagagcgtgctggagaccctgaccgacgtggcccacgagtactgcctgaagttcaccaagctgctgagattcgccgtggacagagaggccagactgggccagacccccttccccgacgtgatggagcaggtgttccacgaggtgggcatcggcagcgtgctgagcctgcagaagttctggcagcacagaatcaaggactaccacagctacatgctgcagatcagcaagcagctgagcgaggagtacgagagaatcgtgaaccccgagaaggccaccgaggacgccaagcccgtgaagatcaaggaggagcccgtgagcgacatcaccttccccgtgagcgaggagctggaggccgacctggccagcggcgaccagagcctgcccatgggcgtgctgggcgcccagagcgagagattccccagcaacctggaggtggaggccagcccccaggccagcagcgccgaggtgaacgccagccccctgtggaacctggcccacgtgaagatggagccccaggagagcgaggagggcaacgtgagcggccacggcgtgctgggcagcgacgtgttcgaggagcccatgagcggcatgagcgaggccggcatcccccagagccccgacgacagcgacagcagctacggcagccacagcaccgacagcctgatgggcagcagccccgtgttcaaccagagatgcaagaagagaatgagaaagatctag

SEQ ID NO: 13078 - DNA, 1239 bp, synthetic construct
  misc_feature 1..1239: note = Description of Artificial Sequence: Synthetic coding sequence
  source 1..1239: mol_type = other DNA
atgctgagatactggggcgagatccccatcagcagcagccagaccaacagaagcagcttcgacctgctgcccagagagttcagactggtggaggtgcacgacccccccctgcaccagcccagcgccaacaagcccaagccccccaccatgctggacatccccagcgagccctgcagcctgaccatccacaccatccagctgatccagcacaacagaagactgagaaacctgatcgccaccgcccaggcccagaaccagcagcagaccgagggcgtgaagaccgaggagagcgagcccctgcccagctgccccggcagcccccccctgcccgacgacctgctgcccctggactgcaagaaccccaacgcccccttccagatcagacacagcgaccccgagagcgacttctacagaggcaagggcgagcccgtgaccgagctgagctggcacagctgcagacagctgctgtaccaggccgtggccaccatcctggcccacgccggcttcgactgcgccaacgagagcgtgctggagaccctgaccgacgtggcccacgagtactgcctgaagttcaccaagctgctgagattcgccgtggacagagaggccagactgggccagacccccttccccgacgtgatggagcaggtgttccacgaggtgggcatcggcagcgtgctgagcctgcagaagttctggcagcacagaatcaaggactaccacagctacatgctgcagatcagcaagcagctgagcgaggagtacgagagaatcgtgaaccccgagaaggccaccgaggacgccaagcccgtgaagatcaaggaggagcccgtgagcgacatcaccttccccgtgagcgaggagctggaggccgacctggccagcggcgaccagagcctgcccatgggcgtgctgggcgcccagagcgagagattccccagcaacctggaggtggaggccagcccccaggccagcagcgccgaggtgaacgccagccccctgtggaacctggcccacgtgaagatggagccccaggagagcgaggagggcaacgtgagcggccacggcgtgctgggcagcgacgtgttcgaggagcccatgagcggcatgagcgaggccggcatcccccagagccccgacgacagcgacagcagctacggcagccacagcaccgacagcctgatgggcagcagccccgtgttcaaccagagatgcaagaagagaatgagaaagatctag

SEQ ID NO: 13079 - DNA, 1239 bp, synthetic construct; identical to SEQ ID NO: 13078
  misc_feature 1..1239: note = Description of Artificial Sequence: Synthetic coding sequence
  source 1..1239: mol_type = other DNA

SEQ ID NO: 13080 - DNA, 1239 bp, synthetic construct; identical to SEQ ID NO: 13078
  misc_feature 1..1239: note = Description of Artificial Sequence: Synthetic coding sequence
  source 1..1239: mol_type = other DNA

SEQ ID NO: 13081 - DNA, 1272 bp, synthetic construct
  misc_feature 1..1272: note = Description of Artificial Sequence: Synthetic coding sequence
  source 1..1272: mol_type = other DNA
atggtgggcatgagcagactgagaaacgacagactggccgaccccctgaccggctgcagcgtgtgctgcaagagcagctggaaccagctgcaggacctgtgcagactggccaagctgagctgccccgccctgggcatcagcaagagaaacctgtacgacttcgaggtggagtacctgtgcgactacaagaagatcagagagcaggagtactacctggtgaagtggagaggctaccccgacagcgagagcacctgggagcccagacagaacctgaagtgcgtgagaatcctgaagcagttccacaaggacctggagagagagctgctgagaagacaccacagaagcaagacccccagacacctggaccccagcctggccaactacctggtgcagaaggccaagcagagaagagccctgagaagatgggagcaggagctgaacgccaagagaagccacctgggcagaatcaccgtggagaacgaggtggacctggacggcccccccagagccttcgtgtacatcaacgagtacagagtgggcgagggcatcaccctgaaccaggtggccgtgggctgcgagtgccaggactgcctgtgggcccccaccggcggctgctgccccggcgccagcctgcacaagttcgcctacaacgaccagggccaggtgagactgagagccggcctgcccatctacgagtgcaacagcagatgcagatgcggctacgactgccccaacagagtggtgcagaagggcatcagatacgacctgtgcatcttcagaaccgacgacggcagaggctggggcgtgagaaccctggagaagatcagaaagaacagcttcgtgatggagtacgtgggcgagatcatcaccagcgaggaggccgagagaagaggccagatctacgacagacagggcgccacctacctgttcgacctggactacgtggaggacgtgtacaccgtggacgccgcctactacggcaacatcagccacttcgtgaaccacagctgcgaccccaacctgcaggtgtacaacgtgttcatcgacaacctggacgagagactgcccagaatcgccttcttcgccaccagaaccatcagagccggcgaggagctgaccttcgactacaacatgcaggtggaccccgtggacatggagagcaccagaatggacagcaacttcggcctggccggcctgcccggcagccccaagaagagagtgagaatcgagtgcaagtgcggcaccgagagctgcagaaagtacctgttctag

SEQ ID NO: 13082 - DNA, 1239 bp, synthetic construct
  misc_feature 1..1239: note = Description of Artificial Sequence: Synthetic coding sequence
  source 1..1239: mol_type = other DNA
atggccgagaacctgaagggctgcagcgtgtgctgcaagagcagctggaaccagctgcaggacctgtgcagactggccaagctgagctgccccgccctgggcatcagcaagagaaacctgtacgacttcgaggtggagtacctgtgcgactacaagaagatcagagagcaggagtactacctggtgaagtggagaggctaccccgacagcgagagcacctgggagcccagacagaacctgaagtgcgtgagaatcctgaagcagttccacaaggacctggagagagagctgctgagaagacaccacagaagcaagacccccagacacctggaccccagcctggccaactacctggtgcagaaggccaagcagagaagagccctgagaagatgggagcaggagctgaacgccaagagaagccacctgggcagaatcaccgtggagaacgaggtggacctggacggcccccccagagccttcgtgtacatcaacgagtacagagtgggcgagggcatcaccctgaaccaggtggccgtgggctgcgagtgccaggactgcctgtgggcccccaccggcggctgctgccccggcgccagcctgcacaagttcgcctacaacgaccagggccaggtgagactgagagccggcctgcccatctacgagtgcaacagcagatgcagatgcggctacgactgccccaacagagtggtgcagaagggcatcagatacgacctgtgcatcttcagaaccgacgacggcagaggctggggcgtgagaaccctggagaagatcagaaagaacagcttcgtgatggagtacgtgggcgagatcatcaccagcgaggaggccgagagaagaggccagatctacgacagacagggcgccacctacctgttcgacctggactacgtggaggacgtgtacaccgtggacgccgcctactacggcaacatcagccacttcgtgaaccacagctgcgaccccaacctgcaggtgtacaacgtgttcatcgacaacctggacgagagactgcccagaatcgccttcttcgccaccagaaccatcagagccggcgaggagctgaccttcgactacaacatgcaggtggaccccgtggacatggagagcaccagaatggacagcaacttcggcctggccggcctgcccggcagccccaagaagagagtgagaatcgagtgcaagtgcggcaccgagagctgcagaaagtacctgttctag

SEQ ID NO: 13083 - DNA, 648 bp, synthetic construct
  misc_feature 1..648: note = Description of Artificial Sequence: Synthetic coding sequence
  source 1..648: mol_type = other DNA
atggcctggatcagcagactgagagagcacctggacggcccccccagagccttcgtgtacatcaacgagtacagagtgggcgagggcatcaccctgaaccaggtggccgtgggctgcgagtgccaggactgcctgtgggcccccaccggcggctgctgccccggcgccagcctgcacaagttcgcctacaacgaccagggccaggtgagactgagagccggcctgcccatctacgagtgcaacagcagatgcagatgcggctacgactgccccaacagagtggtgcagaagggcatcagatacgacctgtgcatcttcagaaccgacgacggcagaggctggggcgtgagaaccctggagaagatcagaaagaacagcttcgtgatggaccccgccctgctgaccgtgtgcctgaagctgcccgccttccccatgggcaaggcctgggagaccgacctgagcgtgaccggcaccctgggcagaggctgcggcagaggcgaggacagactgcaggagagccccttccccgtgcccgcccccagcgtgggctgcacctacaagcccccccccaccttcagaaacagcttcagcaccagcagactgagcgtggtgggcatccacggcctgctgagaagaagcaagggctag

SEQ ID NO: 13084 - DNA, 1230 bp, synthetic construct
  misc_feature 1..1230: note = Description of Artificial Sequence: Synthetic coding sequence
  source 1..1230: mol_type = other DNA
atggccgagaacctgaagggctgcagcgtgtgctgcaagagcagctggaaccagctgcaggacctgtgcagactggccaagctgagctgccccgccctgggcatcagcaagagaaacctgtacgacttcgaggtggagtacgtgagactgcaggaggaccccagaaccggcatcctgcccggcgagatggcctggatcagcagactgagagagcacctgggcgccaccgccgagagccaggtgtgcgcctacccccaggccgtgccccagggcctgagaaagggcgccgcccccgccgccccccccgtgaaggacccccccgcccccggccccaagctgggccagctgcccggcgccgagggccaggccgaggccggcgcccccagcctgggcgccggcgcccagtgccaggcccacctgggcagaatcaccgtggagaacgaggtggacctggacggcccccccagagccttcgtgtacatcaacgagtacagagtgggcgagggcatcaccctgaaccaggtggccgtgggctgcgagtgccaggactgcctgtgggcccccaccggcggctgctgccccagacactgcaccagcctgcccaccatgaccagagccagatgcggcttcgagcccggctgccccagcaccagcgccacccccgccgccgccgccgccatgaccgcccagatcgtgtggtacagaagagtgagcgacatgaccagcgccagcagcgccagaatgatgggcgtggccggcgccagcgccccctggagaagattcgccagaaccgccagcagctggagcacctgggagagaagcctgccccagagaagacagagcggcggccagatctacgacagacagggcgccacctacctgttcgacctggactacgtggaggacgtgtacaccgtggacgccgcctactacggcaacatcagccacttcgtgaaccacagctgcgaccccaacctgcaggtgtacaacgtgttcatcgacaacctggacgagagactgcccagcctgagcctgccccaggagcccagcggccaggccagaagcagccccctgatcaccacctgcaagtggaccccctggacctggagagcccccgcctggacccccaccctggcctggctgggcagcctggcccccctgagaagcggcagcgtgctgaacgccagcgtgggcctgagccccgccgccaacaccagcagcagcccctag

SEQ ID NO: 13085 - DNA, 555 bp, synthetic construct
  misc_feature 1..555: note = Description of Artificial Sequence: Synthetic coding sequence
  source 1..555: mol_type = other DNA
atggcctggatcagcagactgagagagcacctgggcgccaccgccgagagccaggtgtgcgcctacccccaggccgtgccccagggcctgagaaagggcgccgcccccgccgccccccccgtgaaggacccccccgcccccggccccaagctgggccagctgcccggcgccgagggccaggccgagcccggctgccccagcaccagcgccacccccgccgccgccgccgccatgaccgcccagatcgtgtggtacagaagagtgagcgacatgaccagcgccagcagcgccagaatgatgggcgtggccggcgccagcgccccctggagaagattcgccagaaccgccagcagctggagcacctgggagagaagcctgccccagagaagacagagcggcggcgccagaagcaccaccgtgagagccccccccaccagcctgacctggaccacctggagaacctgcaccccctggatgccccccaccatggccaccagccccaccctgagcaccaccgtggtgacccccacctgcagatgcaccaccagcagctag

SEQ ID NO: 13086 - DNA, 285 bp, synthetic construct
  misc_feature 1..285: note = Description of Artificial Sequence: Synthetic coding sequence
  source 1..285: mol_type = other DNA
atgagagccggcttcagcgacttccagctgatcagagaccaggtgctgttcctgcaggaccaggcccagagactgaccgagtggctgcagctgagcggcttcgagaaccccgtgagcgagagcaccaccctgtgcctgagagagagagagaagagaatccccacctgcgtggccgtgtgcgtgcccagccccggcaccgtgcacaccgccctgctgcaccccaccaccctgagccagagcagaagcagcagcgaggccaagatgctgatcatccacaccgcctag

SEQ ID NO: 13087 - DNA, 594 bp, synthetic construct
  misc_feature 1..594: note = Description of Artificial Sequence: Synthetic coding sequence
  source 1..594: mol_type = other DNA
atggacgtgggcagcaaggaggtgctgatggagagcccccccgactacagcgccgcccccagaggcagattcggcatcccctgctgccccgtgcacctgaagagactgctgatcgtggtggtggtggtggtgctgatcgtggtggtgatcgtgggcgccctgctgatgggcctgcacatgagccagaagcacaccgagatggtgctggagatgagcatcggcgcccccgaggcccagcagagactggccctgagcgagcacctggtgaccaccgccaccttcagcatcggcagcaccggcctggtggtgtacgactaccagcagctgctgatcgcctacaagcccgcccccggcacctgctgctacatcatgaagatcgcccccgagagcatccccagcctggaggccctgaccagaaaggtgcacaacttccagatggagtgcagcctgcaggccaagcccgccgtgcccaccagcaagctgggccaggccgagggcagagacgccggcagcgcccccagcggcggcgaccccgccttcctgggcatggccgtgagcaccctgtgcggcgaggtgcccctgtactacatctag

SEQ ID NO: 13088 - DNA, 576 bp, synthetic construct
  misc_feature 1..576: note = Description of Artificial Sequence: Synthetic coding sequence
  source 1..576: mol_type = other DNA
atggacgtgggcagcaaggaggtgctgatggagagcccccccgactacagcgccgcccccagaggcagattcggcatcccctgctgccccgtgcacctgaagagactgctgatcgtggtggtggtggtggtgctgatcgtggtggtgatcgtgggcgccctgctgatgggcctgcacatgagccagaagcacaccgagatggtgctggagatgagcatcggcgcccccgaggcccagcagagactggccctgagcgagcacctggtgaccaccgccaccttcagcatcggcagcaccggcctggtggtgtacgactaccagcagctgctgatcgcctacaagcccgcccccggcacctgctgctacatcatgaagatcgcccccgagagcatccccagcctggaggccctgaccagaaaggtgcacaacttccaggccaagcccgccgtgcccaccagcaagctgggccaggccgagggcagagacgccggcagcgcccccagcggcggcgaccccgccttcctgggcatggccgtgagcaccctgtgcggcgaggtgcccctgtactacatctag

SEQ ID NO: 13089 - DNA, 1158 bp, synthetic construct
  misc_feature 1..1158: note = Description of Artificial Sequence: Synthetic coding sequence
  source 1..1158: mol_type = other DNA
atgatgatgatggccctgagcaagaccttcggccagaagcccgtgaagttccagctggaggacgacggcgagttctacatgatcggcagcgaggtgggcaactacctgagaatgttcagaggcagcctgtacaagagataccccagcctgtggagaagactggccaccgtggaggagagaaagaagatcgtggccagcagccacggcaagaagaccaagcccaacaccaaggaccacggctacaccaccctggccaccagcgtgaccctgctgaaggccagcgaggtggaggagatcctggacggcaacgacgagaagtacaaggccgtgagcatcagcaccgagccccccacctacctgagagagcagaaggccaagagaaacagccagtgggtgcccaccctgcccaacagcagccaccacctggacgccgtgccctgcagcaccaccatcaacagaaacagaatgggcagagacaagaagagaaccttccccctgtgcttcgacgaccacgaccccgccgtgatccacgagaacgccagccagcccgaggtgctggtgcccatcagactggacatggagatcgacggccagaagctgagagacgccttcacctggaacatgaacgagaagctgatgacccccgagatgttcagcgagatcctgtgcgacgacctggacctgaaccccctgaccttcgtgcccgccatcgccagcgccatcagacagcagatcgagagctaccccaccgacagcatcctggaggaccagagcgaccagagagtgatcatcaagctgaacatccacgtgggcaacatcagcctggtggaccagttcgagtgggacatgagcgagaaggagaacagccccgagaagttcgccctgaagctgtgcagcgagctgggcctgggcggcgagttcgtgaccaccatcgcctacagcatcagaggccagctgagctggcaccagaagacctacgccttcagcgagaaccccctgcccaccgtggagatcgccatcagaaacaccggcgacgccgaccagtggtgccccctgctggagaccctgaccgacgccgagatggagaagaagatcagagaccaggacagaaacaccagaagaatgagaagactggccaacaccgcccccgcctggtag

SEQ ID NO: 13090 - DNA, 1131 bp, synthetic construct
  misc_feature 1..1131: note = Description of Artificial Sequence: Synthetic coding sequence
  source 1..1131: mol_type = other DNA
atgatgatgatggccctgagcaagaccttcggccagaagcccgtgaagttccagctggaggacgacggcgagttctacatgatcggcagcgaggtgggcaactacctgagaatgttcagaggcagcctgtacaagagataccccagcctgtggagaagactggccaccgtggaggagagaaagaagatcgtggccagcagccacgaccacggctacaccaccctggccaccagcgtgaccctgctgaaggccagcgaggtggaggagatcctggacggcaacgacgagaagtacaaggccgtgagcatcagcaccgagccccccacctacctgagagagcagaaggccaagagaaacagccagtgggtgcccaccctgcccaacagcagccaccacctggacgccgtgccctgcagcaccaccatcaacagaaacagaatgggcagagacaagaagagaaccttccccctgtgcttcgacgaccacgaccccgccgtgatccacgagaacgccagccagcccgaggtgctggtgcccatcagactggacatggagatcgacggccagaagctgagagacgccttcacctggaacatgaacgagaagctgatgacccccgagatgttcagcgagatcctgtgcgacgacctggacctgaaccccctgaccttcgtgcccgccatcgccagcgccatcagacagcagatcgagagctaccccaccgacagcatcctggaggaccagagcgaccagagagtgatcatcaagctgaacatccacgtgggcaacatcagcctggtggaccagttcgagtgggacatgagcgagaaggagaacagccccgagaagttcgccctgaagctgtgcagcgagctgggcctgggcggcgagttcgtgaccaccatcgcctacagcatcagaggccagctgagctggcaccagaagacctacgccttcagcgagaaccccctgcccaccgtggagatcgccatcagaaacaccggcgacgccgaccagtggtgccccctgctggagaccctgaccgacgccgagatggagaagaagatcagagaccaggacagaaacaccagaagaatgagaagactggccaacaccgcccccgcctggtag

SEQ ID NO: 13091 - DNA, 81 bp, synthetic construct
  misc_feature 1..81: note = Description of Artificial Sequence: Synthetic coding sequence
  source 1..81: mol_type = other DNA
tggagaagactggccaccgtggaggagagaaagaagatcgtggccagcagccacgccctgatgaccatgacccagctgtag

SEQ ID NO: 13092 - DNA, 7626 bp, synthetic construct
  misc_feature 1..7626: note = Description of Artificial Sequence: Synthetic coding sequence
  source 1..7626: mol_type = other DNA
atggtggccctgagcctgaagatcagcatcggcaacgtggtgaagaccatgcagttcgagcccagcaccatggtgtacgacgcctgcagaatcatcagagagagaatccccgaggcccccgccggcccccccagcgacttcggcctgttcctgagcgacgacgaccccaagaagggcatctggctggaggccggcaaggccctggactactacatgctgagaaacggcgacaccatggagtacagaaagaagcagagacccctgaagatcagaatgctggacggcaccgtgaagaccatcatggtggacgacagcaagaccgtgaccgacatgctgatgaccatctgcgccagaatcggcatcaccaaccacgacgagtacagcctggtgagagagctgatggaggagaagaaggaggagatcaccggcaccctgagaaaggacaagaccctgctgagagacgagaagaagatggagaagctgaagcagaagctgcacaccgacgacgagctgaactggctggaccacggcagaaccctgagagagcagggcgtggaggagcacgagaccctgctgctgagaagaaagttcttctacagcgaccagaacgtggacagcagagaccccgtgcagctgaacctgctgtacgtgcaggccagagacgacatcctgaacggcagccaccccgtgagcttcgacaaggcctgcgagttcgccggcttccagtgccagatccagttcggcccccacaacgagcagaagcacaaggccggcttcctggacctgaaggacttcctgcccaaggagtacgtgaagcagaagggcgagagaaagatcttccaggcccacaagaactgcggccagatgagcgagatcgaggccaaggtgagatacgtgaagctggccagaagcctgaagacctacggcgtgagcttcttcctggtgaaggagaagatgaagggcaagaacaagctggtgcccagactgctgggcatcaccaaggagtgcgtgatgagagtggacgagaagaccaaggaggtgatccaggagtggaacctgaccaacatcaagagatgggccgccagccccaagagcttcaccctggacttcggcgactaccaggacggctactacagcgtgcagaccaccgagggcgagcagatcgcccagctgatcgccggctacatcgacatcatcctgaagaagaagaagagcaaggaccacttcggcctggagggcgacgaggagagcaccatgctggaggacagcgtgagccccaagaagagcaccgtgctgcagcagcagtacaacagagtgggcaaggtggagcacggcagcgtggccctgcccgccatcatgagaagcggcgccagcggccccgagaacttccaggtgggcagcatgccccccgcccagcagcagatcaccagcggccagatgcacagaggccacatgccccccctgaccagcgcccagcaggccctgaccggcaccatcaacagcagcatgcaggccgtgcaggccgcccaggccaccctggacgacttcgacaccctgccccccctgggccaggacgccgccagcaaggcctggagaaagaacaagatggacgagagcaagcacgagatccacagccaggtggacgccatcaccgccggcaccgccagcgtggtgaacctgaccgccggcgaccccgccgagaccgactacaccgccgtgggctgcgccgtgaccaccatcagcagcaacctgaccgagatgagcagaggcgtgaagctgctggccgccctgctggaggacgagggcggcagcggcagacccctgctgcaggccgccaagggcctggccggcgccgtgagcgagctgctgagaagcgcccagcccgccagcgccgagcccagacagaacctgctgcaggccgccggcaacgtgggccaggccagcggcgagctgctgcagcagatcggcgagagcgacaccgacccccacttccaggacgccctgatgcagctggccaaggccgtggccagcgccgccgccgccctggtgctgaaggccaagagcgtggcccagagaaccgaggacagcggcctgcagacccaggtgatcgccgccgccacccagtgcgccctgagcaccagccagctggtggcctgcaccaaggtggtggcccccaccatcagcagccccgtgtgccaggagcagctggtggaggccggcagactggtggccaaggccgtggagggctgcgtgagcgccagccaggccgccaccgaggacggccagctgctgagaggcgtgggcgccgccgccaccgccgtgacccaggccctgaacgagctgctgcagcacgtgaaggcccacgccaccggcgccggccccgccggcagatacgaccaggccaccgacaccatcctgaccgtgaccgagaacatcttcagcagcatgggcgacgccggcgagatggtgagacaggccagaatcctggcccaggccaccagcgacctggtgaacgccatcaaggccgacgccgagggcgagagcgacctggagaacagcagaaagctgctgagcgccgccaagatcctggccgacgccaccgccaagatggtggaggccgccaagggcgccgccgcccaccccgacagcgaggagcagcagcagagactgagagaggccgccgagggcctgagaatggccaccaacgccgccgcccagaacgccatcaagaagaagctggtgcagagactggagcacgccgccaagcaggccgccgccagcgccacccagaccatcgccgccgcccagcacgccgccagcacccccaaggccagcgccggcccccagcccctgctggtgcagagctgcaaggccgtggccgagcagatccccctgctggtgcagggcgtgagaggcagccaggcccagcccgacagccccagcgcccagctggccctgatcgccgccagccagagcttcctgcagcccggcggcaagatggtggccgccgccaaggccagcgtgcccaccatccaggaccaggccagcgccatgcagctgagccagtgcgccaagaacctgggcaccgccctggccgagctgagaaccgccgcccagaaggcccaggaggcctgcggccccctggagatggacagcgccctgagcgtggtgcagaacctggagaaggacctgcaggaggtgaaggccgccgccagagacggcaagctgaagcccctgcccggcgagaccatggagaagtgcacccaggacctgggcaacagcaccaaggccgtgagcagcgccatcgcccagctgctgggcgaggtggcccagggcaacgagaactacgccggcatcgccgccagagacgtggccggcggcctgagaagcctggcccaggccgccagaggcgtggccgccctgaccagcgaccccgccgtgcaggccatcgtgctggacaccgccagcgacgtgctggacaaggccagcagcctgatcgaggaggccaagaaggccgccggccaccccggcgaccccgagagccagcagagactggcccaggtggccaaggccgtgacccaggccctgaacagatgcgtgagctgcctgcccggccagagagacgtggacaacgccctgagagccgtgggcgacgccagcaagagactgctgagcgacagcctgccccccagcaccggcaccttccaggaggcccagagcagactgaacgaggccgccgccggcctgaaccaggccgccaccgagctggtgcaggccagcagaggcaccccccaggacctggccagagccagcggcagattcggccaggacttcagcaccttcctggaggccggcgtggagatggccggccaggcccccagccaggaggacagagcccaggtggtgagcaacctgaagggcatcagcatgagcagcagcaagctgctgctggccgccaaggccctgagcaccgaccccgccgcccccaacctgaagagccagctggccgccgccgccagagccgtgaccgacagcatcaaccagctgatcaccatgtgcacccagcaggcccccggccagaaggagtgcgacaacgccctgagagagctggagaccgtgagagagctgctggagaaccccgtgcagcccatcaacgacatgagctacttcggctgcctggacagcgtgatggagaacagcaaggtgctgggcgaggccatgaccggcatcagccagaacgccaagaacggcaacctgcccgagttcggcgacgccatcagcaccgccagcaaggccctgtgcggcttcaccgaggccgccgcccaggccgcctacctggtgggcgtgagcgaccccaacagccaggccggccagcagggcctggtggagcccacccagttcgccagagccaaccaggccatccagatggcctgccagagcctgggcgagcccggctgcacccaggcccaggtgctgagcgccgccaccatcgtggccaagcacaccagcgccctgtgcaacagctgcagactggccagcgccagaaccaccaaccccaccgccaagagacagttcgtgcagagcgccaaggaggtggccaacagcaccgccaacctggtgaagaccatcaaggccctggacggcgccttcaccgaggagaacagagcccagtgcagagccgccaccgcccccctgctggaggccgtggacaacctgagcgccttcgccagcaaccccgagttcagcagcatccccgcccagatcagccccgagggcagagccgccatggagcccatcgtgatcagcgccaagaccatgctggagagcgccggcggcctgatccagaccgccagagccctggccgtgaaccccagagacccccccagctggagcgtgctggccggccacagcagaaccgtgagcgacagcatcaagaagctgatcaccagcatgagagacaaggcccccggccagctggagtgcgagaccgccatcgccgccctgaacagctgcctgagagacctggaccaggccagcctggccgccgtgagccagcagctggcccccagagagggcatcagccaggaggccctgcacacccagatgctgaccgccgtgcaggagatcagccacctgatcgagcccctggccaacgccgccagagccgaggccagccagctgggccacaaggtgagccagatggcccagtacttcgagcccctgaccctggccgccgtgggcgccgccagcaagaccctgagccacccccagcagatggccctgctggaccagaccaagaccctggccgagagcgccctgcagctgctgtacaccgccaaggaggccggcggcaaccccaagcaggccgcccacacccaggaggccctggaggaggccgtgcagatgatgaccgaggccgtggaggacctgaccaccaccctgaacgaggccgccagcgccgccggcgtggtgggcggcatggtggacagcatcacccaggccatcaaccagctggacgagggccccatgggcgagcccgagggcagcttcgtggactaccagaccaccatggtgagaaccgccaaggccatcgccgtgaccgtgcaggagatggtgaccaagagcaacaccagccccgaggagctgggccccctggccaaccagctgaccagcgactacggcagactggccagcgaggccaagcccgccgccgtggccgccgagaacgaggagatcggcagccacatcaagcacagagtgcaggagctgggccacggctgcgccgccctggtgaccaaggccggcgccctgcagtgcagccccagcgacgcctacaccaagaaggagctgatcgagtgcgccagaagagtgagcgagaaggtgagccacgtgctggccgccctgcaggccggcaacagaggcacccaggcctgcatcaccgccgccagcgccgtgagcggcatcatcgccgacctggacaccaccatcatgttcgccaccgccggcaccctgaacagagagggcaccgagaccttcgccgaccacagagagggcatcctgaagaccgccaaggtgctggtggaggacaccaaggtgctggtgcagaacgccgccggcagccaggagaagctggcccaggccgcccagagcagcgtggccaccatcaccagactggccgacgtggtgaagctgggcgccgccagcctgggcgccgaggaccccgagacccaggtggtgctgatcaacgccgtgaaggacgtggccaaggccctgggcgacctgatcagcgccaccaaggccgccgccggcaaggtgggcgacgaccccgccgtgtggcagctgaagaacagcgccaaggtgatggtgaccaacgtgaccagcctgctgaagaccgtgaaggccgtggaggacgaggccaccaagggcaccagagccctggaggccaccaccgagcacatcagacaggagctggccgtgttctgcagccccgagccccccgccaagaccagcacccccgaggacttcatcagaatgaccaagggcatcaccatggccaccgccaaggccgtggccgccggcaacagctgcagacaggaggacgtgatcgccaccgccaacctgagcagaagagccatcgccgacatgctgagagcctgcaaggaggccgcctaccaccccgaggtggcccccgacgtgagactgagagccctgcactacggcagagagtgcgccaacggctacctggagctgctggaccacgtgctgctgaccctgcagaagcccagccccgagctgaagcagcagctgaccggccacagcaagagagtggccggcagcgtgaccgagctgatccaggccgccgaggccatgaagggcaccgagtgggtggaccccgaggaccccaccgtgatcgccgagaacgagctgctgggcgccgccgccgccatcgaggccgccgccaagaagctggagcagctgaagcccagagccaagcccaaggaggccgacgagagcctgaacttcgaggagcagatcctggaggccgccaagagcatcgccgccgccaccagcgccctggtgaaggccgccagcgccgcccagagagagctggtggcccagggcaaggtgggcgccatccccgccaacgccctggacgacggccagtggagccagggcctgatcagcgccgccagaatggtggccgccgccaccaacaacctgtgcgaggccgccaacgccgccgtgcagggccacgccagccaggagaagctgatcagcagcgccaagcaggtggccgccagcaccgcccagctgctggtggcctgcaaggtgaaggccgaccaggacagcgaggccatgaagagactgcaggccgccggcaacgccgtgaagagagccagcgacaacctggtgaaggccgcccagaaggccgccgccttcgaggagcaggagaacgagaccgtggtggtgaaggagaagatggtgggcggcatcgcccagatcatcgccgcccaggaggagatgctgagaaaggagagagagctggaggaggccagaaagaagctggcccagatcagacagcagcagtacaagttcctgcccagcgagctgagagacgagcactag

SEQ ID NO: 13093 - DNA, 7290 bp, synthetic construct
  misc_feature 1..7290: note = Description of Artificial Sequence: Synthetic coding sequence
  source 1..7290: mol_type = other DNA
atggtggccctgagcctgaagatcagcatcggcaacgtggtgaagaccatgcagttcgagcccagcaccatggtgtacgacgcctgcagaatcatcagagagagaatccccgaggcccccgccggcccccccagcgacttcggcctgttcctgagcgacgacgaccccaagaagggcatctggctggaggccggcaaggccctggactactacatgctgagaaacggcgacaccatggagtacagaaagaagcagagacccctgaagatcagaatgctggacggcaccgtgaagaccatcatggtggacgacagcaagaccgtgaccgacatgctgatgaccatctgcgccagaatcggcatcaccaaccacgacgagtacagcctggtgagagagctgatggaggagaagaaggaggagatcaccggcaccctgagaaaggacaagaccctgctgagagacgagaagaagatggagaagctgaagcagaagctgcacaccgacgacgagctgaactggctggaccacggcagaaccctgagagagcagggcgtggaggagcacgagaccctgctgctgagaagaaagttcttctacagcgaccagaacgtggacagcagagaccccgtgcagctgaacctgctgtacgtgcaggccagagacgacatcctgaacggcagccaccccgtgagcttcgacaaggcctgcgagttcgccggcttccagtgccagatccagttcggcccccacaacgagcagaagcacaaggccggcttcctggacctgaaggacttcctgcccaaggagtacgtgaagcagaagggcgagagaaagatcttccaggcccacaagaactgcggccagatgagcgagatcgaggccaaggtgagatacgtgaagctggccagaagcctgaagacctacggcgtgagcttcttcctggtgaaggagaagatgaagggcaagaacaagctggtgcccagactgctgggcatcaccaaggagtgcgtgatgagagtggacgagaagaccaaggaggtgatccaggagtggaacctgaccaacatcaagagatgggccgccagccccaagagcttcaccctggacttcggcgactaccaggacggctactacagcgtgcagaccaccgagggcgagcagatcgcccagctgatcgccggctacatcgacatcatcctgaagaagaagaagagcaaggaccacttcggcctggagggcgacgaggagagcaccatgctggaggacagcgtgagccccaagaagagcaccgtgctgcagcagcagtacaacagagtgggcaaggtggagcacggcagcgtggccctgcccgccatcatgagaagcggcgccagcggccccgagaacttccaggtgggcagcatgccccccgcccagcagcagatcaccagcggccagatgcacagaggccacatgccccccctgaccagcgcccagcaggccctgaccggcaccatcaacagcagcatgcaggccgtgcaggccgcccaggccaccctggacgacttcgacaccctgccccccctgggccaggacgccgccagcaaggcctggagaaagaacaagatggacgagagcaagcacgagatccacagccaggtggacgccatcaccgccggcaccgccagcgtggtgaacctgaccgccggcgaccccgccgagaccgactacaccgccgtgggctgcgccgtgaccaccatcagcagcaacctgaccgagatgagcagaggcgtgaagctgctggccgccctgctggaggacgagggcggcagcggcagacccctgctgcaggccgccaagggcctggccggcgccgtgagcgagctgctgagaagcgcccagcccgccagcgccgagcccagacagaacctgctgcaggccgccggcaacgtgggccaggccagcggcgagctgctgcagcagatcggcgagagcgacaccgacccccacttccaggacgccctgatgcagctggccaaggccgtggccagcgccgccgccgccctggtgctgaaggccaagagcgtggcccagagaaccgaggacagcggcctgcagacccaggtgatcgccgccgccacccagtgcgccctgagcaccagccagctggtggcctgcaccaaggtggtggcccccaccatcagcagccccgtgtgccaggagcagctggtggaggccggcagactggtggccaaggccgtggagggctgcgtgagcgccagccaggccgccaccgaggacggccagctgctgagaggcgtgggcgccgccgccaccgccgtgacccaggccctgaacgagctgctgcagcacgtgaaggcccacgccaccggcgccggccccgccggcagatacgaccaggccaccgacaccatcctgaccgtgaccgagaacatcttcagcagcatgggcgacgccggcgagatggtgagacaggccagaatcctggcccaggccaccagcgacctggtgaacgccatcaaggccgacgccgagggcgagagcgacctggagaacagcagaaagctgctgagcgccgccaagatcctggccgacgccaccgccaagatggtggaggccgccaagggcgccgccgcccaccccgacagcgaggagcagcagcagagactgagagaggccgccgagggcctgagaatggccaccaacgccgccgcccagaacgccatcaagaagaagctggtgcagagactggagcacgccgccaagcaggccgccgccagcgccacccagaccatcgccgccgcccagcacgccgccagcacccccaaggccagcgccggcccccagcccctgctggtgcagagctgcaaggccgtggccgagcagatccccctgctggtgcagggcgtgagaggcagccaggcccagcccgacagccccagcgcccagctggccctgatcgccgccagccagagcttcctgcagcccggcggcaagatggtggccgccgccaaggccagcgtgcccaccatccaggaccaggccagcgccatgcagctgagccagtgcgccaagaacctgggcaccgccctggccgagctgagaaccgccgcccagaaggcccaggaggcctgcggccccctggagatggacagcgccctgagcgtggtgcagaacctggagaaggacctgcaggaggtgaaggccgccgccagagacggcaagctgaagcccctgcccggcgagaccatggagaagtgcacccaggacctgggcaacagcaccaaggccgtgagcagcgccatcgcccagctgctgggcgaggtggcccagggcaacgagaactacgccggcatcgccgccagagacgtggccggcggcctgagaagcctggcccaggccgccagaggcgtggccgccctgaccagcgaccccgccgtgcaggccatcgtgctggacaccgccagcgacgtgctggacaaggccagcagcctgatcgaggaggccaagaaggccgccggccaccccggcgaccccgagagccagcagagactggcccaggtggccaaggccgtgacccaggccctgaacagatgcgtgagctgcctgcccggccagagagacgtggacaacgccctgagagccgtgggcgacgccagcaagagactgctgagcgacagcctgccccccagcaccggcaccttccaggaggcccagagcagactgaacgaggccgccgccggcctgaaccaggccgccaccgagctggtgcaggccagcagaggcaccccccaggacctggccagagccagcggcagattcggccaggacttcagcaccttcctggaggccggcgtggagatggccggccaggcccccagccaggaggacagagcccaggtggtgagcaacctgaagggcatcagcatgagcagcagcaagctgctgctggccgccaaggccctgagcaccgaccccgccgcccccaacctgaagagccagctggccgccgccgccagagccgtgaccgacagcatcaaccagctgatcaccatgtgcacccagcaggcccccggccagaaggagtgcgacaacgccctgagagagctggagaccgtgagagagctgctggagaaccccgtgcagcccatcaacgacatgagctacttcggctgcctggacagcgtgatggagaacagcaaggtgctgggcgaggccatgaccggcatcagccagaacgccaagaacggcaacctgcccgagttcggcgacgccatcagcaccgccagcaaggccctgtgcggcttcaccgaggccgccgcccaggccgcctacctggtgggcgtgagcgaccccaacagccaggccggccagcagggcctggtggagcccacccagttcgccagagccaaccaggccatccagatggcctgccagagcctgggcgagcccggctgcacccaggcccaggtgctgagcgccgccaccatcgtggccaagcacaccagcgccctgtgcaacagctgcagactggccagcgccagaaccaccaaccccaccgccaagagacagttcgtgcagagcgccaaggaggtggccaacagcaccgccaacctggtgaagaccatcaaggccctggacggcgccttcaccgaggagaacagagcccagtgcagagccgccaccgcccccctgctggaggccgtggacaacctgagcgccttcgccagcaaccccgagttcagcagcatccccgcccagatcagccccgagggcagagccgccatggagcccatcgtgatcagcgccaagaccatgctggagagcgccggcggcctgatccagaccgccagagccctggccgtgaaccccagagacccccccagctggagcgtgctggccggccacagcagaaccgtgagcgacagcatcaagaagctgatcaccagcatgagagacaaggcccccggccagctggagtgcgagaccgccatcgccgccctgaacagctgcctgagagacctggaccaggccagcctggccgccgtgagccagcagctggcccccctgcaggagatcagccacctgatcgagcccctggccaacgccgccagagccgaggccagccagctgggccacaaggtgagccagatggcccagtacttcgagcccctgaccctggccgccgtgggcgccgccagcaagaccctgagccacccccagcagatggccctgctggaccagaccaagaccctggccgagagcgccctgcagctgctgtacaccgccaaggaggccggcggcaaccccaagctggacgagggccccatgggcgagcccgagggcagcttcgtggactaccagaccaccatggtgagaaccgccaaggccatcgccgtgaccgtgcaggagatgatcggcagccacatcaagcacagagtgcaggagctgggccacggctgcgccgccctggtgaccaaggccggcgccctgcagtgcagccccagcgacgcctacaccaagaaggagctgatcgagtgcgccagaagagtgagcgagaaggtgagccacgtgctggccgccctgcaggccggcaacagaggcacccaggcctgcatcaccgccgccagcgccgtgagcggcatcatcgccgacctggacaccaccatcatgttcgccaccgccggcaccctgaacagagagggcaccgagaccttcgccgaccacagagagggcatcctgaagaccgccaaggtgctggtggaggacaccaaggtgctggtgcagaacgccgccggcagccaggagaagctggcccaggccgcccagagcagcgtggccaccatcaccagactggccgacgtggtgaagctgggcgccgccagcctgggcgccgaggaccccgagacccaggtggtgctgatcaacgccgtgaaggacgtggccaaggccctgggcgacctgatcagcgccaccaaggccgccgccggcaaggtgggcgacgaccccgccgtgtggcagctgaagaacagcgccaaggtgatggtgaccaacgtgaccagcctgctgaagaccgtgaaggccgtggaggacgaggccaccaagggcaccagagccctggaggccaccaccgagcacatcagacaggagctggccccccccgccaagaccagcacccccgaggacttcatcagaatgaccaagggcatcaccatggccaccgccaaggccgtggccgccggcaacagctgcagacaggaggacgtgatcgccaccgccaacctgagcagaagagccatcgccgacatgctgagagcctgcaaggaggccgcctaccaccccgaggtggcccccgacgtgagactgagagccctgcactacggcagagagtgcgccaacggctacctggagctgctggaccacgtgctgctgaccctgcagaagcccagccccgagctgaagcagcagctgaccggccacagcaagagagtggccggcagcgtgaccgagctgatccaggccgccgaggccatgaagggcaccgagtgggtggaccccgaggaccccaccgtgatcgccgagaacgagctgctgggcgccgccgccgccatcgaggccgccgccaagaagctggagcagctgaagcccagagccaagcccaaggaggccgacgagagcctgaacttcgaggagcagatcctggaggccgccaagagcatcgccgccgccaccagcgccctggtgaaggccgccagcgccgcccagagagagctggtggcccagggcaaggtgggcgccatccccgccaacgccctggacgacggccagtggagccagggcctgatcagcgccgccagaatggtggccgccgccaccaacaacctgtgcgaggccgccaacgccgccgtgcagggccacgccagccaggagaagctgatcagcagcgccaagcaggtggccgccagcaccgcccagctgctggtggcctgcaaggtgaaggccgaccaggacagcgaggccatgaagagactgcaggccgccggcaacgccgtgaagagagccagcgacaacctggtgaaggccgcccagaaggccgccgccttcgaggagcaggagaacgagaccgtggtggtgaaggagaagatggtgggcggcatcgcccagatcatcgccgcccaggaggagatgctgagaaaggagagagagctggaggaggccagaaagaagctggcccagatcagacagcagcagtacaagttcctgcccagcgagctgagagacgagcactag

SEQ ID NO: 13094 - DNA, 3984 bp, synthetic construct
  misc_feature 1..3984: note = Description of Artificial Sequence: Synthetic coding sequence
  source 1..3984: mol_type = other DNA
atggccgccagcagaagaagccagcaccaccaccaccaccaccagcagcagctgcagcccgcccccggcgccagcgccccccccccccccccccccccccccctgagccccggcctggcccccggcaccacccccgccagccccaccgccagcggcctggcccccttcgccagccccagacacggcctggccctgcccgagggcgacggcagcagagacccccccgacagacccagaagccccgaccccgtggacggcaccagctgctgcagcaccaccagcaccatctgcaccgtggccgccgcccccgtggtgcccgccgtgagcaccagcagcgccgccggcgtggcccccaaccccgccggcagcggcagcaacaacagccccagcagcagcagcagccccaccagcagcagcagcagcagccccagcagccccggcagcagcctggccgagagccccgaggccgccggcgtgagcagcaccgcccccctgggccccggcgccgccggccccggcaccggcgtgcccgccgtgagcggcgccctgagagagctgctggaggcctgcagaaacggcgacgtgagcagagtgaagagactggtggacgccgccaacgtgaacgccaaggacatggccggcagaaagagcagccccctgcacttcgccgccggcttcggcagaaaggacgtggtggagcacctgctgcagatgggcgccaacgtgcacgccagagacgacggcggcctgatccccctgcacaacgcctgcagcttcggccacgccgaggtggtgagcctgctgctgtgccagggcgccgaccccaacgccagagacaactggaactacacccccctgcacgaggccgccatcaagggcaagatcgacgtgtgcatcgtgctgctgcagcacggcgccgaccccaacatcagaaacaccgacggcaagagcgccctggacctggccgaccccagcgccaaggccgtgctgaccggcgagtacaagaaggacgagctgctggaggccgccagaagcggcaacgaggagaagctgatggccctgctgacccccctgaacgtgaactgccacgccagcgacggcagaaagagcacccccctgcacctggccgccggctacaacagagtgagaatcgtgcagctgctgctgcagcacggcgccgacgtgcacgccaaggacaagggcggcctggtgcccctgcacaacgcctgcagctacggccactacgaggtgaccgagctgctgctgaagcacggcgcctgcgtgaacgccatggacctgtggcagttcacccccctgcacgaggccgccagcaagaacagagtggaggtgtgcagcctgctgctgagccacggcgccgaccccaccctggtgaactgccacggcaagagcgccgtggacatggcccccacccccgagctgagagagagactgacctacgagttcaagggccacagcctgctgcaggccgccagagaggccgacctggccaaggtgaagaagaccctggccctggagatcatcaacttcaagcagccccagagccacgagaccgccctgcactgcgccgtggccagcctgcaccccaagagaaagcaggtgaccgagctgctgctgagaaagggcgccaacgtgaacgagaagaacaaggacttcatgacccccctgcacgtggccgccgagagagcccacaacgacgtgatggaggtgctgcacaagcacggcgccaagatgaacgccctggacaccctgggccagaccgccctgcacagagccgccctggccggccacctgcagacctgcagactgctgctgagctacggcagcgaccccagcatcatcagcctgcagggcttcaccgccgcccagatgggcaacgaggccgtgcagcagatcctgagcgagagcacccccatcagaaccagcgacgtggactacagactgctggaggccagcaaggccggcgacctggagaccgtgaagcagctgtgcagcagccagaacgtgaactgcagagacctggagggcagacacagcacccccctgcacttcgccgccggctacaacagagtgagcgtggtggagtacctgctgcaccacggcgccgacgtgcacgccaaggacaagggcggcctggtgcccctgcacaacgcctgcagctacggccactacgaggtggccgagctgctggtgagacacggcgccagcgtgaacgtggccgacctgtggaagttcacccccctgcacgaggccgccgccaagggcaagtacgagatctgcaagctgctgctgaagcacggcgccgaccccaccaagaagaacagagacggcaacacccccctggacctggtgaaggagggcgacaccgacatccaggacctgctgagaggcgacgccgccctgctggacgccgccaagaagggctgcctggccagagtgcagaagctgtgcacccccgagaacatcaactgcagagacacccagggcagaaacagcacccccctgcacctggccgccggctacaacaacctggaggtggccgagtacctgctggagcacggcgccgacgtgaacgcccaggacaagggcggcctgatccccctgcacaacgccgccagctacggccacgtggacatcgccgccctgctgatcaagtacaacacctgcgtgaacgccaccgacaagtgggccttcacccccctgcacgaggccgcccagaagggcagaacccagctgtgcgccctgctgctggcccacggcgccgaccccaccatgaagaaccaggagggccagacccccctggacctggccaccgccgacgacatcagagccctgctgatcgacgccatgccccccgaggccctgcccacctgcttcaagccccaggccaccgtggtgagcgccagcctgatcagccccgccagcacccccagctgcctgagcgccgccagcagcatcgacaacctgaccggccccctggccgagctggccgtgggcggcgccagcaacgccggcgacggcgccgccggcaccgagagaaaggagggcgaggtggccggcctggacatgaacatcagccagttcctgaagagcctgggcctggagcacctgagagacatcttcgagaccgagcagatcaccctggacgtgctggccgacatgggccacgaggagctgaaggagatcggcatcaacgcctacggccacagacacaagctgatcaagggcgtggagagactgctgggcggccagcagggcaccaacccctacctgaccttccactgcgtgaaccagggcaccatcctgctggacctggcccccgaggacaaggagtaccagagcgtggaggaggagatgcagagcaccatcagagagcacagagacggcggcaacgccggcggcatcttcaacagatacaacgtgatcagaatccagaaggtggtgaacaagaagctgagagagagattctgccacagacagaaggaggtgagcgaggagaaccacaaccaccacaacgagagaatgctgttccacggcagccccttcatcaacgccatcatccacaagggcttcgacgagagacacgcctacatcggcggcatgttcggcgccggcatctacttcgccgagaacagcagcaagagcaaccagtacgtgtacggcatcggcggcggcaccggctgccccacccacaaggacagaagctgctacatctgccacagacagatgctgttctgcagagtgaccctgggcaagagcttcctgcagttcagcaccatgaagatggcccacgccccccccggccaccacagcgtgatcggcagacccagcgtgaacggcctggcctacgccgagtacgtgatctacagaggcgagcaggcctaccccgagtacctgatcacctaccagatcatgaagcccgaggcccccagccagaccgccaccgccgccgagcagaagacctag

SEQ ID NO: 13095 - DNA, 3501 bp, synthetic construct
  misc_feature 1..3501: note = Description of Artificial Sequence: Synthetic coding sequence
  source 1..3501: mol_type = other DNA
atgagcggcagaagatgcgccggcggcggcgccgcctgcgccagcgccgccgccgaggccgtggagcccgccgccagagagctgttcgaggcctgcagaaacggcgacgtggagagagtgaagagactggtgacccccgagaaggtgaacagcagagacaccgccggcagaaagagcacccccctgcacttcgccgccggcttcggcagaaaggacgtggtggagtacctgctgcagaacggcgccaacgtgcaggccagagacgacggcggcctgatccccctgcacaacgcctgcagcttcggccacgccgaggtggtgaacctgctgctgagacacggcgccgaccccaacgccagagacaactggaactacacccccctgcacgaggccgccatcaagggcaagatcgacgtgtgcatcgtgctgctgcagcacggcgccgagcccaccatcagaaacaccgacggcagaaccgccctggacctggccgaccccagcgccaaggccgtgctgaccggcgagtacaagaaggacgagctgctggagagcgccagaagcggcaacgaggagaagatgatggccctgctgacccccctgaacgtgaactgccacgccagcgacggcagaaagagcacccccctgcacctggccgccggctacaacagagtgaagatcgtgcagctgctgctgcagcacggcgccgacgtgcacgccaaggacaagggcgacctggtgcccctgcacaacgcctgcagctacggccactacgaggtgaccgagctgctggtgaagcacggcgcctgcgtgaacgccatggacctgtggcagttcacccccctgcacgaggccgccagcaagaacagagtggaggtgtgcagcctgctgctgagctacggcgccgaccccaccctgctgaactgccacaacaagagcgccatcgacctggcccccaccccccagctgaaggagagactggcctacgagttcaagggccacagcctgctgcaggccgccagagaggccgacgtgaccagaatcaagaagcacctgagcctggagatggtgaacttcaagcacccccagacccacgagaccgccctgcactgcgccgccgccagcccctaccccaagagaaagcagatctgcgagctgctgctgagaaagggcgccaacatcaacgagaagaccaaggagttcctgacccccctgcacgtggccagcgagaaggcccacaacgacgtggtggaggtggtggtgaagcacgaggccaaggtgaacgccctggacaacctgggccagaccagcctgcacagagccgcctactgcggccacctgcagacctgcagactgctgctgagctacggctgcgaccccaacatcatcagcctgcagggcttcaccgccctgcagatgggcaacgagaacgtgcagcagctgctgcaggagggcatcagcctgggcaacagcgaggccgacagacagctgctggaggccgccaaggccggcgacgtggagaccgtgaagaagctgtgcaccgtgcagagcgtgaactgcagagacatcgagggcagacagagcacccccctgcacttcgccgccggctacaacagagtgagcgtggtggagtacctgctgcagcacggcgccgacgtgcacgccaaggacaagggcggcctggtgcccctgcacaacgcctgcagctacggccactacgaggtggccgagctgctggtgaagcacggcgccgtggtgaacgtggccgacctgtggaagttcacccccctgcacgaggccgccgccaagggcaagtacgagatctgcaagctgctgctgcagcacggcgccgaccccaccaagaagaacagagacggcaacacccccctggacctggtgaaggacggcgacaccgacatccaggacctgctgagaggcgacgccgccctgctggacgccgccaagaagggctgcctggccagagtgaagaagctgagcagccccgacaacgtgaactgcagagacacccagggcagacacagcacccccctgcacctggccgccggctacaacaacctggaggtggccgagtacctgctgcagcacggcgccgacgtgaacgcccaggacaagggcggcctgatccccctgcacaacgccgccagctacggccacgtggacgtggccgccctgctgatcaagtacaacgcctgcgtgaacgccaccgacaagtgggccttcacccccctgcacgaggccgcccagaagggcagaacccagctgtgcgccctgctgctggcccacggcgccgaccccaccctgaagaaccaggagggccagacccccctggacctggtgagcgccgacgacgtgagcgccctgctgaccgccgccatgccccccagcgccctgcccagctgctacaagccccaggtgctgaacggcgtgagaagccccggcgccaccgccgacgccctgagcagcggccccagcagccccagcagcctgagcgccgccagcagcctggacaacctgagcggcagcttcagcgagctgagcagcgtggtgagcagcagcggcaccgagggcgccagcagcctggagaagaaggaggtgcccggcgtggacttcagcatcacccagttcgtgagaaacctgggcctggagcacctgatggacatcttcgagagagagcagatcaccctggacgtgctggtggagatgggccacaaggagctgaaggagatcggcatcaacgcctacggccacagacacaagctgatcaagggcgtggagagactgatcagcggccagcagggcctgaacccctacctgaccctgaacaccagcggcagcggcaccatcctgatcgacctgagccccgacgacaaggagttccagagcgtggaggaggagatgcagagcaccgtgagagagcacagagacggcggccacgccggcggcatcttcaacagatacaacatcctgaagatccagaaggtgtgcaacaagaagctgtgggagagatacacccacagaagaaaggaggtgagcgaggagaaccacaaccacgccaacgagagaatgctgttccacggcagccccttcgtgaacgccatcatccacaagggcttcgacgagagacacgcctacatcggcggcatgttcggcgccggcatctacttcgccgagaacagcagcaagagcaaccagtacgtgtacggcatcggcggcggcaccggctgccccgtgcacaaggacagaagctgctacatctgccacagacagctgctgttctgcagagtgaccctgggcaagagcttcctgcagttcagcgccatgaagatggcccacagcccccccggccaccacagcgtgaccggcagacccagcgtgaacggcctggccctggccgagtacgtgatctacagaggcgagcaggcctaccccgagtacctgatcacctaccagatcatgagacccgagggcatggtggacggctag

SEQ ID NO: 13096 - DNA, 2139 bp, synthetic construct
  misc_feature 1..2139: note = Description of Artificial Sequence: Synthetic coding sequence
  source 1..2139: mol_type = other DNA
atgagagagcccgccctggccgccagcgccatggcctaccaccccttccacgcccccagacccgccgacttccccatgagcgccttcctggccgccgcccagcccagcttcttccccgccctggccctgccccccggcgccctggccaagcccctgcccgaccccggcctggccggcgccgccgccgccgccgccgccgccgccgccgccgccgaggccggcctgcacgtgagcgccctgggcccccacccccccgccgcccacctgagaagcctgaagagcctggagcccgaggacgaggtggaggacgaccccaaggtgaccctggaggccaaggagctgtgggaccagttccacaagctgggcaccgagatggtgatcaccaagagcggcagaagaatgttcccccccttcaaggtgagagtgagcggcctggacaagaaggccaagtacatcctgctgatggacatcgtggccgccgacgactgcagatacaagttccacaacagcagatggatggtggccggcaaggccgaccccgagatgcccaagagaatgtacatccaccccgacagccccgccaccggcgagcagtggatggccaagcccgtggccttccacaagctgaagctgaccaacaacatcagcgacaagcacggcttcaccatcctgaacagcatgcacaagtaccagcccagattccacatcgtgagagccaacgacatcctgaagctgccctacagcaccttcagaacctacgtgttccccgagaccgacttcatcgccgtgaccgcctaccagaacgacaagatcacccagctgaagatcgacaacaaccccttcgccaagggcttcagagacaccggcaacggcagaagagagaagagaaagcagctgaccctgcccagcctgagactgtacgaggagcactgcaagcccgagagagacggcgccgagagcgacgccagcagctgcgaccccccccccgccagagagccccccaccagccccggcgccgcccccagccccctgagactgcacagagccagagccgaggagaagagctgcgccgccgacagcgaccccgagcccgagagactgagcgaggagagagccggcgcccccctgggcagaagccccgcccccgacagcgccagccccaccagactgaccgagcccgagagagccagagagagaagaagccccgagagaggcaaggagcccgccgagagcggcggcgacggccccttcggcctgagaagcctggagaaggagagagccgaggccagaagaaaggacgagggcagaaaggaggccgccgagggcaaggagcagggcctggcccccctggtggtgcagaccgacagcgccagccccctgggcgccggccacctgcccggcctggccttcagcagccacctgcacggccagcagttcttcggccccctgggcgccggccagcccctgttcctgcaccccggccagttcaccatgggccccggcgccttcagcgccatgggcatgggccacctgctggccagcgtggccggcggcggcaacggcggcggcggcggccccggcaccgccgccggcctggacgccggcggcctgggccccgccgccagcgccgccagcaccgccgcccccttccccttccacctgagccagcacatgctggccagccagggcatccccatgcccaccttcggcggcctgttcccctacccctacacctacatggccgccgccgccgccgccgccagcgccctgcccgccaccagcgccgccgccgccgccgccgccgccgccggcagcctgagcagaagccccttcctgggcagcgccagacccagactgagattcagcccctaccagatccccgtgaccatcccccccagcaccagcctgctgaccaccggcctggccagcgagggcagcaaggccgccggcggcaacagcagagagcccagccccctgcccgagctggccctgagaaaggtgggcgcccccagcagaggcgccctgagccccagcggcagcgccaaggaggccgccaacgagctgcagagcatccagagactggtgagcggcctggagagccagagagccctgagccccggcagagagagccccaagtag

SEQ ID NO: 13097 - DNA, 981 bp, synthetic construct
  misc_feature 1..981: note = Description of Artificial Sequence: Synthetic coding sequence
  source 1..981: mol_type = other DNA
atgagcgccttcctggccgccgcccagcccagcttcttccccgccctggccctgccccccggcgccctggccaagcccctgcccgaccccggcctggccggcgccgccgccgccgccgccgccgccgccgccgccgccgaggccggcctgcacgtgagcgccctgggcccccacccccccgccgcccacctgagaagcctgaagagcctggagcccgaggacgaggtggaggacgaccccaaggtgaccctggaggccaaggagctgtgggaccagttccacaagctgggcaccgagatggtgatcaccaagagcggcagaagaatgttcccccccttcaaggtgagagtgagcggcctggacaagaaggccaagtacatcctgctgatggacatcgtggccgccgacgactgcagatacaagttccacaacagcagatggatggtggccggcaaggccgaccccgagatgcccaagagaatgtacatccaccccgacagccccgccaccggcgagcagtggatggccaagcccgtggccttccacaagctgaagctgaccaacaacatcagcgacaagcacggcttcaccatcctgaacagcatgcacaagtaccagcccagattccacatcgtgagagccaacgacatcctgaagctgccctacagcaccttcagaacctacgtgttccccgagaccgacttcatcgccgtgaccgcctaccagaacgacaagatcacccagctgaagatcgacaacaaccccttcgccaagggcttcagagacaccggcaacggcagaagagagaagagaaagcagctgaccctgcccagcctgagactgtacgaggagcactgcaagcccgagagagacggcgccgagagcgacgccagcagctgcgaccccccccccgccagagagccccccaccagccccggcgccgcccccagccccctgagactgcacagagccagaggctag

SEQ ID NO: 13098 - DNA, 996 bp, synthetic construct
  misc_feature 1..996: note = Description of Artificial Sequence: Synthetic coding sequence
  source 1..996: mol_type = other DNA
atgaccgagagaccccccagcgaggccgccagaagcgacccccagctggagggcagagacgccgccgaggccagcatggcccccccccacctggtgctgctgaacggcgtggccaaggagaccagcagagccgccgccgccgagccccccgtgatcgagctgggcgccagaggcggccccggcggcggccccgccggcggcggcggcgccgccagagacctgaagggcagagacgccgccaccgccgaggccagacacagagtgcccaccaccgagctgtgcagaccccccggccccgcccccgcccccgcccccgccagcgtgaccgccgagctgcccggcgacggcagaatggtgcagctgagcccccccgccctggccgcccccgccgcccccggcagagccctgctgtacagcctgagccagcccctggccagcctgggcagcggcttcttcggcgagcccgacgccttccccatgttcaccaccaacaacagagtgaagagaagacccagcccctacgagatggagatcaccgacggcccccacaccaaggtggtgagaagaatcttcaccaacagcagagagagatggagacagcagaacgtgaacggcgccttcgccgagctgagaaagctgatccccacccacccccccgacaagaagctgagcaagaacgagatcctgagactggccatgaagtacatcaacttcctggccaagctgctgaacgaccaggaggaggagggcacccagagagccaagaccggcaaggaccccgtggtgggcgccggcggcggcggcggcggcggcggcggcggcgccccccccgacgacctgctgcaggacgtgctgagccccaacagcagctgcggcagcagcctggacggcgccgccagccccgacagctacaccgaggagcccgcccccaagcacaccgccagaagcctgcaccccgccatgctgcccgccgccgacggcgccggccccagatag

SEQ ID NO: 13099 - DNA, 1002 bp, synthetic construct
  misc_feature 1..1002: note = Description of Artificial Sequence: Synthetic coding sequence
  source 1..1002: mol_type = other DNA
atgaccgagagaccccccagcgaggccgccagaagcgacccccagctggagggcagagacgccgccgaggccagcatggcccccccccacctggtgctgctgaacggcgtggccaaggagaccagcagagccgccgccgccgagccccccgtgatcgagctgggcgccagaggcggccccggcggcggccccgccggcggcggcggcgccgccagagacctgaagggcagagacgccgccaccgccgaggccagacacagagtgcccaccaccgagctgtgcagaccccccggccccgcccccgcccccgcccccgccagcgtgaccgccgagctgcccggcgacggcagaatggtgcagctgagcccccccgccctggccgcccccgccgcccccggcagagccctgctgtacagcctgagccagcccctggccagcctgggcagccacagcggcttcttcggcgagcccgacgccttccccatgttcaccaccaacaacagagtgaagagaagacccagcccctacgagatggagatcaccgacggcccccacaccaaggtggtgagaagaatcttcaccaacagcagagagagatggagacagcagaacgtgaacggcgccttcgccgagctgagaaagctgatccccacccacccccccgacaagaagctgagcaagaacgagatcctgagactggccatgaagtacatcaacttcctggccaagctgctgaacgaccaggaggaggagggcacccagagagccaagaccggcaaggaccccgtggtgggcgccggcggcggcggcggcggcggcggcggcggcgccccccccgacgacctgctgcaggacgtgctgagccccaacagcagctgcggcagcagcctggacggcgccgccagccccgacagctacaccgaggagcccgcccccaagcacaccgccagaagcctgcaccccgccatgctgcccgccgccgacggcgccggccccagatag

SEQ ID NO: 13100 - DNA, 996 bp, synthetic construct; identical to SEQ ID NO: 13098
  misc_feature 1..996: note = Description of Artificial Sequence: Synthetic coding sequence
  source 1..996: mol_type = other DNA

SEQ ID NO: 13101 - DNA, 993 bp, synthetic construct
  misc_feature 1..993: note = Description of Artificial Sequence: Synthetic coding sequence
  source 1..993: mol_type = other DNA
atggagcacctgggcccccaccacctgcaccccggccacgccgagcccatcagcttcggcatcgaccagatcctgaacagccccgaccagggcggctgcatgggccccgccagcagactgcaggacggcgagtacggcctgggctgcctggtgggcggcgcctacacctacggcggcggcggcagcgccgccgccaccggcgccggcggcgccggcgcctacggcaccggcggccccggcggccccggcggccccgccggcggcggcggcgcctgcagcatgggccccctgaccggcagctacaacgtgaacatggccctggccggcggccccggccccggcggcggcggcggcagcagcggcggcgccggcgccctgagcgccgccggcgtgatcagagtgcccgcccacagacccctggccggcgccgtggcccacccccagcccctggccaccggcctgcccaccgtgcccagcgtgcccgccatgcccggcgtgaacaacctgaccggcctgaccttcccctggatggagagcaacagaagatacaccaaggacagattcaccggccacccctaccagaacagaaccccccccaagaagaagaagcccagaaccagcttcaccagactgcagatctgcgagctggagaagagattccacagacagaagtacctggccagcgccgagagagccgccctggccaaggccctgaagatgaccgacgcccaggtgaagacctggttccagaacagaagaaccaagtggagaagacagaccgccgaggagagagaggccgagagacagcaggccaacagaatcctgctgcagctgcagcaggaggccttccagaagagcctggcccagcccctgcccgccgaccccctgtgcgtgcacaacagcagcctgttcgccctgcagaacctgcagccctggagcgacgacagcaccaagatcaccagcgtgaccagcgtggccagcgcctgcgagtag

SEQ ID NO: 13102 - DNA, 774 bp, synthetic construct
  misc_feature 1..774: note = Description of Artificial Sequence: Synthetic coding sequence
  source 1..774: mol_type = other DNA
atggagcacctgggcccccaccacctgcaccccggccacgccgagcccatcagcttcggcatcgaccagatcctgaacagccccgaccagggcggctgcatgggccccgccagcagactgcaggacggcgagtacggcctgggctgcctggtgggcggcgcctacacctacggcggcggcggcagcgccgccgccaccggcgccggcggcgccggcgcctacggcaccggcggccccggcggccccggcggccccgccggcggcggcggcgcctgcagcatgggccccctgaccggcagctacaacgtgaacatggccctggccggcggccccggccccggcggcggcggcggcagcagcggcggcgccggcgccctgagcgccgccggcgtgatcagagtgcccgcccacagacccctggccggcgccgtggcccacccccagcccctggccaccggcctgcccaccgtgcccagcgtgcccgccatgcccggcgtgaacaacctgaccggcctgaccttcccctggatggagagcaacagaagatacaccaaggacagattcaccggccacccctaccagaacagaaccccccccaagaagaagaagcccagaaccagcttcaccagactgcagatctgcgagctggagaagagattccacagacagaagtacctggccagcgccgagagagccgccctggccaaggccctgaagatgaccgacgcccaggtgaagacctggttccagaacagaagaaccaagtggagatag

SEQ ID NO: 13103 - DNA, 345 bp, synthetic construct
  misc_feature 1..345: note = Description of Artificial Sequence: Synthetic coding sequence
  source 1..345: mol_type = other DNA
atggccgagtgccccaccctgggcgaggccgtgaccgaccaccccgacagactgtgggcctgggagaagttcgtgtacctggacgagaagcagcacgcctggctgcccctgaccatcgagatcaaggacagactgcagctgagagtgctgctgagaagagaggacgtggtgctgggcagacccatgacccccacccagatcggccccagcctgctgcccatcatgtggcagctgtaccccgacggcagatacagaagcagcgacagcagcttctggagactggtgtaccacatcaagatcgacggcgtggaggacatgctgctggagctgctgcccgacgactag

SEQ ID NO: 13104 - DNA, 345 bp, synthetic construct; identical to SEQ ID NO: 13103
  misc_feature 1..345: note = Description of Artificial Sequence: Synthetic coding sequence
  source 1..345: mol_type = other DNA

SEQ ID NO: 13105 - DNA, 345 bp, synthetic construct; identical to SEQ ID NO: 13103
  misc_feature 1..345: note = Description of Artificial Sequence: Synthetic coding sequence
  source 1..345: mol_type = other DNA

SEQ ID NO: 13106 - DNA, 345 bp, synthetic construct; identical to SEQ ID NO: 13103
  misc_feature 1..345: note = Description of Artificial Sequence: Synthetic coding sequence
  source 1..345: mol_type = other DNA

SEQ ID NO: 13107 - DNA, 1407 bp, synthetic construct
  misc_feature 1..1407: note = Description of Artificial Sequence: Synthetic coding sequence
  source 1..1407: mol_type = other DNA
atggacagcctggccagcctggtgctgtgcggcgtgagcctgctgctgagcggcaccgtggagggcgccatggacctgatcctgatcaacagcctgcccctggtgagcgacgccgagaccagcctgacctgcatcgccagcggctggagaccccacgagcccatcaccatcggcagagacttcgaggccctgatgaaccagcaccaggaccccctggaggtgacccaggacgtgaccagagagtgggccaagaaggtggtgtggaagagagagaaggccagcaagatcaacggcgcctacttctgcgagggcagagtgagaggcgaggccatcagaatcagaaccatgaagatgagacagcaggccagcttcctgcccgccaccctgaccatgaccgtggacaagggcgacaacgtgaacatcagcttcaagaaggtgctgatcaaggaggaggacgccgtgatctacaagaacggcagcttcatccacagcgtgcccagacacgaggtgcccgacatcctggaggtgcacctgccccacgcccagccccaggacgccggcgtgtacagcgccagatacatcggcggcaacctgttcaccagcgccttcaccagactgatcgtgagaagatgcgaggcccagaagtggggccccgagtgcaaccacctgtgcaccgcctgcatgaacaacggcgtgtgccacgaggacaccggcgagtgcatctgcccccccggcttcatgggcagaacctgcgagaaggcctgcgagctgcacaccttcggcagaacctgcaaggagagatgcagcggccaggagggctgcaagagctacgtgttctgcctgcccgacccctacggctgcagctgcgccaccggctggaagggcctgcagtgcaacgagggcatccagagaatgacccccaagatcgtggacctgcccgaccacatcgaggtgaacagcggcaagttcaaccccatctgcaaggccagcggctggcccctgcccaccaacgaggagatgaccctggtgaagcccgacggcaccgtgctgcaccccaaggacttcaaccacaccgaccacttcagcgtggccatcttcaccatccacagaatcctgccccccgacagcggcgtgtgggtgtgcagcgtgaacaccgtggccggcatggtggagaagcccttcaacatcagcgtgaaggtgctgcccaagcccctgaacgcccccaacgtgatcgacaccggccacaacttcgccgtgatcaacatcagcagcgagccctacttcggcgacggccccatcaagagcaagaagctgctgtacaagcccgtgaaccactacgaggcctggcagcacatccaggtgagcatggagaagcagagactgaccaaggccaacagcgacatctag

SEQ ID NO: 13108 - DNA, 3375 bp, synthetic construct
  misc_feature 1..3375: note = Description of Artificial Sequence: Synthetic coding sequence
  source 1..3375: mol_type = other DNA
atggacagcctggccagcctggtgctgtgcggcgtgagcctgctgctgagcggcaccgtggagggcgccatggacctgatcctgatcaacagcctgcccctggtgagcgacgccgagaccagcctgacctgcatcgccagcggctggagaccccacgagcccatcaccatcggcagagacttcgaggccctgatgaaccagcaccaggaccccctggaggtgacccaggacgtgaccagagagtgggccaagaaggtggtgtggaagagagagaaggccagcaagatcaacggcgcctacttctgcgagggcagagtgagaggcgaggccatcagaatcagaaccatgaagatgagacagcaggccagcttcctgcccgccaccctgaccatgaccgtggacaagggcgacaacgtgaacatcagcttcaagaaggtgctgatcaaggaggaggacgccgtgatctacaagaacggcagcttcatccacagcgtgcccagacacgaggtgcccgacatcctggaggtgcacctgccccacgcccagccccaggacgccggcgtgtacagcgccagatacatcggcggcaacctgttcaccagcgccttcaccagactgatcgtgagaagatgcgaggcccagaagtggggccccgagtgcaaccacctgtgcaccgcctgcatgaacaacggcgtgtgccacgaggacaccggcgagtgcatctgcccccccggcttcatgggcagaacctgcgagaaggcctgcgagctgcacaccttcggcagaacctgcaaggagagatgcagcggccaggagggctgcaagagctacgtgttctgcctgcccgacccctacggctgcagctgcgccaccggctggaagggcctgcagtgcaacgaggcctgccaccccggcttctacggccccgactgcaagctgagatgcagctgcaacaacggcgagatgtgcgacagattccagggctgcctgtgcagccccggctggcagggcctgcagtgcgagagagagggcatccagagaatgacccccaagatcgtggacctgcccgaccacatcgaggtgaacagcggcaagttcaaccccatctgcaaggccagcggctggcccctgcccaccaacgaggagatgaccctggtgaagcccgacggcaccgtgctgcaccccaaggacttcaaccacaccgaccacttcagcgtggccatcttcaccatccacagaatcctgccccccgacagcggcgtgtgggtgtgcagcgtgaacaccgtggccggcatggtggagaagcccttcaacatcagcgtgaaggtgctgcccaagcccctgaacgcccccaacgtgatcgacaccggccacaacttcgccgtgatcaacatcagcagcgagccctacttcggcgacggccccatcaagagcaagaagctgctgtacaagcccgtgaaccactacgaggcctggcagcacatccaggtgaccaacgagatcgtgaccctgaactacctggagcccagaaccgagtacgagctgtgcgtgcagctggtgagaagaggcgagggcggcgagggccaccccggccccgtgagaagattcaccaccgccagcatcggcctgcccccccccagaggcctgaacctgctgcccaagagccagaccaccctgaacctgacctggcagcccatcttccccagcagcgaggacgacttctacgtggaggtggagagaagaagcgtgcagaagagcgaccagcagaacatcaaggtgcccggcaacctgaccagcgtgctgctgaacaacctgcaccccagagagcagtacgtggtgagagccagagtgaacaccaaggcccagggcgagtggagcgaggacctgaccgcctggaccctgagcgacatcctgcccccccagcccgagaacatcaagatcagcaacatcacccacagcagcgccgtgatcagctggaccatcctggacggctacagcatcagcagcatcaccatcagatacaaggtgcagggcaagaacgaggaccagcacgtggacgtgaagatcaagaacgccaccatcacccagtaccagctgaagggcctggagcccgagaccgcctaccaggtggacatcttcgccgagaacaacatcggcagcagcaaccccgccttcagccacgagctggtgaccctgcccgagagccaggcccccgccgacctgggcggcggcaagatgctgctgatcgccatcctgggcagcgccggcatgacctgcctgaccgtgctgctggccttcctgatcatcctgcagctgaagagagccaacgtgcagagaagaatggcccaggccttccagaacgtgagagaggagcccgccgtgcagttcaacagcggcaccctggccctgaacagaaaggtgaagaacaaccccgaccccaccatctaccccgtgctggactggaacgacatcaagttccaggacgtgatcggcgagggcaacttcggccaggtgctgaaggccagaatcaagaaggacggcctgagaatggacgccgccatcaagagaatgaaggagtacgccagcaaggacgaccacagagacttcgccggcgagctggaggtgctgtgcaagctgggccaccaccccaacatcatcaacctgctgggcgcctgcgagcacagaggctacctgtacctggccatcgagtacgccccccacggcaacctgctggacttcctgagaaagagcagagtgctggagaccgaccccgccttcgccatcgccaacagcaccgccagcaccctgagcagccagcagctgctgcacttcgccgccgacgtggccagaggcatggactacctgagccagaagcagttcatccacagagacctggccgccagaaacatcctggtgggcgagaactacgtggccaagatcgccgacttcggcctgagcagaggccaggaggtgtacgtgaagaagaccatgggcagactgcccgtgagatggatggccatcgagagcctgaactacagcgtgtacaccaccaacagcgacgtgtggagctacggcgtgctgctgtgggagatcgtgagcctgggcggcaccccctactgcggcatgacctgcgccgagctgtacgagaagctgccccagggctacagactggagaagcccctgaactgcgacgacgaggtgtacgacctgatgagacagtgctggagagagaagccctacgagagacccagcttcgcccagatcctggtgagcctgaacagaatgctggaggagagaaagacctacgtgaacaccaccctgtacgagaagttcacctacgccggcatcgactgcagcgccgaggaggccgcctag

SEQ ID NO: 13109 - DNA, 3246 bp, synthetic construct
  misc_feature 1..3246: note = Description of Artificial Sequence: Synthetic coding sequence
  source 1..3246: mol_type = other DNA
atggacagcctggccagcctggtgctgtgcggcgtgagcctgctgctgagcggcaccgtggagggcgccatggacctgatcctgatcaacagcctgcccctggtgagcgacgccgagaccagcctgacctgcatcgccagcggctggagaccccacgagcccatcaccatcggcagagacttcgaggccctgatgaaccagcaccaggaccccctggaggtgacccaggacgtgaccagagagtgggccaagaaggtggtgtggaagagagagaaggccagcaagatcaacggcgcctacttctgcgagggcagagtgagaggcgaggccatcagaatcagaaccatgaagatgagacagcaggccagcttcctgcccgccaccctgaccatgaccgtggacaagggcgacaacgtgaacatcagcttcaagaaggtgctgatcaaggaggaggacgccgtgatctacaagaacggcagcttcatccacagcgtgcccagacacgaggtgcccgacatcctggaggtgcacctgccccacgcccagccccaggacgccggcgtgtacagcgccagatacatcggcggcaacctgttcaccagcgccttcaccagactgatcgtgagaagatgcgaggcccagaagtggggccccgagtgcaaccacctgtgcaccgcctgcatgaacaacggcgtgtgccacgaggacaccggcgagtgcatctgcccccccggcttcatgggcagaacctgcgagaaggcctgcgagctgcacaccttcggcagaacctgcaaggagagatgcagcggccaggagggctgcaagagctacgtgttctgcctgcccgacccctacggctgcagctgcgccaccggctggaagggcctgcagtgcaacgagggcatccagagaatgacccccaagatcgtggacctgcccgaccacatcgaggtgaacagcggcaagttcaaccccatctgcaaggccagcggctggcccctgcccaccaacgaggagatgaccctggtgaagcccgacggcaccgtgctgcaccccaaggacttcaaccacaccgaccacttcagcgtggccatcttcaccatccacagaatcctgccccccgacagcggcgtgtgggtgtgcagcgtgaacaccgtggccggcatggtggagaagcccttcaacatcagcgtgaaggtgctgcccaagcccctgaacgcccccaacgtgatcgacaccggccacaacttcgccgtgatcaacatcagcagcgagccctacttcggcgacggccccatcaagagcaagaagctgctgtacaagcccgtgaaccactacgaggcctggcagcacatccaggtgaccaacgagatcgtgaccctgaactacctggagcccagaaccgagtacgagctgtgcgtgcagctggtgagaagaggcgagggcggcgagggccaccccggccccgtgagaagattcaccaccgccagcatcggcctgcccccccccagaggcctgaacctgctgcccaagagccagaccaccctgaacctgacctggcagcccatcttccccagcagcgaggacgacttctacgtggaggtggagagaagaagcgtgcagaagagcgaccagcagaacatcaaggtgcccggcaacctgaccagcgtgctgctgaacaacctgcaccccagagagcagtacgtggtgagagccagagtgaacaccaaggcccagggcgagtggagcgaggacctgaccgcctggaccctgagcgacatcctgcccccccagcccgagaacatcaagatcagcaacatcacccacagcagcgccgtgatcagctggaccatcctggacggctacagcatcagcagcatcaccatcagatacaaggtgcagggcaagaacgaggaccagcacgtggacgtgaagatcaagaacgccaccatcacccagtaccagctgaagggcctggagcccgagaccgcctaccaggtggacatcttcgccgagaacaacatcggcagcagcaaccccgccttcagccacgagctggtgaccctgcccgagagccaggcccccgccgacctgggcggcggcaagatgctgctgatcgccatcctgggcagcgccggcatgacctgcctgaccgtgctgctggccttcctgatcatcctgcagctgaagagagccaacgtgcagagaagaatggcccaggccttccagaacgtgagagaggagcccgccgtgcagttcaacagcggcaccctggccctgaacagaaaggtgaagaacaaccccgaccccaccatctaccccgtgctggactggaacgacatcaagttccaggacgtgatcggcgagggcaacttcggccaggtgctgaaggccagaatcaagaaggacggcctgagaatggacgccgccatcaagagaatgaaggagtacgccagcaaggacgaccacagagacttcgccggcgagctggaggtgctgtgcaagctgggccaccaccccaacatcatcaacctgctgggcgcctgcgagcacagaggctacctgtacctggccatcgagtacgccccccacggcaacctgctggacttcctgagaaagagcagagtgctggagaccgaccccgccttcgccatcgccaacagcaccgccagcaccctgagcagccagcagctgctgcacttcgccgccgacgtggccagaggcatggactacctgagccagaagcagttcatccacagagacctggccgccagaaacatcctggtgggcgagaactacgtggccaagatcgccgacttcggcctgagcagaggccaggaggtgtacgtgaagaagaccatgggcagactgcccgtgagatggatggccatcgagagcctgaactacagcgtgtacaccaccaacagcgacgtgtggagctacggcgtgctgctgtgggagatcgtgagcctgggcggcaccccctactgcggcatgacctgcgccgagctgtacgagaagctgccccagggctacagactggagaagcccctgaactgcgacgacgaggtgtacgacctgatgagacagtgctggagagagaagccctacgagagacccagcttcgcccagatcctggtgagcctgaacagaatgctggaggagagaaagacctacgtgaacaccaccctgtacgagaagttcacctacgccggcatcgactgcagcgccgaggaggccgcctag

SEQ ID NO: 13110 - DNA, 3375 bp, synthetic construct; identical to SEQ ID NO: 13108
  misc_feature 1..3375: note = Description of Artificial Sequence: Synthetic coding sequence
  source 1..3375: mol_type = other DNA

SEQ ID NO: 13111 - DNA, 2931 bp, synthetic construct
  misc_feature 1..2931: note = Description of Artificial Sequence: Synthetic coding sequence
  source 1..2931: mol_type = other DNA
atggacagcctggccagcctggtgctgtgcggcgtgagcctgctgctgagcgccagcttcctgcccgccaccctgaccatgaccgtggacaagggcgacaacgtgaacatcagcttcaagaaggtgctgatcaaggaggaggacgccgtgatctacaagaacggcagcttcatccacagcgtgcccagacacgaggtgcccgacatcctggaggtgcacctgccccacgcccagccccaggacgccggcgtgtacagcgccagatacatcggcggcaacctgttcaccagcgccttcaccagactgatcgtgagaagatgcgaggcccagaagtggggccccgagtgcaaccacctgtgcaccgcctgcatgaacaacggcgtgtgccacgaggacaccggcgagtgcatctgcccccccggcttcatgggcagaacctgcgagaaggcctgcgagctgcacaccttcggcagaacctgcaaggagagatgcagcggccaggagggctgcaagagctacgtgttctgcctgcccgacccctacggctgcagctgcgccaccggctggaagggcctgcagtgcaacgagggcatccagagaatgacccccaagatcgtggacctgcccgaccacatcgaggtgaacagcggcaagttcaaccccatctgcaaggccagcggctggcccctgcccaccaacgaggagatgaccctggtgaagcccgacggcaccgtgctgcaccccaaggacttcaaccacaccgaccacttcagcgtggccatcttcaccatccacagaatcctgccccccgacagcggcgtgtgggtgtgcagcgtgaacaccgtggccggcatggtggagaagcccttcaacatcagcgtgaaggtgctgcccaagcccctgaacgcccccaacgtgatcgacaccggccacaacttcgccgtgatcaacatcagcagcgagccctacttcggcgacggccccatcaagagcaagaagctgctgtacaagcccgtgaaccactacgaggcctggcagcacatccaggtgaccaacgagatcgtgaccctgaactacctggagcccagaaccgagtacgagctgtgcgtgcagctggtgagaagaggcgagggcggcgagggccaccccggccccgtgagaagattcaccaccgccagcatcggcctgcccccccccagaggcctgaacctgctgcccaagagccagaccaccctgaacctgacctggcagcccatcttccccagcagcgaggacgacttctacgtggaggtggagagaagaagcgtgcagaagagcgaccagcagaacatcaaggtgcccggcaacctgaccagcgtgctgctgaacaacctgcaccccagagagcagtacgtggtgagagccagagtgaacaccaaggcccagggcgagtggagcgaggacctgaccgcctggaccctgagcgacatcctgcccccccagcccgagaacatcaagatcagcaacatcacccacagcagcgccgtgatcagctggaccatcctggacggctacagcatcagcagcatcaccatcagatacaaggtgcagggcaagaacgaggaccagcacgtggacgtgaagatcaagaacgccaccatcacccagtaccagctgaagggcctggagcccgagaccgcctaccaggtggacatcttcgccgagaacaacatcggcagcagcaaccccgccttcagccacgagctggtgaccctgcccgagagccaggcccccgccgacctgggcggcggcaagatgctgctgatcgccatcctgggcagcgccggcatgacctgcctgaccgtgctgctggccttcctgatcatcctgcagctgaagagagccaacgtgcagagaagaatggcccaggccttccagaacagagaggagcccgccgtgcagttcaacagcggcaccctggccctgaacagaaaggtgaagaacaaccccgaccccaccatctaccccgtgctggactggaacgacatcaagttccaggacgtgatcggcgagggcaacttcggccaggtgctgaaggccagaatcaagaaggacggcctgagaatggacgccgccatcaagagaatgaaggagtacgccagcaaggacgaccacagagacttcgccggcgagctggaggtgctgtgcaagctgggccaccaccccaacatcatcaacctgctgggcgcctgcgagcacagaggctacctgtacctggccatcgagtacgccccccacggcaacctgctggacttcctgagaaagagcagagtgctggagaccgaccccgccttcgccatcgccaacagcaccgccagcaccctgagcagccagcagctgctgcacttcgccgccgacgtggccagaggcatggactacctgagccagaagcagttcatccacagagacctggccgccagaaacatcctggtgggcgagaactacgtggccaagatcgccgacttcggcctgagcagaggccaggaggtgtacgtgaagaagaccatgggcagactgcccgtgagatggatggccatcgagagcctgaactacagcgtgtacaccaccaacagcgacgtgtggagctacggcgtgctgctgtgggagatcgtgagcctgggcggcaccccctactgcggcatgacctgcgccgagctgtacgagaagctgccccagggctacagactggagaagcccctgaactgcgacgacgaggtgtacgacctgatgagacagtgctggagagagaagccctacgagagacccagcttcgcccagatcctggtgagcctgaacagaatgctggaggagagaaagacctacgtgaacaccaccctgtacgagaagttcacctacgccggcatcgactgcagcgccgaggaggccgcctag

SEQ ID NO: 13112 - DNA, 7884 bp, synthetic construct
  misc_feature 1..7884: note = Description of Artificial Sequence: Synthetic coding sequence
  source 1..7884: mol_type = other DNA
atggagaagctgcacggccacgtgagcgcccaccccgacatcctgagcctggagaacagatgcctggccatgctgcccgacctgcagcccctggagaagctgcaccagcacgtgagcacccacagcgacatcctgagcctgaagaaccagtgcctggccaccctgcccgacctgaagaccatggagaagccccacggctacgtgagcgcccaccccgacatcctgagcctggagaaccagtgcctggccaccctgagcgacctgaagaccatggagaagccccacggccacgtgagcgcccaccccgacatcctgagcctggagaacagatgcctggccaccctgagcagcctgaagagcaccgtgagcgccagccccctgttccagagcctgcagatcagccacatgacccaggccgacctgtacagagtgaacaacagcaactgcctgctgagcgagccccccagctggagagcccagcacttcagcaagggcctggacctgagcacctgccccatcgccctgaagagcatcagcgccaccgagaccgcccaggaggccaccctgggcagatggttcgacagcgaggagaagaagggcgccgagacccagatgcccagctacagcctgagcctgggcgaggaggaggaggtggaggacctggccgtgaagctgaccagcggcgacagcgagagccaccccgagcccaccgaccacgtgctgcaggagaagaagatggccctgctgagcctgctgtgcagcaccctggtgagcgaggtgaacatgaacaacaccagcgaccccaccctggccgccatcttcgagatctgcagagagctggccctgctggagcccgagttcatcctgaaggccagcctgtacgccagacagcagctgaacgtgagaaacgtggccaacaacatcctggccatcgccgccttcctgcccgcctgcagaccccacctgagaagatacttctgcgccatcgtgcagctgcccagcgactggatccaggtggccgagctgtaccagagcctggccgagggcgacaagaacaagctggtgcccctgcccgcctgcctgagaaccgccatgaccgacaagttcgcccagttcgacgagtaccagctggccaagtacaaccccagaaagcacagagccaagagacaccccagaagaccccccagaagccccggcatggagccccccttcagccacagatgcttccccagatacatcggcttcctgagagaggagcagagaaagttcgagaaggccggcgacaccgtgagcgagaagaagaacccccccagattcaccctgaagaagctggtgcagagactgcacatccacaagcccgcccagcacgtgcaggccctgctgggctacagataccccagcaacctgcagctgttcagcagaagcagactgcccggcccctgggacagcagcagagccggcaagagaatgaagctgagcagacccgagacctgggagagagagctgagcctgagaggcaacaaggccagcgtgtgggaggagctgatcgagaacggcaagctgcccttcatggccatgctgagaaacctgtgcaacctgctgagagtgggcatcagcagcagacaccacgagctgatcctgcagagactgcagcacgccaagagcgtgatccacagcagacagttccccttcagattcctgaacgcccacgacgccatcgacgccctggaggcccagctgagaaaccaggccctgcccttccccagcaacatcaccctgatgagaagaatcctgaccagaaacgagaagaacagacccagaagaagattcctgtgccacctgagcagacagcagctgagaatggccatgagaatccccgtgctgtacgagcagctgaagagagagaagctgagagtgcacaaggccagacagtggaagtacgacggcgagatgctgaacagatacagacaggccctggagaccgccgtgaacctgagcgtgaagcacagcctgcccctgctgcccggcagaaccgtgctggtgtacctgaccgacgccaacgccgacagactgtgccccaagagcaacccccagggcccccccctgaactacgccctgctgctgatcggcatgatgatcaccagagccgagcaggtggacgtggtgctgtgcggcggcgacaccctgaagaccgccgtgctgaaggccgaggagggcatcctgaagaccgccatcaagctgcaggcccaggtgcaggagttcgacgagaacgacggctggagcctgaacaccttcggcaagtacctgctgagcctggccggccagagagtgcccgtggacagagtgatcctgctgggccagagcatggacgacggcatgatcaacgtggccaagcagctgtactggcagagagtgaacagcaagtgcctgttcgtgggcatcctgctgagaagagtgcagtacctgagcaccgacctgaaccccaacgacgtgaccctgagcggctgcaccgacgccatcctgaagttcatcgccgagcacggcgccagccacctgctggagcacgtgggccagatggacaagatcttcaagatcccccccccccccggcaagaccggcgtgcagagcctgagacccctggaggaggacacccccagccccctggcccccgtgagccagcagggctggagaagcatcagactgttcatcagcagcaccttcagagacatgcacggcgagagagacctgctgctgagaagcgtgctgcccgccctgcaggccagagccgccccccacagaatcagcctgcacggcatcgacctgagatggggcgtgaccgaggaggagaccagaagaaacagacagctggaggtgtgcctgggcgaggtggagaacgcccagctgttcgtgggcatcctgggcagcagatacggctacatcccccccagctacaacctgcccgaccacccccacttccactgggcccagcagtaccccagcggcagaagcgtgaccgagatggaggtgatgcagttcctgaacagaaaccagagactgcagcccagcgcccaggccctgatctacttcagagacagcagcttcctgagcagcgtgcccgacgcctggaagagcgacttcgtgagcgagagcgaggaggccgccagaagaatcagcgagctgaagagctacctgagcagacagaagggcatcacctgcagaagatacccctgcgagtggggcggcgtggccgccggcagaccctacgtgggcggcctggaggagttcggccagctggtgctgcaggacgtgtggaacatgatccagaagctgtacctgcagcccggcgccctgctggagcagcccgtgagcatccccgacgacgacctggtgcaggccaccttccagcagctgcagaagccccccagccccgccagacccagactgctgcaggacaccgtgcagagactgatgctgccccacggcagactgagcctggtgaccggccagagcggccagggcaagaccgccttcctggccagcctggtgagcgccctgcaggcccccgacggcgccaaggtggccagcctggtgttcttccacttcagcggcgccagacccgaccagggcctggccctgaccctgctgagaagactgtgcacctacctgagaggccagctgaaggagcccggcgccctgcccagcacctacagaagcctggtgtgggagctgcagcagagactgctgcccaagagcgccgagagcctgcaccccggccagacccaggtgctgatcatcgacggcgccgacagactggtggaccagaacggccagctgatcagcgactggatccccaagaagctgcccagatgcgtgcacctggtgctgagcgtgagcagcgacgccggcctgggcgagaccctggagcagagccagggcgcccacgtgctggccctgggccccctggaggccagcgccagagccagactggtgagagaggagctggccctgtacggcaagagactggaggagagccccttcaacaaccagatgagactgctgctggtgaagagagagagcggcagacccctgtacctgagactggtgaccgaccacctgagactgttcaccctgtacgagcaggtgagcgagagactgagaaccctgcccgccaccgtgcccctgctgctgcagcacatcctgagcaccctggagaaggagcacggccccgacgtgctgccccaggccctgaccgccctggaggtgaccagaagcggcctgaccgtggaccagctgcacggcgtgctgagcgtgtggagaaccctgcccaagggcaccaagagctgggaggaggccgtggccgccggcaacagcggcgacccctaccccatgggccccttcgcctgcctggtgcagagcctgagaagcctgctgggcgagggccccctggagagacccggcgccagactgtgcctgcccgacggccccctgagaaccgccgccaagagatgctacggcaagagacccggcctggaggacaccgcccacatcctgatcgccgcccagctgtggaagacctgcgacgccgacgccagcggcaccttcagaagctgcccccccgaggccctgggcgacctgccctaccacctgctgcagagcggcaacagaggcctgctgagcaagttcctgaccaacctgcacgtggtggccgcccacctggagctgggcctggtgagcagactgctggaggcccacgccctgtacgccagcagcgtgcccaaggaggagcagaagctgcccgaggccgacgtggccgtgttcagaaccttcctgagacagcaggccagcatcctgagccagtaccccagactgctgccccagcaggccgccaaccagcccctggacagccccctgtgccaccaggccagcctgctgagcagaagatggcacctgcagcacaccctgagatggctgaacaagcccagaaccatgaagaaccagcagagcagcagcctgagcctggccgtgagcagcagccccaccgccgtggccttcagcaccaacggccagagagccgccgtgggcaccgccaacggcaccgtgtacctgctggacctgagaacctggcaggaggagaagagcgtggtgagcggctgcgacggcatcagcgcctgcctgttcctgagcgacgacaccctgttcctgaccgccttcgacggcctgctggagctgtgggacctgcagcacggctgcagagtgctgcagaccaaggcccaccagtaccagatcaccggctgctgcctgagccccgactgcagactgctggccaccgtgtgcctgggcggctgcctgaagctgtgggacaccgtgagaggccagctggccttccagcacacctaccccaagagcctgaactgcgtggccttccaccccgagggccaggtgatcgccaccggcagctgggccggcagcatcagcttcttccaggtggacggcctgaaggtgaccaaggacctgggcgcccccggcgccagcatcagaaccctggccttcaacgtgcccggcggcgtggtggccgtgggcagactggacagcatggtggagctgtgggcctggagagagggcgccagactggccgccttccccgcccaccacggcttcgtggccgccgccctgttcctgcacgccggctgccagctgctgaccgccggcgaggacggcaaggtgcaggtgtggagcggcagcctgggcagacccagaggccacctgggcagcctgagcctgagccccgccctgagcgtggccctgagccccgacggcgacagagtggccgtgggctacagagccgacggcatcagaatctacaagatcagcagcggcagccagggcgcccagggccaggccctggacgtggccgtgagcgccctggcctggctgagccccaaggtgctggtgagcggcgccgaggacggcagcctgcagggctgggccctgaaggagtgcagcctgcagagcctgtggctgctgagcagattccagaagcccgtgctgggcctggccaccagccaggagctgctggccagcgccagcgaggacttcaccgtgcagctgtggcccagacagctgctgaccagaccccacaaggccgaggacttcccctgcggcaccgagctgagaggccacgagggccccgtgagctgctgcagcttcagcaccgacggcggcagcctggccaccggcggcagagacagaagcctgctgtgctgggacgtgagaacccccaagacccccgtgctgatccacagcttccccgcctgccacagagactgggtgaccggctgcgcctggaccaaggacaacctgctgatcagctgcagcagcgacggcagcgtgggcctgtgggaccccgagagcggccagagactgggccagttcctgggccaccagagcgccgtgagcgccgtggccgccgtggaggagcacgtggtgagcgtgagcagagacggcaccctgaaggtgtgggaccaccagggcgtggagctgaccagcatccccgcccacagcggccccatcagccactgcgccgccgccatggagcccagagccgccggccagcccggcagcgagctgctggtggtgaccgtgggcctggacggcgccaccagactgtggcaccccctgctggtgtgccagacccacaccctgctgggccacagcggccccgtgagagccgccgccgtgagcgagaccagcggcctgatgctgaccgccagcgaggacggcagcgtgagactgtggcaggtgcccaaggaggccgacgacacctgcatccccagaagcagcgccgccgtgaccgccgtggcctgggcccccgacggcagcatggccgtgagcggcaaccaggccggcgagctgatcctgtggcaggaggccaaggccgtggccaccgcccaggcccccggccacatcggcgccctgatctggagcagcgcccacaccttcttcgtgctgagcgccgacgagaagatcagcgagtggcaggtgaagctgagaaagggcagcgcccccggcaacctgagcctgcacctgaacagaatcctgcaggaggacctgggcgtgctgaccagcctggactgggcccccgacggccacttcctgatcctggccaaggccgacctgaagctgctgtgcatgaagcccggcgacgcccccagcgagatctggagcagctacaccgagaaccccatgatcctgagcacccacaaggagtacggcatcttcgtgctgcagcccaaggaccccggcgtgctgagcttcctgagacagaaggagagcggcgagttcgaggagagactgaacttcgacatcaacctggagaaccccagcagaaccctgatcagcatcacccaggccaagcccgagagcgagagcagcttcctgtgcgccagcagcgacggcatcctgtggaacctggccaagtgcagccccgagggcgagtggaccaccggcaacatgtggcagaagaaggccaacacccccgagacccagacccccggcaccgaccccagcacctgcagagagagcgacgccagcatggacagcgacgccagcatggacagcgagcccaccccccacctgaagaccagacagagaagaaagatccacagcggcagcgtgaccgccctgcacgtgctgcccgagctgctggtgaccgccagcaaggacagagacgtgaagctgtgggagagacccagcatgcagctgctgggcctgttcagatgcgagggcagcgtgagctgcctggagccctggctgggcgccaacagcaccctgcagctggccgtgggcgacgtgcagggcaacgtgtacttcctgaactgggagtag

SEQ ID NO: 13113 - DNA, 7860 bp, synthetic construct
  misc_feature 1..7860: note = Description of Artificial Sequence: Synthetic coding sequence
  source 1..7860: mol_type = other DNA
atggagaagctgcacggccacgtgagcgcccaccccgacatcctgagcctggagaacagatgcctggccatgctgcccgacctgcagcccctggagaagctgcaccagcacgtgagcacccacagcgacatcctgagcctgaagaaccagtgcctggccaccctgcccgacctgaagaccatggagaagccccacggctacgtgagcgcccaccccgacatcctgagcctggagaaccagtgcctggccaccctgagcgacctgaagaccatggagaagccccacggccacgtgagcgcccaccccgacatcctgagcctggagaacagatgcctggccaccctgagcagcctgaagagcaccgtgagcgccagccccctgttccagagcctgcagatcagccacatgacccaggccgacctgtacagagtgaacaacagcaactgcctgctgagcgagccccccagctggagagcccagcacttcagcaagggcctggacctgagcacctgccccatcgccctgaagagcatcagcgccaccgagaccgcccaggaggccaccctgggcagatggttcgacagcgaggagaagaagggcgccgagacccagatgcccagctacagcctgagcctgggcgaggaggaggaggtggaggacctggccgtgaagctgaccagcggcgacagcgagagccaccccgagcccaccgaccacgtgctgcaggagaagaagatggccctgctgagcctgctgtgcagcaccctggtgagcgaggtgaacatgaacaacaccagcgaccccaccctggccgccatcttcgagatctgcagagagctggccctgctggagcccgagttcatcctgaaggccagcctgtacgccagacagcagctgaacgtgagaaacgtggccaacaacatcctggccatcgccgccttcctgcccgcctgcagaccccacctgagaagatacttctgcgccatcgtgcagctgcccagcgactggatccaggtggccgagctgtaccagagcctggccgagggcgacaagaacaagctggtgcccctgcccgcctgcctgagaaccgccatgaccgacaagttcgcccagttcgacgagtaccagctggccaagtacaaccccagaaagcacagagccaagagacaccccagaagaccccccagaagccccggcatggagccccccttcagccacagatgcttccccagatacatcggcttcctgagagaggagcagagaaagttcgagaaggccggcgacaccgtgagcgagaagaagaacccccccagattcaccctgaagaagctggtgcagagactgcacatccacaagcccgcccagcacgtgcaggccctgctgggctacagataccccagcaacctgcagctgttcagcagaagcagactgcccggcccctgggacagcagcagagccggcaagagaatgaagctgagcagacccgagacctgggagagagagctgagcctgagaggcaacaaggccagcgtgtgggaggagctgatcgagaacggcaagctgcccttcatggccatgctgagaaacctgtgcaacctgctgagagtgggcatcagcagcagacaccacgagctgatcctgcagagactgcagcacgccaagagcgtgatccacagcagacagttccccttcagattcctgaacgcccacgacgccatcgacgccctggaggcccagctgagaaaccaggccctgcccttccccagcaacatcaccctgatgagaagaatcctgaccagaaacgagaagaacagacccagaagaagattcctgtgccacctgagcagacagcagctgagaatggccatgagaatccccgtgctgtacgagcagctgaagagagagaagctgagagtgcacaaggccagacagtggaagtacgacggcgagatgctgaacagatacagacaggccctggagaccgccgtgaacctgagcgtgaagcacagcctgcccctgctgcccggcagaaccgtgctggtgtacctgaccgacgccaacgccgacagactgtgccccaagagcaacccccagggcccccccctgaactacgccctgctgctgatcggcatgatgatcaccagagccgagcaggtggacgtggtgctgtgcggcggcgacaccctgaagaccgccgtgctgaaggccgaggagggcatcctgaagaccgccatcaagctgcaggcccaggtgcaggagttcgacgagaacgacggctggagcctgaacaccttcggcaagtacctgctgagcctggccggccagagagtgcccgtggacagagtgatcctgctgggccagagcatggacgacggcatgatcaacgtggccaagcagctgtactggcagagagtgaacagcaagtgcctgttcgtgggcatcctgctgagaagagtgcagtacctgagcaccgacctgaaccccaacgacgtgaccctgagcggctgcaccgacgccatcctgaagttcatcgccgagcacggcgccagccacctgctggagcacgtgggccagatggacaagatcttcaagatcccccccccccccggcaagaccggcgtgcagagcctgagacccctggaggaggacacccccagccccctggcccccgtgagccagcagggctggagaagcatcagactgttcatcagcagcaccttcagagacatgcacggcgagagagacctgctgctgagaagcgtgctgcccgccctgcaggccagagccgccccccacagaatcagcctgcacggcatcgacctgagatggggcgtgaccgaggaggagaccagaagaaacagacagctggaggtgtgcctgggcgaggtggagaacgcccagctgttcgtgggcatcctgggcagcagatacggctacatcccccccagctacaacctgcccgaccacccccacttccactgggcccagcagtaccccagcggcagaagcgtgaccgagatggaggtgatgcagttcctgaacagaaaccagagactgcagcccagcgcccaggccctgatctacttcagagacagcagcttcctgagcagcgtgcccgacgcctggaagagcgacttcgtgagcgagagcgaggaggccgccagaagaatcagcgagctgaagagctacctgagcagacagaagggcatcacctgcagaagatacccctgcgagtggggcggcgtggccgccggcagaccctacgtgggcggcctggaggagttcggccagctggtgctgcaggacgtgtggaacatgatccagaagctgtacctgcagcccggcgccctgctggagcagcccgtgagcatccccgacgacgacctggtgcaggccaccttccagcagctgcagaagccccccagccccgccagacccagactgctgcaggacaccgtgcagagactgatgctgccccacggcagactgagcctggtgaccggccagagcggccagggcaagaccgccttcctggccagcctggtgagcgccctgcaggcccccgacggcgccaaggtggccagcctggtgttcttccacttcagcggcgccagacccgaccagggcctggccctgaccctgctgagaagactgtgcacctacctgagaggccagctgaaggagcccggcgccctgcccagcacctacagaagcctggtgtgggagctgcagcagagactgctgcccaagagcgccgagagcctgcaccccggccagacccaggtgctgatcatcgacggcgccgacagactggtggaccagaacggccagctgatcagcgactggatccccaagaagctgcccagatgcgtgcacctggtgctgagcgtgagcagcgacgccggcctgggcgagaccctggagcagagccagggcgcccacgtgctggccctgggccccctggaggccagcgccagagccagactggtgagagaggagctggccctgtacggcaagagactggaggagagccccttcaacaaccagatgagactgctgctggtgaagagagagagcggcagacccctgtacctgagactggtgaccgaccacctgagactgttcaccctgtacgagcaggtgagcgagagactgagaaccctgcccgccaccgtgcccctgctgctgcagcacatcctgagcaccctggagaaggagcacggccccgacgtgctgccccaggccctgaccgccctggaggtgaccagaagcggcctgaccgtggaccagctgcacggcgtgctgagcgtgtggagaaccctgcccaagggcaccaagagctgggaggaggccgtggccgccggcaacagcggcgacccctaccccatgggccccttcgcctgcctggtgcagagcctgagaagcctgctgggcgagggccccctggagagacccggcgccagactgtgcctgcccgacggccccctgagaaccgccgccaagagatgctacggcaagagacccggcctggaggacaccgcccacatcctgatcgccgcccagctgtggaagacctgcgacgccgacgccagcggcaccttcagaagctgcccccccgaggccctgggcgacctgccctaccacctgctgcagagcggcaacagaggcctgctgagcaagttcctgaccaacctgcacgtggtggccgcccacctggagctgggcctggtgagcagactgctggaggcccacgccctgtacgccagcagcgtgcccaaggaggagcagaagctgcccgaggccgacgtggccgtgttcagaaccttcctgagacagcaggccagcatcctgagccagtaccccagactgctgccccagcaggccgccaaccagcccctggacagccccctgtgccaccaggccagcctgctgagcagaagatggcacctgcagcacaccctgagatggctgaacaagcccagaaccatgaagaaccagcagagcagcagcctgagcctggccgtgagcagcagccccaccgccgtggccttcagcaccaacggccagagagccgccgtgggcaccgccaacggcaccgtgtacctgctggacctgagaacctggcaggaggagaagagcgtggtgagcggctgcgacggcatcagcgcctgcctgttcctgagcgacgacaccctgttcctgaccgccttcgacggcctgctggagctgtgggacctgcagcacggctgcagagtgctgcagaccaaggcccaccagtaccagatcaccggctgctgcctgagccccgactgcagactgctggccaccgtgtgcctgggcggctgcctgaagctgtgggacaccgtgagaggccagctggccttccagcacacctaccccaagagcctgaactgcgtggccttccaccccgagggccaggtgatcgccaccggcagctgggccggcagcatcagcttcttccaggtggacggcctgaaggtgaccaaggacctgggcgcccccggcgccagcatcagaaccctggccttcaacgtgcccggcggcgtggtggccgtgggcagactggacagcatggtggagctgtgggcctggagagagggcgccagactggccgccttccccgcccaccacggcttcgtggccgccgccctgttcctgcacgccggctgccagctgctgaccgccggcgaggacggcaaggtgcaggtgtggagcggcagcctgggcagacccagaggccacctgggcagcctgagcctgagccccgccctgagcgtggccctgagccccgacggcgacagagtggccgtgggctacagagccgacggcatcagaatctacaagatcagcagcggcagccagggcgcccagggccaggccctggacgtggccgtgagcgccctggcctggctgagccccaaggtgctggtgagcggcgccgaggacggcagcctgcagggctgggccctgaaggagtgcagcctgcagagcctgtggctgctgagcagattccagaagcccgtgctgggcctggccaccagccaggagctgctggccagcgccagcgaggacttcaccgtgcagctgtggcccagacagctgctgaccagaccccacaaggccgaggacttcccctgcggcaccgagctgagaggccacgagggccccgtgagctgctgcagcttcagcaccgacggcggcagcctggccaccggcggcagagacagaagcctgctgtgctgggacgtgagaacccccaagacccccgtgctgatccacagcttccccgcctgccacagagactgggtgaccggctgcgcctggaccaaggacaacctgctgatcagctgcagcagcgacggcagcgtgggcctgtgggaccccgagagcggccagagactgggccagttcctgggccaccagagcgccgtgagcgccgtggccgccgtggaggagcacgtggtgagcgtgagcagagacggcaccctgaaggtgtgggaccaccagggcgtggagctgaccagcatccccgcccacagcggccccatcagccactgcgccgccgccatggagcccagagccgccggccagcccggcagcgagctgctggtggtgaccgtgggcctggacggcgccaccagactgtggcaccccctgctggtgtgccagacccacaccctgctgggccacagcggccccgtgagagccgccgccgtgagcgagaccagcggcctgatgctgaccgccagcgaggacggcagcgtgagactgtggcaggtgcccaaggaggccgacgacacctgcatccccagaagcagcgccgccgtgaccgccgtggcctgggcccccgacggcagcatggccgtgagcggcaaccaggccggcgagctgatcctgtggcaggaggccaaggccgtggccaccgcccaggcccccggccacatcggcgccctgatctggagcagcgcccacaccttcttcgtgctgagcgccgacgagaagatcagcgagtggcaggtgaagctgagaaagggcagcgcccccggcaacctgagcctgcacctgaacagaatcctgcaggaggacctgggcgtgctgaccagcctggactgggcccccgacggccacttcctgatcctggccaaggccgacctgaagctgctgtgcatgaagcccggcgacgcccccagcgagatctggagcagctacaccgagaaccccatgatcctgagcacccacaaggagtacggcatcttcgtgctgcagcccaaggaccccggcgtgctgagcttcctgagacagaaggagagcggcgagttcgaggagagactgaacttcgacatcaacctggagaaccccagcagaaccctgatcagcatcacccaggccaagcccgagagcgccctgatgggcagctacggcacctggcccaacgccgcccagaaggagaacggcccccaggtgacctgcggcagaaagaagaacacccccgagacccagacccccggcaccgaccccagcacctgcagagagagcgacgccagcatggacagcgacgccagcatggacagcgagcccaccccccacctgaagaccagacagagaagaaagatccacagcggcagcgtgaccgccctgcacgtgctgcccgagctgctggtgaccgccagcaaggacagagacgtgaagctgtgggagagacccagcatgcagctgctgggcctgttcagatgcgagggcagcgtgagctgcctggagccctggctgggcgccaacagcaccctgcagctggccgtgggcgacgtgcagggcaacgtgtacttcctgaactgggagtag

SEQ ID NO: 13114 - DNA, 2031 bp, synthetic construct
  misc_feature 1..2031: note = Description of Artificial Sequence: Synthetic coding sequence
  source 1..2031: mol_type = other DNA
atgaagaaccagcagagcagcagcctgagcctggccgtgagcagcagccccaccgccgtggccttcagcaccaacggccagagagccgccgtgggcaccgccaacggcaccgtgtacctgctggacctgagaacctggcaggaggagaagagcgtggtgagcggctgcgacggcatcagcgcctgcctgttcctgagcgacgacaccctgttcctgaccgccttcgacggcctgctggagctgtgggacctgcagcacggctgcagagtgctgcagaccaaggcccaccagtaccagatcaccggctgctgcctgagccccgactgcagactgctggccaccgtgtgcctgggcggctgcctgaagctgtgggacaccgtgagaggccagctggccttccagcacacctaccccaagagcctgaactgcgtggccttccaccccgagggccaggtgatcgccaccggcagctgggccggcagcatcagcttcttccaggtggacggcctgaaggtgaccaaggacctgggcgcccccggcgccagcatcagaaccctggccttcaacgtgcccggcggcgtggtggccgtgggcagactggacagcatggtggagctgtgggcctggagagagggcgccagactggccgccttccccgcccaccacggcttcgtggccgccgccctgttcctgcacgccggctgccagctgctgaccgccggcgaggacggcaaggtgcaggtgtggagcggcagcctgggcagacccagaggccacctgggcagcctgagcctgagccccgccctgagcgtggccctgagccccgacggcgacagagtggccgtgggctacagagccgacggcatcagaatctacaagatcagcagcggcagccagggcgcccagggccaggccctggacgtggccgtgagcgccctggcctggctgagccccaaggtgctggtgagcggcgccgaggacggcagcctgcagggctgggccctgaaggagtgcagcctgcagagcctgtggctgctgagcagattccagaagcccgtgctgggcctggccaccagccaggagctgctggccagcgccagcgaggacttcaccgtgcagctgtggcccagacagctgctgaccagaccccacaaggccgaggacttcccctgcggcaccgagctgagaggccacgagggccccgtgagctgctgcagcttcagcaccgacggcggcagcctggccaccggcggcagagacagaagcctgctgtgctgggacgtgagaacccccaagacccccgtgctgatccacagcttccccgcctgccacagagactgggtgaccggctgcgcctggaccaaggacaacctgctgatcagctgcagcagcgacggcagcgtgggcctgtgggaccccgagagcggccagagactgggccagttcctgggccaccagagcgccgtgagcgccgtggccgccgtggaggagcacgtggtgagcgtgagcagagacggcaccctgaaggtgtgggaccaccagggcgtggagctgaccagcatccccgcccacagcggccccatcagccactgcgccgccgccatggagcccagagccgccggccagcccggcagcgagctgctggtggtgaccgtgggcctggacggcgccaccagactgtggcaccccctgctggtgtgccagacccacaccctgctgggccacagcggccccgtgagagccgccgccgtgagcgagaccagcggcctgatgctgaccgccagcgaggacggcagcgtgagactgtggcaggtgcccaaggaggccgacgacacctgcatccccagaagcagcgccgccgtgaccgccgtggcctgggcccccgacggcagcatggccgtgagcggcaaccaggccggcgagctgatcctgtggcaggaggccaaggccgtggccaccgcccagagcagccccgagcccaacagcaccggcggcctgagaggcgccgacaagagcggcctgggcagctag

SEQ ID NO: 13115 - DNA, 501 bp, synthetic construct
  misc_feature 1..501: note = Description of Artificial Sequence: Synthetic coding sequence
  source 1..501: mol_type = other DNA
atggagaagctgcacggccacgtgagcgcccaccccgacatcctgagcctggagaacagatgcctggccatgctgcccgacctgcagcccctggagaagctgcaccagcacgtgagcacccacagcgacatcctgagcctgaagaaccagtgcctggccaccctgcccgacctgaagaccatggagaagccccacggctacgtgagcgcccaccccgacatcctgagcctggagaaccagtgcctggccaccctgagcgacctgaagaccatggagaagccccacggccacgtgagcgcccaccccgacatcctgagcctggagaacagatgcctggccaccctgagcagcctgaagagcaccgtgagcgccagccccctgttccagagcctgcagatcagccacatgacccaggccgacctgtacagagtgaacaacagcaactgcctgctgagcgagccccccagctggagagcccagcacttcagcaagggcctgtag

SEQ ID NO: 13116 - DNA, 1260 bp, synthetic construct
  misc_feature 1..1260: note = Description of Artificial Sequence: Synthetic coding sequence
  source 1..1260: mol_type = other DNA
atggccgaggacgtgagcagcgccgcccccagccccagaggctgcgccgacggcagagacgccgaccccaccgaggagcagatggccgagaccgagagaaacgacgaggagcagttcgagtgccaggagctgctggagtgccaggtgcaggtgggcgcccccgaggaggaggaggaggaggaggaggacgccggcctggtggccgaggccgaggccgtggccgccggctggatgctggacttcctgtgcctgagcctgtgcagagccttcagagacggcagaagcgaggacttcagaagaaccagaaacagcgccgaggccatcatccacggcctgagcagcctgaccgcctgccagctgagaaccatctacatctgccagttcctgaccagaatcgccgccggcaagaccctggacgcccagttcgagaacgacgagagaatcacccccctggagagcgccctgatgatctggggcagcatcgagaaggagcacgacaagctgcacgaggagatccagaacctgatcaagatccaggccatcgccgtgtgcatggagaacggcaacttcaaggaggccgaggaggtgttcgagagaatcttcggcgaccccaacagccacatgcccttcaagagcaagctgctgatgatcatcagccagaaggacaccttccacagcttcttccagcacttcagctacaaccacatgatggagaagatcaagagctacgtgaactacgtgctgagcgagaagagcagcaccttcctgatgaaggccgccgccaaggtggtggagagcaagagaaccagaaccatcaccagccaggacaagcccagcggcaacgacgtggagatggagaccgaggccaacctggacaccagaaagagaagccacaagaacctgttcctgagcaagctgcagcacggcacccagcagcaggacctgaacaagaaggagagaagagtgggcaccccccagagcaccaagaagaagaaggagagcagaagagccaccgagagcagaatccccgtgagcaagagccagcccgtgacccccgagaagcacagagccagaaagagacaggcctggctgtgggaggaggacaagaacctgagaagcggcgtgagaaagtacggcgagggcaactggagcaagatcctgctgcactacaagttcaacaacagaaccagcgtgatgctgaaggacagatggagaaccatgaagaagctgaagctgatcagcagcgacagcgaggactag

SEQ ID NO: 13117 - DNA, 1320 bp, synthetic construct
  misc_feature 1..1320: note = Description of Artificial Sequence: Synthetic coding sequence
  source 1..1320: mol_type = other DNA
atggccgaggacgtgagcagcgccgcccccagccccagaggctgcgccgacggcagagacgccgaccccaccgaggagcagatggccgagaccgagagaaacgacgaggagcagttcgagtgccaggagctgctggagtgccaggtgcaggtgggcgcccccgaggaggaggaggaggaggaggaggacgccggcctggtggccgaggccgaggccgtggccgccggctggatgctggacttcctgtgcctgagcctgtgcagagccttcagagacggcagaagcgaggacttcagaagaaccagaaacagcgccgaggccatcatccacggcctgagcagcctgaccgcctgccagctgagaaccatctacatctgccagttcctgaccagaatcgccgccggcaagaccctggacgcccagttcgagaacgacgagagaatcacccccctggagagcgccctgatgatctggggcagcatcgagaaggagcacgacaagctgcacgaggagatccagaacctgatcaagatccaggccatcgccgtgtgcatggagaacggcaacttcaaggaggccgaggaggtgttcgagagaatcttcggcgaccccaacagccacatgcccttcaagagcaagctgctgatgatcatcagccagaaggacaccttccacagcttcttccagcacttcagctacaaccacatgatggagaagatcaagagctacgtgaactacgtgctgagcgagaagagcagcaccttcctgatgaaggccgccgccaaggtggtggagagcaagagaaccagaaccatcaccagccaggacaagcccagcggcaacgacgtggagatggagaccgaggccaacctggacaccagaaagagcgtgagcgacaagcagagcgccgtgaccgagagcagcgagggcaccgtgagcctgctgagaagccacaagaacctgttcctgagcaagctgcagcacggcacccagcagcaggacctgaacaagaaggagagaagagtgggcaccccccagagcaccaagaagaagaaggagagcagaagagccaccgagagcagaatccccgtgagcaagagccagcccgtgacccccgagaagcacagagccagaaagagacaggcctggctgtgggaggaggacaagaacctgagaagcggcgtgagaaagtacggcgagggcaactggagcaagatcctgctgcactacaagttcaacaacagaaccagcgtgatgctgaaggacagatggagaaccatgaagaagctgaagctgatcagcagcgacagcgaggactag

SEQ ID NO: 13118 - DNA, 153 bp, synthetic construct
  misc_feature 1..153: note = Description of Artificial Sequence: Synthetic coding sequence
  source 1..153: mol_type = other DNA
atcttcagcatcatccacggcctgagcagcctgaccgcctgccagctgagaaccatctacatctgccagttcctgaccagaatcgccgccggcaagaccctggacgcccagttcgagaacgacgagagaatcacccccctggagagcgcctag

SEQ ID NO: 13119 - DNA, 1503 bp, synthetic construct
  misc_feature 1..1503: note = Description of Artificial Sequence: Synthetic coding sequence
  source 1..1503: mol_type = other DNA
atggccggcggcggcggcagcagcgacggcagcggcagagccgccggcagaagagccagcagaagcagcggcagagccagaagaggcagacacgagcccggcctgggcggccccgccgagagaggcgccggcgaggccagactggaggaggccgtgaacagatgggtgctgaagttctacttccacgaggccctgagagccttcagaggcagcagatacggcgacttcagacagatcagagacatcatgcaggccctgctggtgagacccctgggcaaggagcacaccgtgagcagactgctgagagtgatgcagtgcctgagcagaatcgaggagggcgagaacctggactgcagcttcgacatggaggccgagctgacccccctggagagcgccatcaacgtgctggagatgatcaagaccgagttcaccctgaccgaggccgtggtggagagcagcagaaagctggtgaaggaggccgccgtgatcatctgcatcaagaacaaggagttcgagaaggccagcaagatcctgaagaagcacatgagcaaggaccccaccacccagaagctgagaaacgacctgctgaacatcatcagagagaagaacctggcccaccccgtgatccagaacttcagctacgagaccttccagcagaagatgctgagattcctggagagccacctggacgacgccgagccctacctgctgaccatggccaagaaggccctgaagagcgagagcgccgccagcagcaccggcaaggaggacaagcagcccgcccccggccccgtggagaagccccccagagagcccgccagacagctgagaaacccccccaccaccatcggcatgatgaccctgaaggccgccttcaagaccctgagcggcgcccaggacagcgaggccgccttcgccaagctggaccagaaggacctggtgctgcccacccaggccctgcccgccagccccgccctgaagaacaagagacccagaaaggacgagaacgagagcagcgcccccgccgacggcgagggcggcagcgagctgcagcccaagaacaagagaatgaccatcagcagactggtgctggaggaggacagccagagcaccgagcccagcgccggcctgaacagcagccaggaggccgccagcgccccccccagcaagcccaccgtgctgaaccagcccctgcccggcgagaagaaccccaaggtgcccaagggcaagtggaacagcagcaacggcgtggaggagaaggagacctgggtggaggaggacgagctgttccaggtgcaggccgcccccgacgaggacagcaccaccaacatcaccaagaagcagaagtggaccgtggaggagagcgagtgggtgaaggccggcgtgcagaagtacggcgagggcaactgggccgccatcagcaagaactaccccttcgtgaacagaaccgccgtgatgatcaaggacagatggagaaccatgaagagactgggcatgaactag

SEQ ID NO: 13120 - DNA, 1200 bp, synthetic construct
  misc_feature 1..1200: note = Description of Artificial Sequence: Synthetic coding sequence
  source 1..1200: mol_type = other DNA
atggccgaggccatggacctgggcaaggaccccaacggccccacccacagcagcaccctgttcgtgagagacgacggcagcagcatgagcttctacgtgagacccagccccgccaagagaagactgagcaccctgatcctgcacggcggcggcaccgtgtgcagagtgcaggagcccggcgccgtgctgctggcccagcccggcgaggccctggccgaggccagcggcgacttcatcagcacccagtacatcctggactgcgtggagagaaacgagagactggagctggaggcctacagactgggccccgccagcgccgccgacaccggcagcgaggccaagcccggcgccctggccgagggcgccgccgagcccgagccccagagacacgccggcagaatcgccttcaccgacgccgacgacgtggccatcctgacctacgtgaaggagaacgccagaagccccagcagcgtgaccggcaacgccctgtggaaggccatggagaagagcagcctgacccagcacagctggcagagcctgaaggacagatacctgaagcacctgagaggccaggagcacaagtacctgctgggcgacgcccccgtgagccccagcagccagaagctgaagagaaaggccgaggaggaccccgaggccgccgacagcggcgagccccagaacaagagaacccccgacctgcccgaggaggagtacgtgaaggaggagatccaggagaacgaggaggccgtgaagaagatgctggtggaggccaccagagagttcgaggaggtggtggtggacgagagcccccccgacttcgagatccacatcaccatgtgcgacgacgacccccccacccccgaggaggacagcgagacccagcccgacgaggaggaggaggaggaggaggagaaggtgagccagcccgaggtgggcgccgccatcaagatcatcagacagctgatggagaagttcaacctggacctgagcaccgtgacccaggccttcctgaagaacagcggcgagctggaggccaccagcgccttcctggccagcggccagagagccgacggctaccccatctggagcagacaggacgacatcgacctgcagaaggacgacgaggacaccagagaggccctggtgaagaagttcggcgcccagaacgtggccagaagaatcgagttcagaaagaagtag

SEQ ID NO: 13121 - DNA, 12735 bp, synthetic construct
  misc_feature 1..12735: note = Description of Artificial Sequence: Synthetic coding sequence
  source 1..12735: mol_type = other DNA
atgatgcccgcccagtacgccctgaccagcagcctggtgctgctggtgctgctgagcaccgccagagccggccccttcagcagcagaagcaacgtgaccctgcccgcccccagaccccccccccagcccggcggccacaccgtgggcgccggcgtgggcagccccagcagccagctgtacgagcacaccgtggagggcggcgagaagcaggtggtgttcacccacagaatcaacctgccccccagcaccggctgcggctgcccccccggcaccgagccccccgtgctggccagcgaggtgcaggccctgagagtgagactggagatcctggaggagctggtgaagggcctgaaggagcagtgcaccggcggctgctgccccgccagcgcccaggccggcaccggccagaccgacgtgagaaccctgtgcagcctgcacggcgtgttcgacctgagcagatgcacctgcagctgcgagcccggctggggcggccccacctgcagcgaccccaccgacgccgagatcccccccagcagcccccccagcgccagcggcagctgccccgacgactgcaacgaccagggcagatgcgtgagaggcagatgcgtgtgcttccccggctacaccggccccagctgcggctggcccagctgccccggcgactgccagggcagaggcagatgcgtgcagggcgtgtgcgtgtgcagagccggcttcagcggccccgactgcagccagagaagctgccccagaggctgcagccagagaggcagatgcgagggcggcagatgcgtgtgcgaccccggctacaccggcgacgactgcggcatgagaagctgccccagaggctgcagccagagaggcagatgcgagaacggcagatgcgtgtgcaaccccggctacaccggcgaggactgcggcgtgagaagctgccccagaggctgcagccagagaggcagatgcaaggacggcagatgcgtgtgcgaccccggctacaccggcgaggactgcggcaccagaagctgcccctgggactgcggcgagggcggcagatgcgtggacggcagatgcgtgtgctggcccggctacaccggcgaggactgcagcaccagaacctgccccagagactgcagaggcagaggcagatgcgaggacggcgagtgcatctgcgacaccggctacagcggcgacgactgcggcgtgagaagctgccccggcgactgcaaccagagaggcagatgcgaggacggcagatgcgtgtgctggcccggctacaccggcaccgactgcggcagcagagcctgccccagagactgcagaggcagaggcagatgcgagaacggcgtgtgcgtgtgcaacgccggctacagcggcgaggactgcggcgtgagaagctgccccggcgactgcagaggcagaggcagatgcgagagcggcagatgcatgtgctggcccggctacaccggcagagactgcggcaccagagcctgccccggcgactgcagaggcagaggcagatgcgtggacggcagatgcgtgtgcaaccccggcttcaccggcgaggactgcggcagcagaagatgccccggcgactgcagaggccacggcctgtgcgaggacggcgtgtgcgtgtgcgacgccggctacagcggcgaggactgcagcaccagaagctgccccggcggctgcagaggcagaggccagtgcctggacggcagatgcgtgtgcgaggacggctacagcggcgaggactgcggcgtgagacagtgccccaacgactgcagccagcacggcgtgtgccaggacggcgtgtgcatctgctgggagggctacgtgagcgaggactgcagcatcagaacctgccccagcaactgccacggcagaggcagatgcgaggagggcagatgcctgtgcgaccccggctacaccggccccacctgcgccaccagaatgtgccccgccgactgcagaggcagaggcagatgcgtgcagggcgtgtgcctgtgccacgtgggctacggcggcgaggactgcggccaggaggagccccccgccagcgcctgccccggcggctgcggccccagagagctgtgcagagccggccagtgcgtgtgcgtggagggcttcagaggccccgactgcgccatccagacctgccccggcgactgcagaggcagaggcgagtgccacgacggcagctgcgtgtgcaaggacggctacgccggcgaggactgcggcgaggaggtgcccaccatcgagggcatgagaatgcacctgctggaggagaccaccgtgagaaccgagtggacccccgcccccggccccgtggacgcctacgagatccagttcatccccaccaccgagggcgccagcccccccttcaccgccagagtgcccagcagcgccagcgcctacgaccagagaggcctggcccccggccaggagtaccaggtgaccgtgagagccctgagaggcaccagctggggcctgcccgccagcaagaccatcaccaccatgatcgacggcccccaggacctgagagtggtggccgtgacccccaccaccctggagctgggctggctgagaccccaggccgaggtggacagattcgtggtgagctacgtgagcgccggcaaccagagagtgagactggaggtgccccccgaggccgacggcaccctgctgaccgacctgatgcccggcgtggagtacgtggtgaccgtgaccgccgagagaggcagagccgtgagctaccccgccagcgtgagagccaacaccggcagcagccccctgggcctgctgggcaccaccgacgagcccccccccagcggccccagcaccacccagggcgcccaggcccccctgctgcagcagagaccccaggagctgggcgagctgagagtgctgggcagagacgagaccggcagactgagagtggtgtggaccgcccagcccgacaccttcgcctacttccagctgagaatgagagtgcccgagggccccggcgcccacgaggaggtgctgcccggcgacgtgagacaggccctggtgcccccccccccccccggcaccccctacgagctgagcctgcacggcgtgccccccggcggcaagcccagcgaccccatcatctaccagggcatcatggacaaggacgaggagaagcccggcaagagcagcggcccccccagactgggcgagctgaccgtgaccgacagaaccagcgacagcctgctgctgagatggaccgtgcccgagggcgagttcgacagcttcgtgatccagtacaaggacagagacggccagccccaggtggtgcccgtggagggcccccagagaagcgccgtgatcaccagcctggaccccggcagaaagtacaagttcgtgctgtacggcttcgtgggcaagaagagacacggccccctggtggccgaggccaagatcctgccccagagcgaccccagccccggcacccccccccacctgggcaacctgtgggtgaccgaccccacccccgacagcctgcacctgagctggaccgtgcccgagggccagttcgacaccttcatggtgcagtacagagacagagacggcagaccccaggtggtgcccgtggagggccccgagagaagcttcgtggtgagcagcctggaccccgaccacaagtacagattcaccctgttcggcatcgccaacaagaagagatacggccccctgaccgccgacggcaccaccgcccccgagagaaaggaggagccccccagacccgagttcctggagcagcccctgctgggcgagctgaccgtgaccggcgtgacccccgacagcctgagactgagctggaccgtggcccagggccccttcgacagcttcatggtgcagtacaaggacgcccagggccagccccaggccgtgcccgtggccggcgacgagaacgaggtgaccgtgcccggcctggaccccgacagaaagtacaagatgaacctgtacggcctgagaggcagacagagagtgggccccgagagcgtggtggccaagaccgccccccaggaggacgtggacgagacccccagccccaccgagctgggcaccgaggcccccgagagccccgaggagcccctgctgggcgagctgaccgtgaccggcagcagccccgacagcctgagcctgttctggaccgtgccccagggcagcttcgacagcttcaccgtgcagtacaaggacagagacggcagacccagagccgtgagagtgggcggcaaggagagcgaggtgaccgtgggcggcctggagcccggccacaagtacaagatgcacctgtacggcctgcacgagggccagagagtgggccccgtgagcgccgtgggcgtgaccgccccccagcaggaggagaccccccccgccaccgagagccccctggagcccagactgggcgagctgaccgtgaccgacgtgacccccaacagcgtgggcctgagctggaccgtgcccgagggccagttcgacagcttcatcgtgcagtacaaggacaaggacggccagccccaggtggtgcccgtggccgccgaccagagagaggtgaccgtgtacaacctggagcccgagagaaagtacaagatgaacatgtacggcctgcacgacggccagagaatgggccccctgagcgtggtgatcgtgaccgcccccctgccccccgcccccgccaccgaggccagcaagccccccctggagcccagactgggcgagctgaccgtgaccgacatcacccccgacagcgtgggcctgagctggaccgtgcccgagggcgagttcgacagcttcgtggtgcagtacaaggacagagacggccagccccaggtggtgcccgtggccgccgaccagagagaggtgaccatccccgacctggagcccagcagaaagtacaagttcctgctgttcggcatccaggacggcaagagaagaagccccgtgagcgtggaggccaagaccgtggccagaggcgacgccagccccggcgccccccccagactgggcgagctgtgggtgaccgaccccacccccgacagcctgagactgagctggaccgtgcccgagggccagttcgacagcttcgtggtgcagttcaaggacaaggacggcccccaggtggtgcccgtggagggccacgagagaagcgtgaccgtgacccccctggacgccggcagaaagtacagattcctgctgtacggcctgctgggcaagaagagacacggccccctgaccgccgacggcaccaccgaggccagaagcgccatggacgacaccggcaccaagagaccccccaagcccagactgggcgaggagctgcaggtgaccaccgtgacccagaacagcgtgggcctgagctggaccgtgcccgagggccagttcgacagcttcgtggtgcagtacaaggacagagacggccagccccaggtggtgcccgtggagggcagcctgagagaggtgagcgtgcccggcctggaccccgcccacagatacaagctgctgctgtacggcctgcaccacggcaagagagtgggccccatcagcgccgtggccatcaccgccggcagagaggagaccgagaccgagaccaccgcccccaccccccccgcccccgagccccacctgggcgagctgaccgtggaggaggccaccagccacaccctgcacctgagctggatggtgaccgagggcgagttcgacagcttcgagatccagtacaccgacagagacggccagctgcagatggtgagaatcggcggcgacagaaacgacatcaccctgagcggcctggagagcgaccacagatacctggtgaccctgtacggcttcagcgacggcaagcacgtgggccccgtgcacgtggaggccctgaccgtgcccgaggaggagaagcccagcgagccccccaccgccacccccgagccccccatcaagcccagactgggcgagctgaccgtgaccgacgccacccccgacagcctgagcctgagctggaccgtgcccgagggccagttcgaccacttcctggtgcagtacagaaacggcgacggccagcccaaggccgtgagagtgcccggccacgaggagggcgtgaccatcagcggcctggagcccgaccacaagtacaagatgaacctgtacggcttccacggcggccagagaatgggccccgtgagcgtggtgggcgtgaccgccgccgaggaggagacccccagccccaccgagcccagcatggaggcccccgagcccgccgaggagcccctgctgggcgagctgaccgtgaccggcagcagccccgacagcctgagcctgagctggaccgtgccccagggcagattcgacagcttcaccgtgcagtacaaggacagagacggcagaccccaggtggtgagagtgggcggcgaggagagcgaggtgaccgtgggcggcctggagcccggcagaaagtacaagatgcacctgtacggcctgcacgagggcagaagagtgggccccgtgagcgccgtgggcgtgaccgcccccgaggaggagagccccgacgcccccctggccaagctgagactgggccagatgaccgtgagagacatcaccagcgacagcctgagcctgagctggaccgtgcccgagggccagttcgaccacttcctggtgcagttcaagaacggcgacggccagcccaaggccgtgagagtgcccggccacgaggacggcgtgaccatcagcggcctggagcccgaccacaagtacaagatgaacctgtacggcttccacggcggccagagagtgggccccgtgagcgccgtgggcctgaccgcccccggcaaggacgaggagatggcccccgccagcaccgagccccccacccccgagccccccatcaagcccagactggaggagctgaccgtgaccgacgccacccccgacagcctgagcctgagctggaccgtgcccgagggccagttcgaccacttcctggtgcagtacaagaacggcgacggccagcccaaggccaccagagtgcccggccacgaggacagagtgaccatcagcggcctggagcccgacaacaagtacaagatgaacctgtacggcttccacggcggccagagagtgggccccgtgagcgccatcggcgtgaccgccgccgaggaggagacccccagccccaccgagcccagcatggaggcccccgagccccccgaggagcccctgctgggcgagctgaccgtgaccggcagcagccccgacagcctgagcctgagctggaccgtgccccagggcagattcgacagcttcaccgtgcagtacaaggacagagacggcagaccccaggtggtgagagtgggcggcgaggagagcgaggtgaccgtgggcggcctggagcccggcagaaagtacaagatgcacctgtacggcctgcacgagggcagaagagtgggccccgtgagcaccgtgggcgtgaccgccccccaggaggacgtggacgagacccccagccccaccgagcccggcaccgaggcccccggcccccccgaggagcccctgctgggcgagctgaccgtgaccggcagcagccccgacagcctgagcctgagctggaccgtgccccagggcagattcgacagcttcaccgtgcagtacaaggacagagacggcagaccccaggccgtgagagtgggcggccaggagagcaaggtgaccgtgagaggcctggagcccggcagaaagtacaagatgcacctgtacggcctgcacgagggcagaagactgggccccgtgagcgccgtgggcgtgaccgaggacgaggccgagaccacccaggccgtgcccaccatgacccccgagccccccatcaagcccagactgggcgagctgaccatgaccgacgccacccccgacagcctgagcctgagctggaccgtgcccgagggccagttcgaccacttcctggtgcagtacagaaacggcgacggccagcccaaggccgtgagagtgcccggccacgaggacggcgtgaccatcagcggcctggagcccgaccacaagtacaagatgaacctgtacggcttccacggcggccagagagtgggccccatcagcgtgatcggcgtgaccgccgccgaggaggagacccccagccccaccgagctgagcaccgaggcccccgagccccccgaggagcccctgctgggcgagctgaccgtgaccggcagcagccccgacagcctgagcctgagctggaccatcccccagggccacttcgacagcttcaccgtgcagtacaaggacagagacggcagaccccaggtgatgagagtgagaggcgaggagagcgaggtgaccgtgggcggcctggagcccggcagaaagtacaagatgcacctgtacggcctgcacgagggcagaagagtgggccccgtgagcaccgtgggcgtgaccgcccccgaggacgaggccgagaccacccaggccgtgcccaccaccacccccgagccccccaacaagcccagactgggcgagctgaccgtgaccgacgccacccccgacagcctgagcctgagctggatggtgcccgagggccagttcgaccacttcctggtgcagtacagaaacggcgacggccagcccaaggtggtgagagtgcccggccacgaggacggcgtgaccatcagcggcctggagcccgaccacaagtacaagatgaacctgtacggcttccacggcggccagagagtgggccccatcagcgtgatcggcgtgaccgccgccgaggaggagacccccgcccccaccgagcccagcaccgaggcccccgagccccccgaggagcccctgctgggcgagctgaccgtgaccggcagcagccccgacagcctgagcctgagctggaccatcccccagggcagattcgacagcttcaccgtgcagtacaaggacagagacggcagaccccaggtggtgagagtgagaggcgaggagagcgaggtgaccgtgggcggcctggagcccggctgcaagtacaagatgcacctgtacggcctgcacgagggccagagagtgggccccgtgagcgccgtgggcgtgaccgcccccaaggacgaggccgagaccacccaggccgtgcccaccatgacccccgagccccccatcaagcccagactgggcgagctgaccgtgaccgacgccacccccgacagcctgagcctgagctggatggtgcccgagggccagttcgaccacttcctggtgcagtacagaaacggcgacggccagcccaaggccgtgagagtgcccggccacgaggacggcgtgaccatcagcggcctggagcccgaccacaagtacaagatgaacctgtacggcttccacggcggccagagagtgggccccgtgagcgccatcggcgtgaccgaggaggagacccccagccccaccgagcccagcaccgaggcccccgaggcccccgaggagcccctgctgggcgagctgaccgtgaccggcagcagccccgacagcctgagcctgagctggaccgtgccccagggcagattcgacagcttcaccgtgcagtacaaggacagagacggccagccccaggtggtgagagtgagaggcgaggagagcgaggtgaccgtgggcggcctggagcccggcagaaagtacaagatgcacctgtacggcctgcacgagggccagagagtgggccccgtgagcaccgtgggcatcaccgcccccctgcccacccccctgcccgtggagcccagactgggcgagctggccgtggccgccgtgaccagcgacagcgtgggcctgagctggaccgtggcccagggccccttcgacagcttcctggtgcagtacagagacgcccagggccagccccaggccgtgcccgtgagcggcgacctgagagccgtggccgtgagcggcctggaccccgccagaaagtacaagttcctgctgttcggcctgcagaacggcaagagacacggccccgtgcccgtggaggccagaaccgcccccgacaccaagcccagccccagactgggcgagctgaccgtgaccgacgccacccccgacagcgtgggcctgagctggaccgtgcccgagggcgagttcgacagcttcgtggtgcagtacaaggacaaggacggcagactgcaggtggtgcccgtggccgccaaccagagagaggtgaccgtgcagggcctggagcccagcagaaagtacagattcctgctgtacggcctgagcggcagaaagagactgggccccatcagcgccgacagcaccaccgcccccctggagaaggagctgcccccccacctgggcgagctgaccgtggccgaggagaccagcagcagcctgagactgagctggaccgtggcccagggccccttcgacagcttcgtggtgcagtacagagacaccgacggccagcccagagccgtgcccgtggccgccgaccagagaaccgtgaccgtggaggacctggagcccggcaagaagtacaagttcctgctgtacggcctgctgggcggcaagagactgggccccgtgagcgccctgggcatgaccgcccccgaggaggacacccccgcccccgagctggcccccgaggcccccgagccccccgaggagcccagactgggcgtgctgaccgtgaccgacaccacccccgacagcatgagactgagctggagcgtggcccagggccccttcgacagcttcgtggtgcagtacgaggacaccaacggccagccccaggccctgctggtggacggcgaccagagcaagatcctgatcagcggcctggagcccagcaccccctacagattcctgctgtacggcctgcacgagggcaagagactgggccccctgagcgccgagggcaccaccggcctggcccccgccggccagaccagcgaggagagcagacccagactgagccagctgagcgtgaccgacgtgaccaccagcagcctgagactgaactgggaggccccccccggcgccttcgacagcttcctgctgagattcggcgtgcccagccccagcaccctggagccccaccccagacccctgctgcagagagagctgatggtgcccggcaccagacacagcgccgtgctgagagacctgagaagcggcaccctgtacagcctgaccctgtacggcctgagaggcccccacaaggccgacagcatccagggcaccgccagaaccctgagccccgtgctggagagccccagagacctgcagttcagcgagatcagagagaccagcgccaaggtgaactggatgcccccccccagcagagccgacagcttcaaggtgagctaccagctggccgacggcggcgagccccagagcgtgcaggtggacggccaggccagaacccagaagctgcagggcctgatccccggcgccagatacgaggtgaccgtggtgagcgtgagaggcttcgaggagagcgagcccctgaccggcttcctgaccaccgtgcccgacggccccacccagctgagagccctgaacctgaccgagggcttcgccgtgctgcactggaagcccccccagaaccccgtggacacctacgacgtgcaggtgaccgcccccggcgccccccccctgcaggccgagacccccggcagcgccgtggactaccccctgcacgacctggtgctgcacaccaactacaccgccaccgtgagaggcctgagaggccccaacctgaccagccccgccagcatcaccttcaccaccggcctggaggcccccagagacctggaggccaaggaggtgacccccagaaccgccctgctgacctggaccgagccccccgtgagacccgccggctacctgctgagcttccacacccccggcggccagaaccaggagatcctgctgcccggcggcatcaccagccaccagctgctgggcctgttccccagcaccagctacaacgccagactgcaggccatgtggggccagagcctgctgccccccgtgagcaccagcttcaccaccggcggcctgagaatccccttccccagagactgcggcgaggagatgcagaacggcgccggcgccagcagaaccagcaccatcttcctgaacggcaacagagagagacccctgaacgtgttctgcgacatggagaccgacggcggcggctggctggtgttccagagaagaatggacggccagaccgacttctggagagactgggaggactacgcccacggcttcggcaacatcagcggcgagttctggctgggcaacgaggccctgcacagcctgacccaggccggcgactacagcatgagagtggacctgagagccggcgacgaggccgtgttcgcccagtacgacagcttccacgtggacagcgccgccgagtactacagactgcacctggagggctaccacggcaccgccggcgacagcatgagctaccacagcggcagcgtgttcagcgccagagacagagaccccaacagcctgctgatcagctgcgccgtgagctacagaggcgcctggtggtacagaaactgccactacgccaacctgaacggcctgtacggcagcaccgtggaccaccagggcgtgagctggtaccactggaagggcttcgagttcagcgtgcccttcaccgagatgaagctgagacccagaaacttcagaagccccgccggcggcggctag

SEQ ID NO: 13122 - DNA, 12729 bp, synthetic construct
  misc_feature 1..12729: note = Description of Artificial Sequence: Synthetic coding sequence
  source 1..12729: mol_type = other DNA
atgatgcccgcccagtacgccctgaccagcagcctggtgctgctggtgctgctgagcaccgccagagccggccccttcagcagcagaagcaacgtgaccctgcccgcccccagaccccccccccagcccggcggccacaccgtgggcgccggcgtgggcagccccagcagccagctgtacgagcacaccgtggagggcggcgagaagcaggtggtgttcacccacagaatcaacctgccccccagcaccggctgcggctgcccccccggcaccgagccccccgtgctggccagcgaggtgcaggccctgagagtgagactggagatcctggaggagctggtgaagggcctgaaggagcagtgcaccggcggctgctgccccgccagcgcccaggccggcaccggccagaccgacgtgagaaccctgtgcagcctgcacggcgtgttcgacctgagcagatgcacctgcagctgcgagcccggctggggcggccccacctgcagcgaccccaccgacgccgagatcccccccagcagcccccccagcgccagcggcagctgccccgacgactgcaacgaccagggcagatgcgtgagaggcagatgcgtgtgcttccccggctacaccggccccagctgcggctggcccagctgccccggcgactgccagggcagaggcagatgcgtgcagggcgtgtgcgtgtgcagagccggcttcagcggccccgactgcagccagagaagctgccccagaggctgcagccagagaggcagatgcgagggcggcagatgcgtgtgcgaccccggctacaccggcgacgactgcggcatgagaagctgccccagaggctgcagccagagaggcagatgcgagaacggcagatgcgtgtgcaaccccggctacaccggcgaggactgcggcgtgagaagctgccccagaggctgcagccagagaggcagatgcaaggacggcagatgcgtgtgcgaccccggctacaccggcgaggactgcggcaccagaagctgcccctgggactgcggcgagggcggcagatgcgtggacggcagatgcgtgtgctggcccggctacaccggcgaggactgcagcaccagaacctgccccagagactgcagaggcagaggcagatgcgaggacggcgagtgcatctgcgacaccggctacagcggcgacgactgcggcgtgagaagctgccccggcgactgcaaccagagaggcagatgcgaggacggcagatgcgtgtgctggcccggctacaccggcaccgactgcggcagcagagcctgccccagagactgcagaggcagaggcagatgcgagaacggcgtgtgcgtgtgcaacgccggctacagcggcgaggactgcggcgtgagaagctgccccggcgactgcagaggcagaggcagatgcgagagcggcagatgcatgtgctggcccggctacaccggcagagactgcggcaccagagcctgccccggcgactgcagaggcagaggcagatgcgtggacggcagatgcgtgtgcaaccccggcttcaccggcgaggactgcggcagcagaagatgccccggcgactgcagaggccacggcctgtgcgaggacggcgtgtgcgtgtgcgacgccggctacagcggcgaggactgcagcaccagaagctgccccggcggctgcagaggcagaggccagtgcctggacggcagatgcgtgtgcgaggacggctacagcggcgaggactgcggcgtgagacagtgccccaacgactgcagccagcacggcgtgtgccaggacggcgtgtgcatctgctgggagggctacgtgagcgaggactgcagcatcagaacctgccccagcaactgccacggcagaggcagatgcgaggagggcagatgcctgtgcgaccccggctacaccggccccacctgcgccaccagaatgtgccccgccgactgcagaggcagaggcagatgcgtgcagggcgtgtgcctgtgccacgtgggctacggcggcgaggactgcggccaggaggagccccccgccagcgcctgccccggcggctgcggccccagagagctgtgcagagccggccagtgcgtgtgcgtggagggcttcagaggccccgactgcgccatccagacctgccccggcgactgcagaggcagaggcgagtgccacgacggcagctgcgtgtgcaaggacggctacgccggcgaggactgcggcgaggaggtgcccaccatcgagggcatgagaatgcacctgctggaggagaccaccgtgagaaccgagtggacccccgcccccggccccgtggacgcctacgagatccagttcatccccaccaccgagggcgccagcccccccttcaccgccagagtgcccagcagcgccagcgcctacgaccagagaggcctggcccccggccaggagtaccaggtgaccgtgagagccctgagaggcaccagctggggcctgcccgccagcaagaccatcaccaccatgatcgacggcccccaggacctgagagtggtggccgtgacccccaccaccctggagctgggctggctgagaccccaggccgaggtggacagattcgtggtgagctacgtgagcgccggcaaccagagagtgagactggaggtgccccccgaggccgacggcaccctgctgaccgacctgatgcccggcgtggagtacgtggtgaccgtgaccgccgagagaggcagagccgtgagctaccccgccagcgtgagagccaacaccggcagcagccccctgggcctgctgggcaccaccgacgagcccccccccagcggccccagcaccacccagggcgcccaggcccccctgctgcagcagagaccccaggagctgggcgagctgagagtgctgggcagagacgagaccggcagactgagagtggtgtggaccgcccagcccgacaccttcgcctacttccagctgagaatgagagtgcccgagggccccggcgcccacgaggaggtgctgcccggcgacgtgagacaggccctggtgcccccccccccccccggcaccccctacgagctgagcctgcacggcgtgccccccggcggcaagcccagcgaccccatcatctaccagggcatcatggacaaggacgaggagaagcccggcaagagcagcggcccccccagactgggcgagctgaccgtgaccgacagaaccagcgacagcctgctgctgagatggaccgtgcccgagggcgagttcgacagcttcgtgatccagtacaaggacagagacggccagccccaggtggtgcccgtggagggcccccagagaagcgccgtgatcaccagcctggaccccggcagaaagtacaagttcgtgctgtacggcttcgtgggcaagaagagacacggccccctggtggccgaggccaagatcctgccccagagcgaccccagccccggcacccccccccacctgggcaacctgtgggtgaccgaccccacccccgacagcctgcacctgagctggaccgtgcccgagggccagttcgacaccttcatggtgcagtacagagacagagacggcagaccccaggtggtgcccgtggagggccccgagagaagcttcgtggtgagcagcctggaccccgaccacaagtacagattcaccctgttcggcatcgccaacaagaagagatacggccccctgaccgccgacggcaccaccgcccccgagagaaaggaggagccccccagacccgagttcctggagcagcccctgctgggcgagctgaccgtgaccggcgtgacccccgacagcctgagactgagctggaccgtggcccagggccccttcgacagcttcatggtgcagtacaaggacgcccagggccagccccaggccgtgcccgtggccggcgacgagaacgaggtgaccgtgcccggcctggaccccgacagaaagtacaagatgaacctgtacggcctgagaggcagacagagagtgggccccgagagcgtggtggccaagaccgccccccaggaggacgtggacgagacccccagccccaccgagctgggcaccgaggcccccgagagccccgaggagcccctgctgggcgagctgaccgtgaccggcagcagccccgacagcctgagcctgttctggaccgtgccccagggcagcttcgacagcttcaccgtgcagtacaaggacagagacggcagacccagagccgtgagagtgggcggcaaggagagcgaggtgaccgtgggcggcctggagcccggccacaagtacaagatgcacctgtacggcctgcacgagggccagagagtgggccccgtgagcgccgtgggcgtgaccgccccccagcaggaggagaccccccccgccaccgagagccccctggagcccagactgggcgagctgaccgtgaccgacgtgacccccaacagcgtgggcctgagctggaccgtgcccgagggccagttcgacagcttcatcgtgcagtacaaggacaaggacggccagccccaggtggtgcccgtggccgccgaccagagagaggtgaccgtgtacaacctggagcccgagagaaagtacaagatgaacatgtacggcctgcacgacggccagagaatgggccccctgagcgtggtgatcgtgaccgcccccctgccccccgcccccgccaccgaggccagcaagccccccctggagcccagactgggcgagctgaccgtgaccgacatcacccccgacagcgtgggcctgagctggaccgtgcccgagggcgagttcgacagcttcgtggtgcagtacaaggacagagacggccagccccaggtggtgcccgtggccgccgaccagagagaggtgaccatccccgacctggagcccagcagaaagtacaagttcctgctgttcggcatccaggacggcaagagaagaagccccgtgagcgtggaggccaagaccgtggccagaggcgacgccagccccggcgccccccccagactgggcgagctgtgggtgaccgaccccacccccgacagcctgagactgagctggaccgtgcccgagggccagttcgacagcttcgtggtgcagttcaaggacaaggacggcccccaggtggtgcccgtggagggccacgagagaagcgtgaccgtgacccccctggacgccggcagaaagtacagattcctgctgtacggcctgctgggcaagaagagacacggccccctgaccgccgacggcaccaccgaggccagaagcgccatggacgacaccggcaccaagagaccccccaagcccagactgggcgaggagctgcaggtgaccaccgtgacccagaacagcgtgggcctgagctggaccgtgcccgagggccagttcgacagcttcgtggtgcagtacaaggacagagacggccagccccaggtggtgcccgtggagggcagcctgagagaggtgagcgtgcccggcctggaccccgcccacagatacaagctgctgctgtacggcctgcaccacggcaagagagtgggccccatcagcgccgtggccatcaccgccggcagagaggagaccgagaccgagaccaccgcccccaccccccccgcccccgagccccacctgggcgagctgaccgtggaggaggccaccagccacaccctgcacctgagctggatggtgaccgagggcgagttcgacagcttcgagatccagtacaccgacagagacggccagctgcagatggtgagaatcggcggcgacagaaacgacatcaccctgagcggcctggagagcgaccacagatacctggtgaccctgtacggcttcagcgacggcaagcacgtgggccccgtgcacgtggaggccctgaccgtgcccgaggaggagaagcccagcgagccccccaccgccacccccgagccccccatcaagcccagactgggcgagctgaccgtgaccgacgccacccccgacagcctgagcctgagctggaccgtgcccgagggccagttcgaccacttcctggtgcagtacagaaacggcgacggccagcccaaggccgtgagagtgcccggccacgaggagggcgtgaccatcagcggcctggagcccgaccacaagtacaagatgaacctgtacggcttccacggcggccagagaatgggccccgtgagcgtggtgggcgtgaccgccgccgaggaggagacccccagccccaccgagcccagcatggaggcccccgagcccgccgaggagcccctgctgggcgagctgaccgtgaccggcagcagccccgacagcctgagcctgagctggaccgtgccccagggcagattcgacagcttcaccgtgcagtacaaggacagagacggcagaccccaggtggtgagagtgggcggcgaggagagcgaggtgaccgtgggcggcctggagcccggcagaaagtacaagatgcacctgtacggcctgcacgagggcagaagagtgggccccgtgagcgccgtgggcgtgaccgcccccgaggaggagagccccgacgcccccctggccaagctgagactgggccagatgaccgtgagagacatcaccagcgacagcctgagcctgagctggaccgtgcccgagggccagttcgaccacttcctggtgcagttcaagaacggcgacggccagcccaaggccgtgagagtgcccggccacgaggacggcgtgaccatcagcggcctggagcccgaccacaagtacaagatgaacctgtacggcttccacggcggccagagagtgggccccgtgagcgccgtgggcctgaccgcccccggcaaggacgaggagatggcccccgccagcaccgagccccccacccccgagccccccatcaagcccagactggaggagctgaccgtgaccgacgccacccccgacagcctgagcctgagctggaccgtgcccgagggccagttcgaccacttcctggtgcagtacaagaacggcgacggccagcccaaggccaccagagtgcccggccacgaggacagagtgaccatcagcggcctggagcccgacaacaagtacaagatgaacctgtacggcttccacggcggccagagagtgggccccgtgagcgccatcggcgtgaccgccgccgaggaggagacccccagccccaccgagcccagcatggaggcccccgagccccccgaggagcccctgctgggcgagctgaccgtgaccggcagcagccccgacagcctgagcctgagctggaccgtgccccagggcagattcgacagcttcaccgtgcagtacaaggacagagacggcagaccccaggtggtgagagtgggcggcgaggagagcgaggtgaccgtgggcggcctggagcccggcagaaagtacaagatgcacctgtacggcctgcacgagggcagaagagtgggccccgtgagcaccgtgggcgtgaccgccccccaggaggacgtggacgagacccccagccccaccgagcccggcaccgaggcccccggcccccccgaggagcccctgctgggcgagctgaccgtgaccggcagcagccccgacagcctgagcctgagctggaccgtgccccagggcagattcgacagcttcaccgtgcagtacaaggacagagacggcagaccccaggccgtgagagtgggcggccaggagagcaaggtgaccgtgagaggcctggagcccggcagaaagtacaagatgcacctgtacggcctgcacgagggcagaagactgggccccgtgagcgccgtgggcgtgaccgaggacgaggccgagaccacccaggccgtgcccaccatgacccccgagccccccatcaagcccagactgggcgagctgaccatgaccgacgccacccccgacagcctgagcctgagctggaccgtgcccgagggccagttcgaccacttcctggtgcagtacagaaacggcgacggccagcccaaggccgtgagagtgcccggccacgaggacggcgtgaccatcagcggcctggagcccgaccacaagtacaagatgaacctgtacggcttccacggcggccagagagtgggccccatcagcgtgatcggcgtgaccgccgccgaggaggagacccccagccccaccgagctgagcaccgaggcccccgagccccccgaggagcccctgctgggcgagctgaccgtgaccggcagcagccccgacagcctgagcctgagctggaccatcccccagggccacttcgacagcttcaccgtgcagtacaaggacagagacggcagaccccaggtgatgagagtgagaggcgaggagagcgaggtgaccgtgggcggcctggagcccggcagaaagtacaagatgcacctgtacggcctgcacgagggcagaagagtgggccccgtgagcaccgtgggcgtgaccgaggacgaggccgagaccacccaggccgtgcccaccaccacccccgagccccccaacaagcccagactgggcgagctgaccgtgaccgacgccacccccgacagcctgagcctgagctggatggtgcccgagggccagttcgaccacttcctggtgcagtacagaaacggcgacggccagcccaaggtggtgagagtgcccggccacgaggacggcgtgaccatcagcggcctggagcccgaccacaagtacaagatgaacctgtacggcttccacggcggccagagagtgggccccatcagcgtgatcggcgtgaccgccgccgaggaggagacccccgcccccaccgagcccagcaccgaggcccccgagccccccgaggagcccctgctgggcgagctgaccgtgaccggcagcagccccgacagcctgagcctgagctggaccatcccccagggcagattcgacagcttcaccgtgcagtacaaggacagagacggcagaccccaggtggtgagagtgagaggcgaggagagcgaggtgaccgtgggcggcctggagcccggctgcaagtacaagatgcacctgtacggcctgcacgagggccagagagtgggccccgtgagcgccgtgggcgtgaccgcccccaaggacgaggccgagaccacccaggccgtgcccaccatgacccccgagccccccatcaagcccagactgggcgagctgaccgtgaccgacgccacccccgacagcctgagcctgagctggatggtgcccgagggccagttcgaccacttcctggtgcagtacagaaacggcgacggccagcccaaggccgtgagagtgcccggccacgaggacggcgtgaccatcagcggcctggagcccgaccacaagtacaagatgaacctgtacggcttccacggcggccagagagtgggccccgtgagcgccatcggcgtgaccgaggaggagacccccagccccaccgagcccagcaccgaggcccccgaggcccccgaggagcccctgctgggcgagctgaccgtgaccggcagcagccccgacagcctgagcctgagctggaccgtgccccagggcagattcgacagcttcaccgtgcagtacaaggacagagacggccagccccaggtggtgagagtgagaggcgaggagagcgaggtgaccgtgggcggcctggagcccggcagaaagtacaagatgcacctgtacggcctgcacgagggccagagagtgggccccgtgagcaccgtgggcatcaccgcccccctgcccacccccctgcccgtggagcccagactgggcgagctggccgtggccgccgtgaccagcgacagcgtgggcctgagctggaccgtggcccagggccccttcgacagcttcctggtgcagtacagagacgcccagggccagccccaggccgtgcccgtgagcggcgacctgagagccgtggccgtgagcggcctggaccccgccagaaagtacaagttcctgctgttcggcctgcagaacggcaagagacacggccccgtgcccgtggaggccagaaccgcccccgacaccaagcccagccccagactgggcgagctgaccgtgaccgacgccacccccgacagcgtgggcctgagctggaccgtgcccgagggcgagttcgacagcttcgtggtgcagtacaaggacaaggacggcagactgcaggtggtgcccgtggccgccaaccagagagaggtgaccgtgcagggcctggagcccagcagaaagtacagattcctgctgtacggcctgagcggcagaaagagactgggccccatcagcgccgacagcaccaccgcccccctggagaaggagctgcccccccacctgggcgagctgaccgtggccgaggagaccagcagcagcctgagactgagctggaccgtggcccagggccccttcgacagcttcgtggtgcagtacagagacaccgacggccagcccagagccgtgcccgtggccgccgaccagagaaccgtgaccgtggaggacctggagcccggcaagaagtacaagttcctgctgtacggcctgctgggcggcaagagactgggccccgtgagcgccctgggcatgaccgcccccgaggaggacacccccgcccccgagctggcccccgaggcccccgagccccccgaggagcccagactgggcgtgctgaccgtgaccgacaccacccccgacagcatgagactgagctggagcgtggcccagggccccttcgacagcttcgtggtgcagtacgaggacaccaacggccagccccaggccctgctggtggacggcgaccagagcaagatcctgatcagcggcctggagcccagcaccccctacagattcctgctgtacggcctgcacgagggcaagagactgggccccctgagcgccgagggcaccaccggcctggcccccgccggccagaccagcgaggagagcagacccagactgagccagctgagcgtgaccgacgtgaccaccagcagcctgagactgaactgggaggccccccccggcgccttcgacagcttcctgctgagattcggcgtgcccagccccagcaccctggagccccaccccagacccctgctgcagagagagctgatggtgcccggcaccagacacagcgccgtgctgagagacctgagaagcggcaccctgtacagcctgaccctgtacggcctgagaggcccccacaaggccgacagcatccagggcaccgccagaaccctgagccccgtgctggagagccccagagacctgcagttcagcgagatcagagagaccagcgccaaggtgaactggatgcccccccccagcagagccgacagcttcaaggtgagctaccagctggccgacggcggcgagccccagagcgtgcaggtggacggccaggccagaacccagaagctgcagggcctgatccccggcgccagatacgaggtgaccgtggtgagcgtgagaggcttcgaggagagcgagcccctgaccggcttcctgaccaccgtgcccgacggccccacccagctgagagccctgaacctgaccgagggcttcgccgtgctgcactggaagcccccccagaaccccgtggacacctacgacgtgcaggtgaccgcccccggcgccccccccctgcaggccgagacccccggcagcgccgtggactaccccctgcacgacctggtgctgcacaccaactacaccgccaccgtgagaggcctgagaggccccaacctgaccagccccgccagcatcaccttcaccaccggcctggaggcccccagagacctggaggccaaggaggtgacccccagaaccgccctgctgacctggaccgagccccccgtgagacccgccggctacctgctgagcttccacacccccggcggccagaaccaggagatcctgctgcccggcggcatcaccagccaccagctgctgggcctgttccccagcaccagctacaacgccagactgcaggccatgtggggccagagcctgctgccccccgtgagcaccagcttcaccaccggcggcctgagaatccccttccccagagactgcggcgaggagatgcagaacggcgccggcgccagcagaaccagcaccatcttcctgaacggcaacagagagagacccctgaacgtgttctgcgacatggagaccgacggcggcggctggctggtgttccagagaagaatggacggccagaccgacttctggagagactgggaggactacgcccacggcttcggcaacatcagcggcgagttctggctgggcaacgaggccctgcacagcctgacccaggccggcgactacagcatgagagtggacctgagagccggcgacgaggccgtgttcgcccagtacgacagcttccacgtggacagcgccgccgagtactacagactgcacctggagggctaccacggcaccgccggcgacagcatgagctaccacagcggcagcgtgttcagcgccagagacagagaccccaacagcctgctgatcagctgcgccgtgagctacagaggcgcctggtggtacagaaactgccactacgccaacctgaacggcctgtacggcagcaccgtggaccaccagggcgtgagctggtaccactggaagggcttcgagttcagcgtgcccttcaccgagatgaagctgagacccagaaacttcagaagccccgccggcggcggctag

SEQ ID NO: 13123 - DNA, 2022 bp, synthetic construct
  misc_feature 1..2022: note = Description of Artificial Sequence: Synthetic coding sequence
  source 1..2022: mol_type = other DNA
atgagactgagctggagcgtggcccagggccccttcgacagcttcgtggtgcagtacgaggacaccaacggccagccccaggccctgctggtggacggcgaccagagcaagatcctgatcagcggcctggagcccagcaccccctacagattcctgctgtacggcctgcacgagggcaagagactgggccccctgagcgccgagggcaccaccggcctggcccccgccggccagaccagcgaggagagcagacccagactgagccagctgagcgtgaccgacgtgaccaccagcagcctgagactgaactgggaggccccccccggcgccttcgacagcttcctgctgagattcggcgtgcccagccccagcaccctggagccccaccccagacccctgctgcagagagagctgatggtgcccggcaccagacacagcgccgtgctgagagacctgagaagcggcaccctgtacagcctgaccctgtacggcctgagaggcccccacaaggccgacagcatccagggcaccgccagaaccctgagccccgtgctggagagccccagagacctgcagttcagcgagatcagagagaccagcgccaaggtgaactggatgcccccccccagcagagccgacagcttcaaggtgagctaccagctggccgacggcggcgagccccagagcgtgcaggtggacggccaggccagaacccagaagctgcagggcctgatccccggcgccagatacgaggtgaccgtggtgagcgtgagaggcttcgaggagagcgagcccctgaccggcttcctgaccaccgtgcccgacggccccacccagctgagagccctgaacctgaccgagggcttcgccgtgctgcactggaagcccccccagaaccccgtggacacctacgacgtgcaggtgaccgcccccggcgccccccccctgcaggccgagacccccggcagcgccgtggactaccccctgcacgacctggtgctgcacaccaactacaccgccaccgtgagaggcctgagaggccccaacctgaccagccccgccagcatcaccttcaccaccggcctggaggcccccagagacctggaggccaaggaggtgacccccagaaccgccctgctgacctggaccgagccccccgtgagacccgccggctacctgctgagcttccacacccccggcggccagaaccaggagatcctgctgcccggcggcatcaccagccaccagctgctgggcctgttccccagcaccagctacaacgccagactgcaggccatgtggggccagagcctgctgccccccgtgagcaccagcttcaccaccggcggcctgagaatccccttccccagagactgcggcgaggagatgcagaacggcgccggcgccagcagaaccagcaccatcttcctgaacggcaacagagagagacccctgaacgtgttctgcgacatggagaccgacggcggcggctggctggtgttccagagaagaatggacggccagaccgacttctggagagactgggaggactacgcccacggcttcggcaacatcagcggcgagttctggctgggcaacgaggccctgcacagcctgacccaggccggcgactacagcatgagagtggacctgagagccggcgacgaggccgtgttcgcccagtacgacagcttccacgtggacagcgccgccgagtactacagactgcacctggagggctaccacggcaccgccggcgacagcatgagctaccacagcggcagcgtgttcagcgccagagacagagaccccaacagcctgctgatcagctgcgccgtgagctacagaggcgcctggtggtacagaaactgccactacgccaacctgaacggcctgtacggcagcaccgtggaccaccagggcgtgagctggtaccactggaagggcttcgagttcagcgtgcccttcaccgagatgaagctgagacccagaaacttcagaagccccgccggcggcggctag

SEQ ID NO: 13124 - DNA, 954 bp, synthetic construct
  misc_feature 1..954: note = Description of Artificial Sequence: Synthetic coding sequence
  source 1..954: mol_type = other DNA
atggccaagaacccccccgagaactgcgaggactgccacatcctgaacgccgaggccttcaagagcaagaagatctgcaagagcctgaagatctgcggcctggtgttcggcatcctggccctgaccctgatcgtgctgttctggggcagcaagcacttctggcccgaggtgcccaagaaggcctacgacatggagcacaccttctacagcaacggcgagaagaagaagatctacatggagatcgaccccgtgaccagaaccgagatcttcagaagcggcaacggcaccgacgagaccctggaggtgcacgacttcaagaacggctacaccggcatctacttcgtgggcctgcagaagtgcttcatcaagacccagatcaaggtgatccccgagttcagcgagcccgaggaggagatcgacgagaacgaggagatcaccaccaccttcttcgagcagagcgtgatctgggtgcccgccgagaagcccatcgagaacagagacttcctgaagaacagcaagatcctggagatctgcgacaacgtgaccatgtactggatcaaccccaccctgatcagcgtgagcgagctgcaggacttcgaggaggagggcgaggacctgcacttccccgccaacgagaagaagggcatcgagcagaacgagcagtgggtggtgccccaggtgaaggtggagaagaccagacacgccagacaggccagcgaggaggagctgcccatcaacgactacaccgagaacggcatcgagttcgaccccatgctggacgagagaggctactgctgcatctactgcagaagaggcaacagatactgcagaagagtgtgcgagcccctgctgggctactacccctacccctactgctaccagggcggcagagtgatctgcagagtgatcatgccctgcaactggtgggtggccagaatgctgggcagagtgtag

SEQ ID NO: 13125 - DNA, 1356 bp, synthetic construct
  misc_feature 1..1356: note = Description of Artificial Sequence: Synthetic coding sequence
  source 1..1356: mol_type = other DNA
atggccacccccctggtggccggccccgccgccctgagattcgccgccgccgccagctggcaggtggtgagaggcagatgcgtggagcacttccccagagtgctggagttcctgagaagcctgagagccgtggcccccggcctggtgagatacagacaccacgagagactgtgcatgggcctgaaggccaaggtggtggtggagctgatcctgcagggcagaccctgggcccaggtgctgaaggccctgaaccaccacttccccgagagcggccccatcgtgagagaccccaaggccaccaagcaggacctgagaaagatcctggaggcccaggagaccttctaccagcaggtgaagcagctgagcgaggcccccgtggacctggccagcaagctgcaggagctggagcaggagtacggcgagcccttcctggccgccatggagaagctgctgttcgagtacctgtgccagctggagaaggccctgcccaccccccaggcccagcagctgcaggacgtgctgagctggatgcagcccggcgtgagcatcaccagcagcctggcctggagacagtacggcgtggacatgggctggctgctgcccgagtgcagcgtgaccgacagcgtgaacctggccgagcccatggagcagaaccccccccagcagcagagactggccctgcacaaccccctgcccaaggccaagcccggcacccacctgccccagggccccagcagcagaacccaccccgagcccctggccggcagacacttcaacctggcccccctgggcagaagaagagtgcagagccagtgggccagcaccagaggcggccacaaggagagacccaccgtgatgctgttccccttcagaaacctgggcagccccacccaggtgatcagcaagcccgagagcaaggaggagcacgccatctacaccgccgacctggccatgggcaccagagccgccagcaccggcaagagcaagagcccctgccagaccctgggcggcagagccctgaaggagaaccccgtggacctgcccgccaccgagcagaaggagaactgcctggactgctacatggaccccctgagactgagcctgctgccccccagagccagaaagcccgtgtgcccccccagcctgtgcagcagcgtgatcaccatcggcgacctggtgctggacagcgacgaggaggagaacggccagggcgagggcaaggagagcctggagaactaccagaagaccaagttcgacaccctgatccccaccctgtgcgagtacctgccccccagcggccacggcgccatccccgtgagcagctgcgactgcagagacagcagcagacccctgtag

SEQ ID NO: 13126 - DNA, 1065 bp, synthetic construct
  misc_feature 1..1065: note = Description of Artificial Sequence: Synthetic coding sequence
  source 1..1065: mol_type = other DNA
atggccacccccctggtggccggccccgccgccctgagattcgccgccgccgccagctggcaggtggtgagaggcagatgcgtggagcacttccccagagtgctggagttcctgagaagcctgagagccgtggcccccggcctggtgagatacagacaccacgagagactgtgcatgggcctgaaggccaaggtggtggtggagctgatcctgcagggcagaccctgggcccaggtgctgaaggccctgaaccaccacttccccgagagcggccccatcgtgagagaccccaaggccaccaagcaggacctgagaaagatcctggaggcccaggagaccttctaccagcaggtgaagcagctgagcgaggcccccgtggacctggccagcaagctgcaggagctggagcaggagtacggcgagcccttcctggccgccatggagaagctgctgttcgagtacctgtgccagctggagaaggccctgcccaccccccaggcccagcagctgcaggacgtgctgagctggatgcagcccggcgtgagcatcaccagcagcctggcctggagacagtacggcgtggacatgggctggctgctgcccgagtgcagcgtgaccgacagcgtgaacctggccgagcccatggagcagaaccccccccagcagcagagactggccctgcacaaccccctgcccaaggccaagcccggcacccacctgccccagggccccagcagcagaacccaccccgagcccctggccggcagacacttcaacctggcccccctgggcagaagaagagtgcagagccagtgggccagcaccagaggcggccacaaggagagacccaccgtgatgctgttccccttcagaaacctgggcagccccacccaggtgatcagcaagcccgagagcaaggaggagcacgccatctacaccgccgacctggccatgggcaccagagccgccagcaccggcaagagcaagagcccctgccagaccctgggcggcagagccctgaaggagaaccccgtggacctgcccgccaccgagcagaaggagtag

SEQ ID NO: 13127 - DNA, 423 bp, synthetic construct
  misc_feature 1..423: note = Description of Artificial Sequence: Synthetic coding sequence
  source 1..423: mol_type = other DNA
atggagcagaaccccccccagcagcagagactggccctgcacaaccccctgcccaaggccaagcccggcacccacctgccccagggccccagcagcagaacccaccccgagcccctggccggcagacacttcaacctggcccccctgggcagaagaagagtgcagagccagtgggccagcaccagaggcggccacaaggagagacccaccgtgatgctgttccccttcagaaacctgggcagccccacccaggtgatcagcaagcccgagagcaaggaggagcacgccatctacaccgccgacctggccatgggcaccagagccgccagcaccggcaagagcaagagcccctgccagaccctgggcggcagagccctgaaggagaaccccgtggacctgcccgccaccgagcagaaggagtag

SEQ ID NO: 13128 - DNA, 1251 bp, synthetic construct
  misc_feature 1..1251: note = Description of Artificial Sequence: Synthetic coding sequence
  source 1..1251: mol_type = other DNA
atggccacccccctggtggccggccccgccgccctgagattcgccgccgccgccagctggcaggtggtgagaggcagatgcgtggagcacttccccagagtgctggagttcctgagaagcctgagagccgtggcccccggcctggtgagatacagacaccacgagagactgtgcatgggcctgaaggccaagaccaagcaggacctgagaaagatcctggaggcccaggagaccttctaccagcaggtgaagcagctgagcgaggcccccgtggacctggccagcaagctgcaggagctggagcaggagtacggcgagcccttcctggccgccatggagaagctgctgttcgagtacctgtgccagctggagaaggccctgcccaccccccaggcccagcagctgcaggacgtgctgagctggatgcagcccggcgtgagcatcaccagcagcctggcctggagacagtacggcgtggacatgggctggctgctgcccgagtgcagcgtgaccgacagcgtgaacctggccgagcccatggagcagaaccccccccagcagcagagactggccctgcacaaccccctgcccaaggccaagcccggcacccacctgccccagggccccagcagcagaacccaccccgagcccctggccggcagacacttcaacctggcccccctgggcagaagaagagtgcagagccagtgggccagcaccagaggcggccacaaggagagacccaccgtgatgctgttccccttcagaaacctgggcagccccacccaggtgatcagcaagcccgagagcaaggaggagcacgccatctacaccgccgacctggccatgggcaccagagccgccagcaccggcaagagcaagagcccctgccagaccctgggcggcagagccctgaaggagaaccccgtggacctgcccgccaccgagcagaaggagaactgcctggactgctacatggaccccctgagactgagcctgctgccccccagagccagaaagcccgtgtgcccccccagcctgtgcagcagcgtgatcaccatcggcgacctggtgctggacagcgacgaggaggagaacggccagggcgagggcaaggagagcctggagaactaccagaagaccaagttcgacaccctgatccccaccctgtgcgagtacctgccccccagcggccacggcgccatccccgtgagcagctgcgactgcagagacagcagcagacccctgtag

SEQ ID NO: 13129 - DNA, 3498 bp, synthetic construct
  misc_feature 1..3498: note = Description of Artificial Sequence: Synthetic coding sequence
  source 1..3498: mol_type = other DNA
atggagcaggacagaaccaaccacgtggagggcaacagactgagccccttcctgatccccagcccccccatctgccagaccgagcccctggccaccaagctgcagaacggcagccccctgcccgagagagcccaccccgaggtgaacggcgacaccaagtggcacagcttcaagagctactacggcatcccctgcatgaagggcagccagaacagcagagtgagccccgacttcacccaggagagcagaggctacagcaagtgcctgcagaacggcggcatcaagagaaccgtgagcgagcccagcctgagcggcctgctgcagatcaagaagctgaagcaggaccagaaggccaacggcgagagaagaaacttcggcgtgagccaggagagaaaccccggcgagagcagccagcccaacgtgagcgacctgagcgacaagaaggagagcgtgagcagcgtggcccaggagaacgccgtgaaggacttcaccagcttcagcacccacaactgcagcggccccgagaaccccgagctgcagatcctgaacgagcaggagggcaagagcgccaactaccacgacaagaacatcgtgctgctgaagaacaaggccgtgctgatgcccaacggcgccaccgtgagcgccagcagcgtggagcacacccacggcgagctgctggagaagaccctgagccagtactaccccgactgcgtgagcatcgccgtgcagaagaccaccagccacatcaacgccatcaacagccaggccaccaacgagctgagctgcgagatcacccaccccagccacaccagcggccagatcaacagcgcccagaccagcaacagcgagctgccccccaagcccgccgccgtggtgagcgaggcctgcgacgccgacgacgccgacaacgccagcaagctggccgccatgctgaacacctgcagcttccagaagcccgagcagctgcagcagcagaagagcgtgttcgagatctgccccagccccgccgagaacaacatccagggcaccaccaagctggccagcggcgaggagttctgcagcggcagcagcagcaacctgcaggcccccggcggcagcagcgagagatacctgaagcagaacgagatgaacggcgcctacttcaagcagagcagcgtgttcaccaaggacagcttcagcgccaccaccaccccccccccccccagccagctgctgctgagcccccccccccccctgccccaggtgccccagctgcccagcgagggcaagagcaccctgaacggcggcgtgctggaggagcaccaccactaccccaaccagagcaacaccaccctgctgagagaggtgaagatcgagggcaagcccgaggccccccccagccagagccccaaccccagcacccacgtgtgcagccccagccccatgctgagcgagagaccccagaacaactgcgtgaacagaaacgacatccagaccgccggcaccatgaccgtgcccctgtgcagcgagaagaccagacccatgagcgagcacctgaagcacaacccccccatcttcggcagcagcggcgagctgcaggacaactgccagcagctgatgagaaacaaggagcaggagatcctgaagggcagagacaaggagcagaccagagacctggtgccccccacccagcactacctgaagcccggctggatcgagctgaaggcccccagattccaccaggccgagagccacctgaagagaaacgaggccagcctgcccagcatcctgcagtaccagcccaacctgagcaaccagatgaccagcaagcagtacaccggcaacagcaacatgcccggcggcctgcccagacaggcctacacccagaagaccacccagctggagcacaagagccagatgtaccaggtggagatgaaccagggccagagccagggcaccgtggaccagcacctgcagttccagaagcccagccaccaggtgcacttcagcaagaccgaccacctgcccaaggcccacgtgcagagcctgtgcggcaccagattccacttccagcagagagccgacagccagaccgagaagctgatgagccccgtgctgaagcagcacctgaaccagcaggccagcgagaccgagcccttcagcaacagccacctgctgcagcacaagccccacaagcaggccgcccagacccagcccagccagagcagccacctgccccagaaccagcagcagcagcagaagctgcagatcaagaacaaggaggagatcctgcagaccttcccccacccccagagcaacaacgaccagcagagagagggcagcttcttcggccagaccaaggtggaggagtgcttccacggcgagaaccagtacagcaagagcagcgagttcgagacccacaacgtgcagatgggcctggaggaggtgcagaacatcaacagaagaaacagcccctacagccagaccatgaagagcagcgcctgcaagatccaggtgagctgcagcaacaacacccacctggtgagcgagaacaaggagcagaccacccaccccgagctgttcgccggcaacaagacccagaacctgcaccacatgcagtacttccccaacaacgtgatccccaagcaggacctgctgcacagatgcttccaggagcaggagcagaagagccagcaggccagcgtgctgcagggctacaagaacagaaaccaggacatgagcggccagcaggccgcccagctggcccagcagagatacctgatccacaaccacgccaacgtgttccccgtgcccgaccagggcggcagccacacccagacccccccccagaaggacacccagaagcacgccgccctgagatggcacctgctgcagaagcaggagcagcagcagacccagcagccccagaccgagagctgccacagccagatgcacagacccatcaaggtggagcccggctgcaagccccacgcctgcatgcacaccgccccccccgagaacaagacctggaagaaggtgaccaagcaggagaacccccccgccagctgcgacaacgtgcagcagaagagcatcatcgagaccatggagcagcacctgaagcagttccacgccaagagcctgttcgaccacaaggccctgaccctgaagagccagaagcaggtgaaggtggagatgagcggccccgtgaccgtgctgaccagacagaccaccgccgccgagctggacagccacacccccgccctggagcagcagaccaccagcagcgagaagacccccaccaagagaaccgccgccagcgtgctgaacaacttcatcgagagccccagcaagctgctggacacccccatcaagaacctgctggacacccccgtgaagacccagtacgacttccccagctgcagatgcgtgggcaagtgccagaagtgcaccgagacccacggcgtgtaccccgagctggccaacctgagcagcgacatgggcttcagcttcttcttctag

SEQ ID NO: 13130 - DNA, 6009 bp, synthetic construct
  misc_feature 1..6009: note = Description of Artificial Sequence: Synthetic coding sequence
  source 1..6009: mol_type = other DNA
atggagcaggacagaaccaaccacgtggagggcaacagactgagccccttcctgatccccagcccccccatctgccagaccgagcccctggccaccaagctgcagaacggcagccccctgcccgagagagcccaccccgaggtgaacggcgacaccaagtggcacagcttcaagagctactacggcatcccctgcatgaagggcagccagaacagcagagtgagccccgacttcacccaggagagcagaggctacagcaagtgcctgcagaacggcggcatcaagagaaccgtgagcgagcccagcctgagcggcctgctgcagatcaagaagctgaagcaggaccagaaggccaacggcgagagaagaaacttcggcgtgagccaggagagaaaccccggcgagagcagccagcccaacgtgagcgacctgagcgacaagaaggagagcgtgagcagcgtggcccaggagaacgccgtgaaggacttcaccagcttcagcacccacaactgcagcggccccgagaaccccgagctgcagatcctgaacgagcaggagggcaagagcgccaactaccacgacaagaacatcgtgctgctgaagaacaaggccgtgctgatgcccaacggcgccaccgtgagcgccagcagcgtggagcacacccacggcgagctgctggagaagaccctgagccagtactaccccgactgcgtgagcatcgccgtgcagaagaccaccagccacatcaacgccatcaacagccaggccaccaacgagctgagctgcgagatcacccaccccagccacaccagcggccagatcaacagcgcccagaccagcaacagcgagctgccccccaagcccgccgccgtggtgagcgaggcctgcgacgccgacgacgccgacaacgccagcaagctggccgccatgctgaacacctgcagcttccagaagcccgagcagctgcagcagcagaagagcgtgttcgagatctgccccagccccgccgagaacaacatccagggcaccaccaagctggccagcggcgaggagttctgcagcggcagcagcagcaacctgcaggcccccggcggcagcagcgagagatacctgaagcagaacgagatgaacggcgcctacttcaagcagagcagcgtgttcaccaaggacagcttcagcgccaccaccaccccccccccccccagccagctgctgctgagcccccccccccccctgccccaggtgccccagctgcccagcgagggcaagagcaccctgaacggcggcgtgctggaggagcaccaccactaccccaaccagagcaacaccaccctgctgagagaggtgaagatcgagggcaagcccgaggccccccccagccagagccccaaccccagcacccacgtgtgcagccccagccccatgctgagcgagagaccccagaacaactgcgtgaacagaaacgacatccagaccgccggcaccatgaccgtgcccctgtgcagcgagaagaccagacccatgagcgagcacctgaagcacaacccccccatcttcggcagcagcggcgagctgcaggacaactgccagcagctgatgagaaacaaggagcaggagatcctgaagggcagagacaaggagcagaccagagacctggtgccccccacccagcactacctgaagcccggctggatcgagctgaaggcccccagattccaccaggccgagagccacctgaagagaaacgaggccagcctgcccagcatcctgcagtaccagcccaacctgagcaaccagatgaccagcaagcagtacaccggcaacagcaacatgcccggcggcctgcccagacaggcctacacccagaagaccacccagctggagcacaagagccagatgtaccaggtggagatgaaccagggccagagccagggcaccgtggaccagcacctgcagttccagaagcccagccaccaggtgcacttcagcaagaccgaccacctgcccaaggcccacgtgcagagcctgtgcggcaccagattccacttccagcagagagccgacagccagaccgagaagctgatgagccccgtgctgaagcagcacctgaaccagcaggccagcgagaccgagcccttcagcaacagccacctgctgcagcacaagccccacaagcaggccgcccagacccagcccagccagagcagccacctgccccagaaccagcagcagcagcagaagctgcagatcaagaacaaggaggagatcctgcagaccttcccccacccccagagcaacaacgaccagcagagagagggcagcttcttcggccagaccaaggtggaggagtgcttccacggcgagaaccagtacagcaagagcagcgagttcgagacccacaacgtgcagatgggcctggaggaggtgcagaacatcaacagaagaaacagcccctacagccagaccatgaagagcagcgcctgcaagatccaggtgagctgcagcaacaacacccacctggtgagcgagaacaaggagcagaccacccaccccgagctgttcgccggcaacaagacccagaacctgcaccacatgcagtacttccccaacaacgtgatccccaagcaggacctgctgcacagatgcttccaggagcaggagcagaagagccagcaggccagcgtgctgcagggctacaagaacagaaaccaggacatgagcggccagcaggccgcccagctggcccagcagagatacctgatccacaaccacgccaacgtgttccccgtgcccgaccagggcggcagccacacccagacccccccccagaaggacacccagaagcacgccgccctgagatggcacctgctgcagaagcaggagcagcagcagacccagcagccccagaccgagagctgccacagccagatgcacagacccatcaaggtggagcccggctgcaagccccacgcctgcatgcacaccgccccccccgagaacaagacctggaagaaggtgaccaagcaggagaacccccccgccagctgcgacaacgtgcagcagaagagcatcatcgagaccatggagcagcacctgaagcagttccacgccaagagcctgttcgaccacaaggccctgaccctgaagagccagaagcaggtgaaggtggagatgagcggccccgtgaccgtgctgaccagacagaccaccgccgccgagctggacagccacacccccgccctggagcagcagaccaccagcagcgagaagacccccaccaagagaaccgccgccagcgtgctgaacaacttcatcgagagccccagcaagctgctggacacccccatcaagaacctgctggacacccccgtgaagacccagtacgacttccccagctgcagatgcgtggagcagatcatcgagaaggacgagggccccttctacacccacctgggcgccggccccaacgtggccgccatcagagagatcatggaggagagattcggccagaagggcaaggccatcagaatcgagagagtgatctacaccggcaaggagggcaagagcagccagggctgccccatcgccaagtgggtggtgagaagaagcagcagcgaggagaagctgctgtgcctggtgagagagagagccggccacacctgcgaggccgccgtgatcgtgatcctgatcctggtgtgggagggcatccccctgagcctggccgacaagctgtacagcgagctgaccgagaccctgagaaagtacggcaccctgaccaacagaagatgcgccctgaacgaggagagaacctgcgcctgccagggcctggaccccgagacctgcggcgccagcttcagcttcggctgcagctggagcatgtactacaacggctgcaagttcgccagaagcaagatccccagaaagttcaagctgctgggcgacgaccccaaggaggaggagaagctggagagccacctgcagaacctgagcaccctgatggcccccacctacaagaagctggcccccgacgcctacaacaaccagatcgagtacgagcacagagcccccgagtgcagactgggcctgaaggagggcagacccttcagcggcgtgaccgcctgcctggacttctgcgcccacgcccacagagacctgcacaacatgcagaacggcagcaccctggtgtgcaccctgaccagagaggacaacagagagttcggcggcaagcccgaggacgagcagctgcacgtgctgcccctgtacaaggtgagcgacgtggacgagttcggcagcgtggaggcccaggaggagaagaagagaagcggcgccatccaggtgctgagcagcttcagaagaaaggtgagaatgctggccgagcccgtgaagacctgcagacagagaaagctggaggccaagaaggccgccgccgagaagctgagcagcctggagaacagcagcaacaagaacgagaaggagaagagcgcccccagcagaaccaagcagaccgagaacgccagccaggccaagcagctggccgagctgctgagactgagcggccccgtgatgcagcagagccagcagccccagcccctgcagaagcagcccccccagccccagcagcagcagagaccccagcagcagcagccccaccacccccagaccgagagcgtgaacagctacagcgccagcggcagcaccaacccctacatgagaagacccaaccccgtgagcccctaccccaacagcagccacaccagcgacatctacggcagcaccagccccatgaacttctacagcaccagcagccaggccgccggcagctacctgaacagcagcaaccccatgaacccctaccccggcctgctgaaccagaacacccagtaccccagctaccagtgcaacggcaacctgagcgtggacaactgcagcccctacctgggcagctacagcccccagagccagcccatggacctgtacagataccccagccaggaccccctgagcaagctgagcctgccccccatccacaccctgtaccagcccagattcggcaacagccagagcttcaccagcaagtacctgggctacggcaaccagaacatgcagggcgacggcttcagcagctgcaccatcagacccaacgtgcaccacgtgggcaagctgcccccctaccccacccacgagatggacggccacttcatgggcgccaccagcagactgccccccaacctgagcaaccccaacatggactacaagaacggcgagcaccacagccccagccacatcatccacaactacagcgccgcccccggcatgttcaacagcagcctgcacgccctgcacctgcagaacaaggagaacgacatgctgagccacaccgccaacggcctgagcaagatgctgcccgccctgaaccacgacagaaccgcctgcgtgcagggcggcctgcacaagctgagcgacgccaacggccaggagaagcagcccctggccctggtgcagggcgtggccagcggcgccgaggacaacgacgaggtgtggagcgacagcgagcagagcttcctggaccccgacatcggcggcgtggccgtggcccccacccacggcagcatcctgatcgagtgcgccaagagagagctgcacgccaccacccccctgaagaaccccaacagaaaccaccccaccagaatcagcctggtgttctaccagcacaagagcatgaacgagcccaagcacggcctggccctgtgggaggccaagatggccgagaaggccagagagaaggaggaggagtgcgagaagtacggccccgactacgtgccccagaagagccacggcaagaaggtgaagagagagcccgccgagccccacgagaccagcgagcccacctacctgagattcatcaagagcctggccgagagaaccatgagcgtgaccaccgacagcaccgtgaccaccagcccctacgccttcaccagagtgaccggcccctacaacagatacatctag

SEQ ID NO: 13131 - DNA, 3498 bp, synthetic construct; identical to SEQ ID NO: 13129
  misc_feature 1..3498: note = Description of Artificial Sequence: Synthetic coding sequence
  source 1..3498: mol_type = other DNA

SEQ ID NO: 13132 - DNA, 333 bp, synthetic construct
  misc_feature 1..333: note = Description of Artificial Sequence: Synthetic coding sequence
  source 1..333: mol_type = other DNA
atggagcaggacagaaccaaccacgtggagggcaacagactgagccccttcctgatccccagcccccccatctgccagaccgagcccctggccaccaagctgcagaacggcagccccctgcccgagagagcccaccccgaggtgaacggcgacaccaagtggcacagcttcaagagctactacggcatcccctgcatgaagggcagccagaacagcagagtgagccccgacttcacccaggagagcagaggctacagcaagtgcctgcagaacggcggcatcaagagaaccgtgagcgagcccagcctgagcggcctgctgcagatcaagtag

SEQ ID NO: 13133 - DNA, 1914 bp, synthetic construct
  misc_feature 1..1914: note = Description of Artificial Sequence: Synthetic coding sequence
  source 1..1914: mol_type = other DNA
atggagcaggacagaaccaaccacgtggagggcaacagactgagccccttcctgatccccagcccccccatctgccagaccgagcccctggccaccaagctgcagaacggcagccccctgcccgagagagcccaccccgaggtgaacggcgacaccaagtggcacagcttcaagagctactacggcatcccctgcatgaagggcagccagaacagcagagtgagccccgacttcacccaggagagcagaggctacagcaagtgcctgcagaacggcggcatcaagagaaccgtgagcgagcccagcctgagcggcctgctgcagatcaagaagctgaagcaggaccagaaggccaacggcgagagaagaaacttcggcgtgagccaggagagaaaccccggcgagagcagccagcccaacgtgagcgacctgagcgacaagaaggagagcgtgagcagcgtggcccaggagaacgccgtgaaggacttcaccagcttcagcacccacaactgcagcggccccgagaaccccgagctgcagatcctgaacgagcaggagggcaagagcgccaactaccacgacaagaacatcgtgctgctgaagaacaaggccgtgctgatgcccaacggcgccaccgtgagcgccagcagcgtggagcacacccacggcgagctgctggagaagaccctgagccagtactaccccgactgcgtgagcatcgccgtgcagaagaccaccagccacatcaacgccatcaacagccaggccaccaacgagctgagctgcgagatcacccaccccagccacaccagcggccagatcaacagcgcccagaccagcaacagcgagctgccccccaagcccgccgccgtggtgagcgaggcctgcgacgccgacgacgccgacaacgccagcaagctggccgccatgctgaacacctgcagcttccagaagcccgagcagctgcagcagcagaagagcgtgttcgagatctgccccagccccgccgagaacaacatccagggcaccaccaagctggccagcggcgaggagttctgcagcggcagcagcagcaacctgcaggcccccggcggcagcagcgagagatacctgaagcagaacgagatgaacggcgcctacttcaagcagagcagcgtgttcaccaaggacagcttcagcgccaccaccaccccccccccccccagccagctgctgctgagcccccccccccccctgccccaggtgccccagctgcccagcgagggcaagagcaccctgaacggcggcgtgctggaggagcaccaccactaccccaaccagagcaacaccaccctgctgagagaggtgaagatcgagggcaagcccgaggccccccccagccagagccccaaccccagcacccacgtgtgcagccccagccccatgctgagcgagagaccccagaacaactgcgtgaacagaaacgacatccagaccgccggcaccatgaccgtgcccctgtgcagcgagaagaccagacccatgagcgagcacctgaagcacaacccccccatcttcggcagcagcggcgagctgcaggacaactgccagcagctgatgagaaacaaggagcaggagatcctgaagggcagagacaaggagcagaccagagacctggtgccccccacccagcactacctgaagcccggctggatcgagctgaaggcccccagattccaccaggccgagagccacctgaagagaaacgaggccagcctgcccagcatcctgcagtaccagcccaacctgagcaaccagatgaccagcaagcagtacaccggcaacagcaacatgcccggcggcctgcccagacaggcctacacccagaagaccacccagctgagcaccagccacaagtgcaccaagctgaagtag

SEQ ID NO: 13134 - DNA, 6009 bp, synthetic construct; identical to SEQ ID NO: 13130
  misc_feature 1..6009: note = Description of Artificial Sequence: Synthetic coding sequence
  source 1..6009: mol_type = other DNA

SEQ ID NO: 13135 - DNA, 3585 bp, synthetic construct
  misc_feature 1..3585: note = Description of Artificial Sequence: Synthetic coding sequence
  source 1..3585: mol_type = other DNA
atggagcaggacagaaccaaccacgtggagggcaacagactgagccccttcctgatccccagcccccccatctgccagaccgagcccctggccaccaagctgcagaacggcagccccctgcccgagagagcccaccccgaggtgaacggcgacaccaagtggcacagcttcaagagctactacggcatcccctgcatgaagggcagccagaacagcagagtgagccccgacttcacccaggagagcagaggctacagcaagtgcctgcagaacggcggcatcaagagaaccgtgagcgagcccagcctgagcggcctgctgcagatcaagaagctgaagcaggaccagaaggccaacggcgagagaagaaacttcggcgtgagccaggagagaaaccccggcgagagcagccagcccaacgtgagcgacctgagcgacaagaaggagagcgtgagcagcgtggcccaggagaacgccgtgaaggacttcaccagcttcagcacccacaactgcagcggccccgagaaccccgagctgcagatcctgaacgagcaggagggcaagagcgccaactaccacgacaagaacatcgtgctgctgaagaacaaggccgtgctgatgcccaacggcgccaccgtgagcgccagcagcgtggagcacacccacggcgagctgctggagaagaccctgagccagtactaccccgactgcgtgagcatcgccgtgcagaagaccaccagccacatcaacgccatcaacagccaggccaccaacgagctgagctgcgagatcacccaccccagccacaccagcggccagatcaacagcgcccagaccagcaacagcgagctgccccccaagcccgccgccgtggtgagcgaggcctgcgacgccgacgacgccgacaacgccagcaagctggccgccatgctgaacacctgcagcttccagaagcccgagcagctgcagcagcagaagagcgtgttcgagatctgccccagccccgccgagaacaacatccagggcaccaccaagctggccagcggcgaggagttctgcagcggcagcagcagcaacctgcaggcccccggcggcagcagcgagagatacctgaagcagaacgagatgaacggcgcctacttcaagcagagcagcgtgttcaccaaggacagcttcagcgccaccaccaccccccccccccccagccagctgctgctgagcccccccccccccctgccccaggtgccccagctgcccagcgagggcaagagcaccctgaacggcggcgtgctggaggagcaccaccactaccccaaccagagcaacaccaccctgctgagagaggtgaagatcgagggcaagcccgaggccccccccagccagagccccaaccccagcacccacgtgtgcagccccagccccatgctgagcgagagaccccagaacaactgcgtgaacagaaacgacatccagaccgccggcaccatgaccgtgcccctgtgcagcgagaagaccagacccatgagcgagcacctgaagcacaacccccccatcttcggcagcagcggcgagctgcaggacaactgccagcagctgatgagaaacaaggagcaggagatcctgaagggcagagacaaggagcagaccagagacctggtgccccccacccagcactacctgaagcccggctggatcgagctgaaggcccccagattccaccaggccgagagccacctgaagagaaacgaggccagcctgcccagcatcctgcagtaccagcccaacctgagcaaccagatgaccagcaagcagtacaccggcaacagcaacatgcccggcggcctgcccagacaggcctacacccagaagaccacccagctggagcacaagagccagatgtaccaggtggagatgaaccagggccagagccagggcaccgtggaccagcacctgcagttccagaagcccagccaccaggtgcacttcagcaagaccgaccacctgcccaaggcccacgtgcagagcctgtgcggcaccagattccacttccagcagagagccgacagccagaccgagaagctgatgagccccgtgctgaagcagcacctgaaccagcaggccagcgagaccgagcccttcagcaacagccacctgctgcagcacaagccccacaagcaggccgcccagacccagcccagccagagcagccacctgccccagaaccagcagcagcagcagaagctgcagatcaagaacaaggaggagatcctgcagaccttcccccacccccagagcaacaacgaccagcagagagagggcagcttcttcggccagaccaaggtggaggagtgcttccacggcgagaaccagtacagcaagagcagcgagttcgagacccacaacgtgcagatgggcctggaggaggtgcagaacatcaacagaagaaacagcccctacagccagaccatgaagagcagcgcctgcaagatccaggtgagctgcagcaacaacacccacctggtgagcgagaacaaggagcagaccacccaccccgagctgttcgccggcaacaagacccagaacctgcaccacatgcagtacttccccaacaacgtgatccccaagcaggacctgctgcacagatgcttccaggagcaggagcagaagagccagcaggccagcgtgctgcagggctacaagaacagaaaccaggacatgagcggccagcaggccgcccagctggcccagcagagatacctgatccacaaccacgccaacgtgttccccgtgcccgaccagggcggcagccacacccagacccccccccagaaggacacccagaagcacgccgccctgagatggcacctgctgcagaagcaggagcagcagcagacccagcagccccagaccgagagctgccacagccagatgcacagacccatcaaggtggagcccggctgcaagccccacgcctgcatgcacaccgccccccccgagaacaagacctggaagaaggtgaccaagcaggagaacccccccgccagctgcgacaacgtgcagcagaagagcatcatcgagaccatggagcagcacctgaagcagttccacgccaagagcctgttcgaccacaaggccctgaccctgaagagccagaagcaggtgaaggtggagatgagcggccccgtgaccgtgctgaccagacagaccaccgccgccgagctggacagccacacccccgccctggagcagcagaccaccagcagcgagaagacccccaccaagagaaccgccgccagcgtgctgaacaacttcatcgagagccccagcaagctgctggacacccccatcaagaacctgctggacacccccgtgaagacccagtacgacttccccagctgcagatgcgtgggcctggacagaagagtgaagctgctgggcctgaaggagagcagcatcctggtgaagaaggccaaggtgctgagagacgtgctgctgctgagcggctggttcgccgaggccgccgtgaagagaagctactgcgtgtggtgcggcagcgagctggccacccccgtgagactgcagtag

SEQ ID NO: 13136 - DNA, 6072 bp, synthetic construct
  misc_feature 1..6072: note = Description of Artificial Sequence: Synthetic coding sequence
  source 1..6072: mol_type = other DNA
atgatccaggaggagcagatccagctggagggcagcctggtggacggccccgaggccagcctgatggagcaggacagaaccaaccacgtggagggcaacagactgagccccttcctgatccccagcccccccatctgccagaccgagcccctggccaccaagctgcagaacggcagccccctgcccgagagagcccaccccgaggtgaacggcgacaccaagtggcacagcttcaagagctactacggcatcccctgcatgaagggcagccagaacagcagagtgagccccgacttcacccaggagagcagaggctacagcaagtgcctgcagaacggcggcatcaagagaaccgtgagcgagcccagcctgagcggcctgctgcagatcaagaagctgaagcaggaccagaaggccaacggcgagagaagaaacttcggcgtgagccaggagagaaaccccggcgagagcagccagcccaacgtgagcgacctgagcgacaagaaggagagcgtgagcagcgtggcccaggagaacgccgtgaaggacttcaccagcttcagcacccacaactgcagcggccccgagaaccccgagctgcagatcctgaacgagcaggagggcaagagcgccaactaccacgacaagaacatcgtgctgctgaagaacaaggccgtgctgatgcccaacggcgccaccgtgagcgccagcagcgtggagcacacccacggcgagctgctggagaagaccctgagccagtactaccccgactgcgtgagcatcgccgtgcagaagaccaccagccacatcaacgccatcaacagccaggccaccaacgagctgagctgcgagatcacccaccccagccacaccagcggccagatcaacagcgcccagaccagcaacagcgagctgccccccaagcccgccgccgtggtgagcgaggcctgcgacgccgacgacgccgacaacgccagcaagctggccgccatgctgaacacctgcagcttccagaagcccgagcagctgcagcagcagaagagcgtgttcgagatctgccccagccccgccgagaacaacatccagggcaccaccaagctggccagcggcgaggagttctgcagcggcagcagcagcaacctgcaggcccccggcggcagcagcgagagatacctgaagcagaacgagatgaacggcgcctacttcaagcagagcagcgtgttcaccaaggacagcttcagcgccaccaccaccccccccccccccagccagctgctgctgagcccccccccccccctgccccaggtgccccagctgcccagcgagggcaagagcaccctgaacggcggcgtgctggaggagcaccaccactaccccaaccagagcaacaccaccctgctgagagaggtgaagatcgagggcaagcccgaggccccccccagccagagccccaaccccagcacccacgtgtgcagccccagccccatgctgagcgagagaccccagaacaactgcgtgaacagaaacgacatccagaccgccggcaccatgaccgtgcccctgtgcagcgagaagaccagacccatgagcgagcacctgaagcacaacccccccatcttcggcagcagcggcgagctgcaggacaactgccagcagctgatgagaaacaaggagcaggagatcctgaagggcagagacaaggagcagaccagagacctggtgccccccacccagcactacctgaagcccggctggatcgagctgaaggcccccagattccaccaggccgagagccacctgaagagaaacgaggccagcctgcccagcatcctgcagtaccagcccaacctgagcaaccagatgaccagcaagcagtacaccggcaacagcaacatgcccggcggcctgcccagacaggcctacacccagaagaccacccagctggagcacaagagccagatgtaccaggtggagatgaaccagggccagagccagggcaccgtggaccagcacctgcagttccagaagcccagccaccaggtgcacttcagcaagaccgaccacctgcccaaggcccacgtgcagagcctgtgcggcaccagattccacttccagcagagagccgacagccagaccgagaagctgatgagccccgtgctgaagcagcacctgaaccagcaggccagcgagaccgagcccttcagcaacagccacctgctgcagcacaagccccacaagcaggccgcccagacccagcccagccagagcagccacctgccccagaaccagcagcagcagcagaagctgcagatcaagaacaaggaggagatcctgcagaccttcccccacccccagagcaacaacgaccagcagagagagggcagcttcttcggccagaccaaggtggaggagtgcttccacggcgagaaccagtacagcaagagcagcgagttcgagacccacaacgtgcagatgggcctggaggaggtgcagaacatcaacagaagaaacagcccctacagccagaccatgaagagcagcgcctgcaagatccaggtgagctgcagcaacaacacccacctggtgagcgagaacaaggagcagaccacccaccccgagctgttcgccggcaacaagacccagaacctgcaccacatgcagtacttccccaacaacgtgatccccaagcaggacctgctgcacagatgcttccaggagcaggagcagaagagccagcaggccagcgtgctgcagggctacaagaacagaaaccaggacatgagcggccagcaggccgcccagctggcccagcagagatacctgatccacaaccacgccaacgtgttccccgtgcccgaccagggcggcagccacacccagacccccccccagaaggacacccagaagcacgccgccctgagatggcacctgctgcagaagcaggagcagcagcagacccagcagccccagaccgagagctgccacagccagatgcacagacccatcaaggtggagcccggctgcaagccccacgcctgcatgcacaccgccccccccgagaacaagacctggaagaaggtgaccaagcaggagaacccccccgccagctgcgacaacgtgcagcagaagagcatcatcgagaccatggagcagcacctgaagcagttccacgccaagagcctgttcgaccacaaggccctgaccctgaagagccagaagcaggtgaaggtggagatgagcggccccgtgaccgtgctgaccagacagaccaccgccgccgagctggacagccacacccccgccctggagcagcagaccaccagcagcgagaagacccccaccaagagaaccgccgccagcgtgctgaacaacttcatcgagagccccagcaagctgctggacacccccatcaagaacctgctggacacccccgtgaagacccagtacgacttccccagctgcagatgcgtggagcagatcatcgagaaggacgagggccccttctacacccacctgggcgccggccccaacgtggccgccatcagagagatcatggaggagagattcggccagaagggcaaggccatcagaatcgagagagtgatctacaccggcaaggagggcaagagcagccagggctgccccatcgccaagtgggtggtgagaagaagcagcagcgaggagaagctgctgtgcctggtgagagagagagccggccacacctgcgaggccgccgtgatcgtgatcctgatcctggtgtgggagggcatccccctgagcctggccgacaagctgtacagcgagctgaccgagaccctgagaaagtacggcaccctgaccaacagaagatgcgccctgaacgaggagagaacctgcgcctgccagggcctggaccccgagacctgcggcgccagcttcagcttcggctgcagctggagcatgtactacaacggctgcaagttcgccagaagcaagatccccagaaagttcaagctgctgggcgacgaccccaaggaggaggagaagctggagagccacctgcagaacctgagcaccctgatggcccccacctacaagaagctggcccccgacgcctacaacaaccagatcgagtacgagcacagagcccccgagtgcagactgggcctgaaggagggcagacccttcagcggcgtgaccgcctgcctggacttctgcgcccacgcccacagagacctgcacaacatgcagaacggcagcaccctggtgtgcaccctgaccagagaggacaacagagagttcggcggcaagcccgaggacgagcagctgcacgtgctgcccctgtacaaggtgagcgacgtggacgagttcggcagcgtggaggcccaggaggagaagaagagaagcggcgccatccaggtgctgagcagcttcagaagaaaggtgagaatgctggccgagcccgtgaagacctgcagacagagaaagctggaggccaagaaggccgccgccgagaagctgagcagcctggagaacagcagcaacaagaacgagaaggagaagagcgcccccagcagaaccaagcagaccgagaacgccagccaggccaagcagctggccgagctgctgagactgagcggccccgtgatgcagcagagccagcagccccagcccctgcagaagcagcccccccagccccagcagcagcagagaccccagcagcagcagccccaccacccccagaccgagagcgtgaacagctacagcgccagcggcagcaccaacccctacatgagaagacccaaccccgtgagcccctaccccaacagcagccacaccagcgacatctacggcagcaccagccccatgaacttctacagcaccagcagccaggccgccggcagctacctgaacagcagcaaccccatgaacccctaccccggcctgctgaaccagaacacccagtaccccagctaccagtgcaacggcaacctgagcgtggacaactgcagcccctacctgggcagctacagcccccagagccagcccatggacctgtacagataccccagccaggaccccctgagcaagctgagcctgccccccatccacaccctgtaccagcccagattcggcaacagccagagcttcaccagcaagtacctgggctacggcaaccagaacatgcagggcgacggcttcagcagctgcaccatcagacccaacgtgcaccacgtgggcaagctgcccccctaccccacccacgagatggacggccacttcatgggcgccaccagcagactgccccccaacctgagcaaccccaacatggactacaagaacggcgagcaccacagccccagccacatcatccacaactacagcgccgcccccggcatgttcaacagcagcctgcacgccctgcacctgcagaacaaggagaacgacatgctgagccacaccgccaacggcctgagcaagatgctgcccgccctgaaccacgacagaaccgcctgcgtgcagggcggcctgcacaagctgagcgacgccaacggccaggagaagcagcccctggccctggtgcagggcgtggccagcggcgccgaggacaacgacgaggtgtggagcgacagcgagcagagcttcctggaccccgacatcggcggcgtggccgtggcccccacccacggcagcatcctgatcgagtgcgccaagagagagctgcacgccaccacccccctgaagaaccccaacagaaaccaccccaccagaatcagcctggtgttctaccagcacaagagcatgaacgagcccaagcacggcctggccctgtgggaggccaagatggccgagaaggccagagagaaggaggaggagtgcgagaagtacggccccgactacgtgccccagaagagccacggcaagaaggtgaagagagagcccgccgagccccacgagaccagcgagcccacctacctgagattcatcaagagcctggccgagagaaccatgagcgtgaccaccgacagcaccgtgaccaccagcccctacgccttcaccagagtgaccggcccctacaacagatacatctag

SEQ ID NO: 13137 - DNA, 615 bp, synthetic construct
  misc_feature 1..615: note = Description of Artificial Sequence: Synthetic coding sequence
  source 1..615: mol_type = other DNA
atggtgtgcggcggcttcgcctgcagcaagaactgcctgtgcgccctgaacctgctgtacaccctggtgagcctgctgctgatcggcatcgccgcctggggcatcggcttcggcctgatcagcagcctgagagtggtgggcgtggtgatcgccgtgggcatcttcctgttcctgatcgccctggtgggcctgatcggcgccgtgaagcaccaccaggtgctgctgttcttctacatgatcatcctgctgctggtgttcatcgtgcagttcagcgtgagctgcgcctgcctggccctgaaccaggagcagcagggccagctgctggaggtgggctggaacaacaccgccagcgccagaaacgacatccagagaaacctgaactgctgcggcttcagaagcgtgaaccccaacgacacctgcctggccagctgcgtgaagagcgaccacagctgcagcccctgcgcccccatcatcggcgagtacgccggcgaggtgctgagattcgtgggcggcatcggcctgttcttcagcttcaccgagatcctgggcgtgtggctgacctacagatacagaaaccagaaggaccccagagccaaccccagcgccttcctgtag

SEQ ID NO: 13138 - DNA, 738 bp, synthetic construct
  misc_feature 1..738: note = Description of Artificial Sequence: Synthetic coding sequence
  source 1..738: mol_type = other DNA
atggccagccccagcagaagactgcagaccaagcccgtgatcacctgcttcaagagcgtgctgctgatctacaccttcatcttctggatcaccggcgtgatcctgctggccgtgggcatctggggcaaggtgagcctggagaactacttcagcctgctgaacgagaaggccaccaacgtgcccttcgtgctgatcgccaccggcaccgtgatcatcctgctgggcaccttcggctgcttcgccacctgcagagccagcgcctggatgctgaagctgtacgccatgttcctgaccctggtgttcctggtggagctggtggccgccatcgtgggcttcgtgttcagacacgagatcaagaacagcttcaagaacaactacgagaaggccctgaagcagtacaacagcaccggcgactacagaagccacgccgtggacaagatccagaacaccctgcactgctgcggcgtgaccgactacagagactggaccgacaccaactactacagcgagaagggcttccccaagagctgctgcaagctggaggactgcaccccccagagagacgccgacaaggtgaacaacgagggctgcttcatcaaggtgatgaccatcatcgagagcgagatgggcgtggtggccggcatcagcttcggcgtggcctgcttccagctgatcggcatcttcctggcctactgcctgagcagagccatcaccaacaaccagtacgagatcgtgtag

SEQ ID NO: 13139 - DNA, 684 bp, synthetic construct
  misc_feature 1..684: note = Description of Artificial Sequence: Synthetic coding sequence
  source 1..684: mol_type = other DNA
atggccagccccagcagaagactgcagaccaagcccgtgatcacctgcttcaagagcgtgctgctgatctacaccttcatcttctggatcaccggcgtgatcctgctggccgtgggcatctggggcaaggtgagcctggagaactacttcagcctgctgaacgagaaggccaccttcggctgcttcgccacctgcagagccagcgcctggatgctgaagctgtacgccatgttcctgaccctggtgttcctggtggagctggtggccgccatcgtgggcttcgtgttcagacacgagatcaagaacagcttcaagaacaactacgagaaggccctgaagcagtacaacagcaccggcgactacagaagccacgccgtggacaagatccagaacaccctgcactgctgcggcgtgaccgactacagagactggaccgacaccaactactacagcgagaagggcttccccaagagctgctgcaagctggaggactgcaccccccagagagacgccgacaaggtgaacaacgagggctgcttcatcaaggtgatgaccatcatcgagagcgagatgggcgtggtggccggcatcagcttcggcgtggcctgcttccagctgatcggcatcttcctggcctactgcctgagcagagccatcaccaacaaccagtacgagatcgtgtag

SEQ ID NO: 13140 - DNA, 669 bp, synthetic construct
  misc_feature 1..669: note = Description of Artificial Sequence: Synthetic coding sequence
  source 1..669: mol_type = other DNA
atggagagaaagggcagcgccgccggcgccaagggcaaccccagcccccccgccgccggcgagggccagagaccccccccccccctgtgcgtgcccggcggcggcggcggcgcccccgccagaggccaggtgggcgccgccgccgagcccgccgagctgatcagaagagcccacgagttcaagagccagggcgcccagtgctacaaggacaagaagttcagagaggccatcggcaagtaccacagagccctgctggagctgaagggcctgctgcccccccccggcgagagagagagagacagcagacccgccagccccgccggcgccctgaagcccggcagactgagcgaggagcagagcaagaccgtggaggccatcgagatcgactgctacaacagcctggccgcctgcctgctgcaggccgagctggtgaactacgagagagtgaaggagtactgcctgaaggtgctgaagaaggagggcgagaacttcaaggccctgtacagaagcggcgtggccttctaccacctgggcgactacgacaaggccctgtactacctgaaggaggccagaacccagcagcccaccgacaccaacgtgatcagatacatccagctgaccgagatgaagctgagcagatgcagccagagagagaaggaggccatgtag

SEQ ID NO: 13141 - DNA, 258 bp, synthetic construct
  misc_feature 1..258: note = Description of Artificial Sequence: Synthetic coding sequence
  source 1..258: mol_type = other DNA
atggtgaagcagatcgagagcaagaccgccttccaggaggccctggacgccgccggcgacaagctggtggtggtggacttcagcgccacctggtgcggcccctgcaagatgatcaagcccttcttccacgacgtggccagcgagtgcgaggtgaagtgcatgcccaccttccagttcttcaagaagggccagaaggtgggcgagttcagcggcgccaacaaggagaagctggaggccaccatcaacgagctggtgtag

SEQ ID NO: 13142 - DNA, 318 bp, synthetic construct
  misc_feature 1..318: note = Description of Artificial Sequence: Synthetic coding sequence
  source 1..318: mol_type = other DNA
atggtgaagcagatcgagagcaagaccgccttccaggaggccctggacgccgccggcgacaagctggtggtggtggacttcagcgccacctggtgcggcccctgcaagatgatcaagcccttcttccacagcctgagcgagaagtacagcaacgtgatcttcctggaggtggacgtggacgactgccaggacgtggccagcgagtgcgaggtgaagtgcatgcccaccttccagttcttcaagaagggccagaaggtgggcgagttcagcggcgccaacaaggagaagctggaggccaccatcaacgagctggtgtag

SEQ ID NO: 13143 - DNA, 1176 bp, synthetic construct
  misc_feature 1..1176: note = Description of Artificial Sequence: Synthetic coding sequence
  source 1..1176: mol_type = other DNA
atggtgatgttcaagaagatcaagagcttcgaggtggtgttcaacgaccccgagaaggtgtacggcagcggcgagaaggtggccggcagagtgatcgtggaggtgtgcgaggtgaccagagtgaaggccgtgagaatcctggcctgcggcgtggccaaggtgctgtggatgcagggcagccagcagtgcaagcagaccagcgagtacctgagatacgaggacaccctgctgctggaggaccagcccaccggcgagaacgagatggtgatcatgagacccggcaacaagtacgagtacaagttcggcttcgagctgccccagggccccctgggcaccagcttcaagggcaagtacggctgcgtggactactgggtgaaggccttcctggacagacccagccagcccacccaggagaccaagaagaacttcgaggtggtggacctggtggacgtgaacacccccgacctgatggcccccgtgagcgccaagaaggagaagaaggtgagctgcatgttcatccccgacggcagagtgagcgtgagcgccagaatcgacagaaagggcttctgcgagggcgacgagatcagcatccacgccgacttcgagaacacctgcagcagaatcgtggtgcccaaggccgccatcgtggccagacacacctacctggccaacggccagaccaaggtgctgacccagaagctgagcagcgtgagaggcaaccacatcatcagcggcacctgcgccagctggagaggcaagagcctgagagtgcagaagatcagacccagcatcctgggctgcaacatcctgagagtggagtacagcctgctgatctacgtgagcgtgcccggcagcaagaaggtgatcctggacctgcccctggtgatcggcagcagaagcggcctgagcagcagaaccagcagcatggccagcagaaccagcagcgagatgagctgggtggacctgaacatccccgacacccccgaggcccccccctgctacatggacgtgatccccgaggaccacagactggagagccccaccacccccctgctggacgacatggacggcagccaggacagccccatcttcatgtacgcccccgagttcaagttcatgcccccccccacctacaccgaggtggacccctgcatcctgaacaacaacgtgcagtag

SEQ ID NO: 13144 - DNA, 1494 bp, synthetic construct
  misc_feature 1..1494: note = Description of Artificial Sequence: Synthetic coding sequence
  source 1..1494: mol_type = other DNA
atgaacggccccgaggacctgcccaagagctacgactacgacctgatcatcatcggcggcggcagcggcggcctggccgccgccaaggaggccgcccagtacggcaagaaggtgatggtgctggacttcgtgacccccacccccctgggcaccagatggggcctgggcggcacctgcgtgaacgtgggctgcatccccaagaagctgatgcaccaggccgccctgctgggccaggccctgcaggacagcagaaactacggctggaaggtggaggagaccgtgaagcacgactgggacagaatgatcgaggccgtgcagaaccacatcggcagcctgaactggggctacagagtggccctgagagagaagaaggtggtgtacgagaacgcctacggccagttcatcggcccccacagaatcaaggccaccaacaacaagggcaaggagaagatctacagcgccgagagattcctgatcgccaccggcgagagacccagatacctgggcatccccggcgacaaggagtactgcatcagcagcgacgacctgttcagcctgccctactgccccggcaagaccctggtggtgggcgccagctacgtggccctggagtgcgccggcttcctggccggcatcggcctggacgtgaccgtgatggtgagaagcatcctgctgagaggcttcgaccaggacatggccaacaagatcggcgagcacatggaggagcacggcatcaagttcatcagacagttcgtgcccatcaaggtggagcagatcgaggccggcacccccggcagactgagagtggtggcccagagcaccaacagcgaggagatcatcgagggcgagtacaacaccgtgatgctggccatcggcagagacgcctgcaccagaaagatcggcctggagaccgtgggcgtgaagatcaacgagaagaccggcaagatccccgtgaccgacgaggagcagaccaacgtgccctacatctacgccatcggcgacatcctggaggacaaggtggagctgacccccgtggccatccaggccggcagactgctggcccagagactgtacgccggcagcaccgtgaagtgcgactacgagaacgtgcccaccaccgtgttcacccccctggagtacggcgcctgcggcctgagcgaggagaaggccgtggagaagttcggcgaggagaacatcgaggtgtaccacagctacttctggcccctggagtggaccatccccagcagagacaacaacaagtgctacgccaagatcatctgcaacaccaaggacaacgagagagtggtgggcttccacgtgctgggccccaacgccggcgaggtgacccagggcttcgccgccgccctgaagtgcggcctgaccaagaagcagctggacagcaccatcggcatccaccccgtgtgcgccgaggtgttcaccaccctgagcgtgaccaagagaagcggcgccagcatcctgcaggccggctgctag

SEQ ID NO: 13145 - DNA, 1746 bp, synthetic construct
  misc_feature 1..1746: note = Description of Artificial Sequence: Synthetic coding sequence
  source 1..1746: mol_type = other DNA
atgcagcaggtgatgctgacctgcaagggcgtgaacagaggccacgccgtgcccgccggccccggcagaaagcccagacccagaagaagcagcagactgctggccggcgagaagcacctgaccagaagcgccctgctgctgtgccacaccgaggacggcagagccctggagggcaccctgagcgagctggccgccgagaccgacctgcccgtggtgttcgtgaagcagagaaagatcggcggccacggccccaccctgaaggcctaccaggagggcagactgcagaagctgctgaagatgaacggccccgaggacctgcccaagagctacgactacgacctgatcatcatcggcggcggcagcggcggcctggccgccgccaaggaggccgcccagtacggcaagaaggtgatggtgctggacttcgtgacccccacccccctgggcaccagatggggcctgggcggcacctgcgtgaacgtgggctgcatccccaagaagctgatgcaccaggccgccctgctgggccaggccctgcaggacagcagaaactacggctggaaggtggaggagaccgtgaagcacgactgggacagaatgatcgaggccgtgcagaaccacatcggcagcctgaactggggctacagagtggccctgagagagaagaaggtggtgtacgagaacgcctacggccagttcatcggcccccacagaatcaaggccaccaacaacaagggcaaggagaagatctacagcgccgagagattcctgatcgccaccggcgagagacccagatacctgggcatccccggcgacaaggagtactgcatcagcagcgacgacctgttcagcctgccctactgccccggcaagaccctggtggtgggcgccagctacgtggccctggagtgcgccggcttcctggccggcatcggcctggacgtgaccgtgatggtgagaagcatcctgctgagaggcttcgaccaggacatggccaacaagatcggcgagcacatggaggagcacggcatcaagttcatcagacagttcgtgcccatcaaggtggagcagatcgaggccggcacccccggcagactgagagtggtggcccagagcaccaacagcgaggagatcatcgagggcgagtacaacaccgtgatgctggccatcggcagagacgcctgcaccagaaagatcggcctggagaccgtgggcgtgaagatcaacgagaagaccggcaagatccccgtgaccgacgaggagcagaccaacgtgccctacatctacgccatcggcgacatcctggaggacaaggtggagctgacccccgtggccatccaggccggcagactgctggcccagagactgtacgccggcagcaccgtgaagtgcgactacgagaacgtgcccaccaccgtgttcacccccctggagtacggcgcctgcggcctgagcgaggagaaggccgtggagaagttcggcgaggagaacatcgaggtgtaccacagctacttctggcccctggagtggaccatccccagcagagacaacaacaagtgctacgccaagatcatctgcaacaccaaggacaacgagagagtggtgggcttccacgtgctgggccccaacgccggcgaggtgacccagggcttcgccgccgccctgaagtgcggcctgaccaagaagcagctggacagcaccatcggcatccaccccgtgtgcgccgagttcttcagcttcatctag

SEQ ID NO: 13146 - DNA, 1650 bp, synthetic construct
  misc_feature 1..1650: note = Description of Artificial Sequence: Synthetic coding sequence
  source 1..1650: mol_type = other DNA
atgagctgcgaggacggcagagccctggagggcaccctgagcgagctggccgccgagaccgacctgcccgtggtgttcgtgaagcagagaaagatcggcggccacggccccaccctgaaggcctaccaggagggcagactgcagaagctgctgaagatgaacggccccgaggacctgcccaagagctacgactacgacctgatcatcatcggcggcggcagcggcggcctggccgccgccaaggaggccgcccagtacggcaagaaggtgatggtgctggacttcgtgacccccacccccctgggcaccagatggggcctgggcggcacctgcgtgaacgtgggctgcatccccaagaagctgatgcaccaggccgccctgctgggccaggccctgcaggacagcagaaactacggctggaaggtggaggagaccgtgaagcacgactgggacagaatgatcgaggccgtgcagaaccacatcggcagcctgaactggggctacagagtggccctgagagagaagaaggtggtgtacgagaacgcctacggccagttcatcggcccccacagaatcaaggccaccaacaacaagggcaaggagaagatctacagcgccgagagattcctgatcgccaccggcgagagacccagatacctgggcatccccggcgacaaggagtactgcatcagcagcgacgacctgttcagcctgccctactgccccggcaagaccctggtggtgggcgccagctacgtggccctggagtgcgccggcttcctggccggcatcggcctggacgtgaccgtgatggtgagaagcatcctgctgagaggcttcgaccaggacatggccaacaagatcggcgagcacatggaggagcacggcatcaagttcatcagacagttcgtgcccatcaaggtggagcagatcgaggccggcacccccggcagactgagagtggtggcccagagcaccaacagcgaggagatcatcgagggcgagtacaacaccgtgatgctggccatcggcagagacgcctgcaccagaaagatcggcctggagaccgtgggcgtgaagatcaacgagaagaccggcaagatccccgtgaccgacgaggagcagaccaacgtgccctacatctacgccatcggcgacatcctggaggacaaggtggagctgacccccgtggccatccaggccggcagactgctggcccagagactgtacgccggcagcaccgtgaagtgcgactacgagaacgtgcccaccaccgtgttcacccccctggagtacggcgcctgcggcctgagcgaggagaaggccgtggagaagttcggcgaggagaacatcgaggtgtaccacagctacttctggcccctggagtggaccatccccagcagagacaacaacaagtgctacgccaagatcatctgcaacaccaaggacaacgagagagtggtgggcttccacgtgctgggccccaacgccggcgaggtgacccagggcttcgccgccgccctgaagtgcggcctgaccaagaagcagctggacagcaccatcggcatccaccccgtgtgcgccgaggtgttcaccaccctgagcgtgaccaagagaagcggcgccagcatcctgcaggccggctgctag

SEQ ID NO: 13147 - DNA, 1626 bp, synthetic construct
  misc_feature 1..1626: note = Description of Artificial Sequence: Synthetic coding sequence
  source 1..1626: mol_type = other DNA
atgctgagcagactggtgctgaacagctgggcccaggccatcatcagacccagaccccccaaggtgctgggcctgcaggtgaccaccttcagcgaggcctaccaggagggcagactgcagaagctgctgaagatgaacggccccgaggacctgcccaagagctacgactacgacctgatcatcatcggcggcggcagcggcggcctggccgccgccaaggaggccgcccagtacggcaagaaggtgatggtgctggacttcgtgacccccacccccctgggcaccagatggggcctgggcggcacctgcgtgaacgtgggctgcatccccaagaagctgatgcaccaggccgccctgctgggccaggccctgcaggacagcagaaactacggctggaaggtggaggagaccgtgaagcacgactgggacagaatgatcgaggccgtgcagaaccacatcggcagcctgaactggggctacagagtggccctgagagagaagaaggtggtgtacgagaacgcctacggccagttcatcggcccccacagaatcaaggccaccaacaacaagggcaaggagaagatctacagcgccgagagattcctgatcgccaccggcgagagacccagatacctgggcatccccggcgacaaggagtactgcatcagcagcgacgacctgttcagcctgccctactgccccggcaagaccctggtggtgggcgccagctacgtggccctggagtgcgccggcttcctggccggcatcggcctggacgtgaccgtgatggtgagaagcatcctgctgagaggcttcgaccaggacatggccaacaagatcggcgagcacatggaggagcacggcatcaagttcatcagacagttcgtgcccatcaaggtggagcagatcgaggccggcacccccggcagactgagagtggtggcccagagcaccaacagcgaggagatcatcgagggcgagtacaacaccgtgatgctggccatcggcagagacgcctgcaccagaaagatcggcctggagaccgtgggcgtgaagatcaacgagaagaccggcaagatccccgtgaccgacgaggagcagaccaacgtgccctacatctacgccatcggcgacatcctggaggacaaggtggagctgacccccgtggccatccaggccggcagactgctggcccagagactgtacgccggcagcaccgtgaagtgcgactacgagaacgtgcccaccaccgtgttcacccccctggagtacggcgcctgcggcctgagcgaggagaaggccgtggagaagttcggcgaggagaacatcgaggtgtaccacagctacttctggcccctggagtggaccatccccagcagagacaacaacaagtgctacgccaagatcatctgcaacaccaaggacaacgagagagtggtgggcttccacgtgctgggccccaacgccggcgaggtgacccagggcttcgccgccgccctgaagtgcggcctgaccaagaagcagctggacagcaccatcggcatccaccccgtgtgcgccgaggtgttcaccaccctgagcgtgaccaagagaagcggcgccagcatcctgcaggccggctgctag

SEQ ID NO: 13148 - DNA, 1839 bp, synthetic construct
  misc_feature 1..1839: note = Description of Artificial Sequence: Synthetic coding sequence
  source 1..1839: mol_type = other DNA
atgcccgtggacgactactggctgtgcctgcccgccagctgcgccagacccttcgtgcagaccgtgagagtggtgcagagctgcccccactgctgctggttccccggcgtgctgcccagcgtgcccgagcccctgagaatgcccgccatgctgcccaccggcagccacagcgccgtgctgccccccagccactgcagcaccgccccccccagcaccagccaggagcccagcagcagcgccgaccccaagctgtgcctgagcccccccaccagcgacagcagacaggagagaaacgtgcagttcggcctggcctaccaggagggcagactgcagaagctgctgaagatgaacggccccgaggacctgcccaagagctacgactacgacctgatcatcatcggcggcggcagcggcggcctggccgccgccaaggaggccgcccagtacggcaagaaggtgatggtgctggacttcgtgacccccacccccctgggcaccagatggggcctgggcggcacctgcgtgaacgtgggctgcatccccaagaagctgatgcaccaggccgccctgctgggccaggccctgcaggacagcagaaactacggctggaaggtggaggagaccgtgaagcacgactgggacagaatgatcgaggccgtgcagaaccacatcggcagcctgaactggggctacagagtggccctgagagagaagaaggtggtgtacgagaacgcctacggccagttcatcggcccccacagaatcaaggccaccaacaacaagggcaaggagaagatctacagcgccgagagattcctgatcgccaccggcgagagacccagatacctgggcatccccggcgacaaggagtactgcatcagcagcgacgacctgttcagcctgccctactgccccggcaagaccctggtggtgggcgccagctacgtggccctggagtgcgccggcttcctggccggcatcggcctggacgtgaccgtgatggtgagaagcatcctgctgagaggcttcgaccaggacatggccaacaagatcggcgagcacatggaggagcacggcatcaagttcatcagacagttcgtgcccatcaaggtggagcagatcgaggccggcacccccggcagactgagagtggtggcccagagcaccaacagcgaggagatcatcgagggcgagtacaacaccgtgatgctggccatcggcagagacgcctgcaccagaaagatcggcctggagaccgtgggcgtgaagatcaacgagaagaccggcaagatccccgtgaccgacgaggagcagaccaacgtgccctacatctacgccatcggcgacatcctggaggacaaggtggagctgacccccgtggccatccaggccggcagactgctggcccagagactgtacgccggcagcaccgtgaagtgcgactacgagaacgtgcccaccaccgtgttcacccccctggagtacggcgcctgcggcctgagcgaggagaaggccgtggagaagttcggcgaggagaacatcgaggtgtaccacagctacttctggcccctggagtggaccatccccagcagagacaacaacaagtgctacgccaagatcatctgcaacaccaaggacaacgagagagtggtgggcttccacgtgctgggccccaacgccggcgaggtgacccagggcttcgccgccgccctgaagtgcggcctgaccaagaagcagctggacagcaccatcggcatccaccccgtgtgcgccgaggtgttcaccaccctgagcgtgaccaagagaagcggcgccagcatcctgcaggccggctgctag

SEQ ID NO: 13149 - DNA, 1944 bp, synthetic construct
  misc_feature 1..1944: note = Description of Artificial Sequence: Synthetic coding sequence
  source 1..1944: mol_type = other DNA
atgggctgcgccgagggcaaggccgtggccgccgccgcccccaccgagctgcagaccaagggcaagaacggcgacggcagaagaagaagcgccaaggaccaccaccccggcaagaccctgcccgagaaccccgccggcttcaccagcaccgccaccgccgacagcagagccctgctgcaggcctacatcgacggccacagcgtggtgatcttcagcagaagcacctgcaccagatgcaccgaggtgaagaagctgttcaagagcctgtgcgtgccctacttcgtgctggagctggaccagaccgaggacggcagagccctggagggcaccctgagcgagctggccgccgagaccgacctgcccgtggtgttcgtgaagcagagaaagatcggcggccacggccccaccctgaaggcctaccaggagggcagactgcagaagctgctgaagatgaacggccccgaggacctgcccaagagctacgactacgacctgatcatcatcggcggcggcagcggcggcctggccgccgccaaggaggccgcccagtacggcaagaaggtgatggtgctggacttcgtgacccccacccccctgggcaccagatggggcctgggcggcacctgcgtgaacgtgggctgcatccccaagaagctgatgcaccaggccgccctgctgggccaggccctgcaggacagcagaaactacggctggaaggtggaggagaccgtgaagcacgactgggacagaatgatcgaggccgtgcagaaccacatcggcagcctgaactggggctacagagtggccctgagagagaagaaggtggtgtacgagaacgcctacggccagttcatcggcccccacagaatcaaggccaccaacaacaagggcaaggagaagatctacagcgccgagagattcctgatcgccaccggcgagagacccagatacctgggcatccccggcgacaaggagtactgcatcagcagcgacgacctgttcagcctgccctactgccccggcaagaccctggtggtgggcgccagctacgtggccctggagtgcgccggcttcctggccggcatcggcctggacgtgaccgtgatggtgagaagcatcctgctgagaggcttcgaccaggacatggccaacaagatcggcgagcacatggaggagcacggcatcaagttcatcagacagttcgtgcccatcaaggtggagcagatcgaggccggcacccccggcagactgagagtggtggcccagagcaccaacagcgaggagatcatcgagggcgagtacaacaccgtgatgctggccatcggcagagacgcctgcaccagaaagatcggcctggagaccgtgggcgtgaagatcaacgagaagaccggcaagatccccgtgaccgacgaggagcagaccaacgtgccctacatctacgccatcggcgacatcctggaggacaaggtggagctgacccccgtggccatccaggccggcagactgctggcccagagactgtacgccggcagcaccgtgaagtgcgactacgagaacgtgcccaccaccgtgttcacccccctggagtacggcgcctgcggcctgagcgaggagaaggccgtggagaagttcggcgaggagaacatcgaggtgtaccacagctacttctggcccctggagtggaccatccccagcagagacaacaacaagtgctacgccaagatcatctgcaacaccaaggacaacgagagagtggtgggcttccacgtgctgggccccaacgccggcgaggtgacccagggcttcgccgccgccctgaagtgcggcctgaccaagaagcagctggacagcaccatcggcatccaccccgtgtgcgccgaggtgttcaccaccctgagcgtgaccaagagaagcggcgccagcatcctgcaggccggctgctag

SEQ ID NO: 13150 - DNA, 1500 bp, synthetic construct
  misc_feature 1..1500: note = Description of Artificial Sequence: Synthetic coding sequence
  source 1..1500: mol_type = other DNA
  modified_base 1493: mod_base = OTHER; note = uracil
atgaacggccccgaggacctgcccaagagctacgactacgacctgatcatcatcggcggcggcagcggcggcctggccgccgccaaggaggccgcccagtacggcaagaaggtgatggtgctggacttcgtgacccccacccccctgggcaccagatggggcctgggcggcacctgcgtgaacgtgggctgcatccccaagaagctgatgcaccaggccgccctgctgggccaggccctgcaggacagcagaaactacggctggaaggtggaggagaccgtgaagcacgactgggacagaatgatcgaggccgtgcagaaccacatcggcagcctgaactggggctacagagtggccctgagagagaagaaggtggtgtacgagaacgcctacggccagttcatcggcccccacagaatcaaggccaccaacaacaagggcaaggagaagatctacagcgccgagagattcctgatcgccaccggcgagagacccagatacctgggcatccccggcgacaaggagtactgcatcagcagcgacgacctgttcagcctgccctactgccccggcaagaccctggtggtgggcgccagctacgtggccctggagtgcgccggcttcctggccggcatcggcctggacgtgaccgtgatggtgagaagcatcctgctgagaggcttcgaccaggacatggccaacaagatcggcgagcacatggaggagcacggcatcaagttcatcagacagttcgtgcccatcaaggtggagcagatcgaggccggcacccccggcagactgagagtggtggcccagagcaccaacagcgaggagatcatcgagggcgagtacaacaccgtgatgctggccatcggcagagacgcctgcaccagaaagatcggcctggagaccgtgggcgtgaagatcaacgagaagaccggcaagatccccgtgaccgacgaggagcagaccaacgtgccctacatctacgccatcggcgacatcctggaggacaaggtggagctgacccccgtggccatccaggccggcagactgctggcccagagactgtacgccggcagcaccgtgaagtgcgactacgagaacgtgcccaccaccgtgttcacccccctggagtacggcgcctgcggcctgagcgaggagaaggccgtggagaagttcggcgaggagaacatcgaggtgtaccacagctacttctggcccctggagtggaccatccccagcagagacaacaacaagtgctacgccaagatcatctgcaacaccaaggacaacgagagagtggtgggcttccacgtgctgggccccaacgccggcgaggtgacccagggcttcgccgccgccctgaagtgcggcctgaccaagaagcagctggacagcaccatcggcatccaccccgtgtgcgccgaggtgttcaccaccctgagcgtgaccaagagaagcggcgccagcatcctgcaggccggctgctgaggctag

SEQ ID NO: 13151 - DNA, 1500 bp, synthetic construct; identical to SEQ ID NO: 13150
  misc_feature 1..1500: note = Description of Artificial Sequence: Synthetic coding sequence
  source 1..1500: mol_type = other DNA
  modified_base 1493: mod_base = OTHER; note = uracil

SEQ ID NO: 13152 - DNA, 1950 bp, synthetic construct
  misc_feature 1..1950: note = Description of Artificial Sequence: Synthetic coding sequence
  source 1..1950: mol_type = other DNA
  modified_base 1943: mod_base = OTHER; note = uracil
atgggctgcgccgagggcaaggccgtggccgccgccgcccccaccgagctgcagaccaagggcaagaacggcgacggcagaagaagaagcgccaaggaccaccaccccggcaagaccctgcccgagaaccccgccggcttcaccagcaccgccaccgccgacagcagagccctgctgcaggcctacatcgacggccacagcgtggtgatcttcagcagaagcacctgcaccagatgcaccgaggtgaagaagctgttcaagagcctgtgcgtgccctacttcgtgctggagctggaccagaccgaggacggcagagccctggagggcaccctgagcgagctggccgccgagaccgacctgcccgtggtgttcgtgaagcagagaaagatcggcggccacggccccaccctgaaggcctaccaggagggcagactgcagaagctgctgaagatgaacggccccgaggacctgcccaagagctacgactacgacctgatcatcatcggcggcggcagcggcggcctggccgccgccaaggaggccgcccagtacggcaagaaggtgatggtgctggacttcgtgacccccacccccctgggcaccagatggggcctgggcggcacctgcgtgaacgtgggctgcatccccaagaagctgatgcaccaggccgccctgctgggccaggccctgcaggacagcagaaactacggctggaaggtggaggagaccgtgaagcacgactgggacagaatgatcgaggccgtgcagaaccacatcggcagcctgaactggggctacagagtggccctgagagagaagaaggtggtgtacgagaacgcctacggccagttcatcggcccccacagaatcaaggccaccaacaacaagggcaaggagaagatctacagcgccgagagattcctgatcgccaccggcgagagacccagatacctgggcatccccggcgacaaggagtactgcatcagcagcgacgacctgttcagcctgccctactgccccggcaagaccctggtggtgggcgccagctacgtggccctggagtgcgccggcttcctggccggcatcggcctggacgtgaccgtgatggtgagaagcatcctgctgagaggcttcgaccaggacatggccaacaagatcggcgagcacatggaggagcacggcatcaagttcatcagacagttcgtgcccatcaaggtggagcagatcgaggccggcacccccggcagactgagagtggtggcccagagcaccaacagcgaggagatcatcgagggcgagtacaacaccgtgatgctggccatcggcagagacgcctgcaccagaaagatcggcctggagaccgtgggcgtgaagatcaacgagaagaccggcaagatccccgtgaccgacgaggagcagaccaacgtgccctacatctacgccatcggcgacatcctggaggacaaggtggagctgacccccgtggccatccaggccggcagactgctggcccagagactgtacgccggcagcaccgtgaagtgcgactacgagaacgtgcccaccaccgtgttcacccccctggagtacggcgcctgcggcctgagcgaggagaaggccgtggagaagttcggcgaggagaacatcgaggtgtaccacagctacttctggcccctggagtggaccatccccagcagagacaacaacaagtgctacgccaagatcatctgcaacaccaaggacaacgagagagtggtgggcttccacgtgctgggccccaacgccggcgaggtgacccagggcttcgccgccgccctgaagtgcggcctgaccaagaagcagctggacagcaccatcggcatccaccccgtgtgcgccgaggtgttcaccaccctgagcgtgaccaagagaagcggcgccagcatcctgcaggccggctgctgaggctag

SEQ ID NO: 13153 - DNA, 213 bp, synthetic construct
  misc_feature 1..213: note = Description of Artificial Sequence: Synthetic coding sequence
  source 1..213: mol_type = other DNA
atgaacggccccgaggacctgcccaagagctacgactacgacctgatcatcatcggcggcggcagcggcggcctggccgccgccaaggaggccgcccagtacggcaagaaggtgatggtgctggacttcgtgacccccacccccctgggcaccagatggggcctgggcggcacctgcgtgaacgtgggctgcatccccaagaagctgatgtag

SEQ ID NO: 13154 - DNA, 1632 bp, synthetic construct
  misc_feature 1..1632: note = Description of Artificial Sequence: Synthetic coding sequence
  source 1..1632: mol_type = other DNA
  modified_base 1625: mod_base = OTHER; note = uracil
atgctgagcagactggtgctgaacagctgggcccaggccatcatcagacccagaccccccaaggtgctgggcctgcaggtgaccaccttcagcgaggcctaccaggagggcagactgcagaagctgctgaagatgaacggccccgaggacctgcccaagagctacgactacgacctgatcatcatcggcggcggcagcggcggcctggccgccgccaaggaggccgcccagtacggcaagaaggtgatggtgctggacttcgtgacccccacccccctgggcaccagatggggcctgggcggcacctgcgtgaacgtgggctgcatccccaagaagctgatgcaccaggccgccctgctgggccaggccctgcaggacagcagaaactacggctggaaggtggaggagaccgtgaagcacgactgggacagaatgatcgaggccgtgcagaaccacatcggcagcctgaactggggctacagagtggccctgagagagaagaaggtggtgtacgagaacgcctacggccagttcatcggcccccacagaatcaaggccaccaacaacaagggcaaggagaagatctacagcgccgagagattcctgatcgccaccggcgagagacccagatacctgggcatccccggcgacaaggagtactgcatcagcagcgacgacctgttcagcctgccctactgccccggcaagaccctggtggtgggcgccagctacgtggccctggagtgcgccggcttcctggccggcatcggcctggacgtgaccgtgatggtgagaagcatcctgctgagaggcttcgaccaggacatggccaacaagatcggcgagcacatggaggagcacggcatcaagttcatcagacagttcgtgcccatcaaggtggagcagatcgaggccggcacccccggcagactgagagtggtggcccagagcaccaacagcgaggagatcatcgagggcgagtacaacaccgtgatgctggccatcggcagagacgcctgcaccagaaagatcggcctggagaccgtgggcgtgaagatcaacgagaagaccggcaagatccccgtgaccgacgaggagcagaccaacgtgccctacatctacgccatcggcgacatcctggaggacaaggtggagctgacccccgtggccatccaggccggcagactgctggcccagagactgtacgccggcagcaccgtgaagtgcgactacgagaacgtgcccaccaccgtgttcacccccctggagtacggcgcctgcggcctgagcgaggagaaggccgtggagaagttcggcgaggagaacatcgaggtgtaccacagctacttctggcccctggagtggaccatccccagcagagacaacaacaagtgctacgccaagatcatctgcaacaccaaggacaacgagagagtggtgggcttccacgtgctgggccccaacgccggcgaggtgacccagggcttcgccgccgccctgaagtgcggcctgaccaagaagcagctggacagcaccatcggcatccaccccgtgtgcgccgaggtgttcaccaccctgagcgtgaccaagagaagcggcgccagcatcctgcaggccggctgctgaggctag

SEQ ID NO: 13155 - DNA, 315 bp, synthetic construct
  misc_feature 1..315: note = Description of Artificial Sequence: Synthetic coding sequence
  source 1..315: mol_type = other DNA
atgaacggccccgaggacctgcccaagagctacgactacgacctgatcatcatcggcggcggcagcggcggcctggccgccgccaaggaggccgcccagtacggcaagaaggtgatggtgctggacttcgtgacccccacccccctgggcaccagatggggcctgggcggcacctgcgtgaacgtgggctgcatccccaagaagctgatgcaccaggccgccctgctgggccaggccctgcaggacagcagaaactacggctggaaggtggaggagaccgtgaagcacgactgggacagaatgatcgaggcctag

SEQ ID NO: 13156 - DNA, 1656 bp, synthetic construct
  misc_feature 1..1656: note = Description of Artificial Sequence: Synthetic coding sequence
  source 1..1656: mol_type = other DNA
  modified_base 1649: mod_base = OTHER; note = uracil
atgagctgcgaggacggcagagccctggagggcaccctgagcgagctggccgccgagaccgacctgcccgtggtgttcgtgaagcagagaaagatcggcggccacggccccaccctgaaggcctaccaggagggcagactgcagaagctgctgaagatgaacggccccgaggacctgcccaagagctacgactacgacctgatcatcatcggcggcggcagcggcggcctggccgccgccaaggaggccgcccagtacggcaagaaggtgatggtgctggacttcgtgacccccacccccctgggcaccagatggggcctgggcggcacctgcgtgaacgtgggctgcatccccaagaagctgatgcaccaggccgccctgctgggccaggccctgcaggacagcagaaactacggctggaaggtggaggagaccgtgaagcacgactgggacagaatgatcgaggccgtgcagaaccacatcggcagcctgaactggggctacagagtggccctgagagagaagaaggtggtgtacgagaacgcctacggccagttcatcggcccccacagaatcaaggccaccaacaacaagggcaaggagaagatctacagcgccgagagattcctgatcgccaccggcgagagacccagatacctgggcatccccggcgacaaggagtactgcatcagcagcgacgacctgttcagcctgccctactgccccggcaagaccctggtggtgggcgccagctacgtggccctggagtgcgccggcttcctggccggcatcggcctggacgtgaccgtgatggtgagaagcatcctgctgagaggcttcgaccaggacatggccaacaagatcggcgagcacatggaggagcacggcatcaagttcatcagacagttcgtgcccatcaaggtggagcagatcgaggccggcacccccggcagactgagagtggtggcccagagcaccaacagcgaggagatcatcgagggcgagtacaacaccgtgatgctggccatcggcagagacgcctgcaccagaaagatcggcctggagaccgtgggcgtgaagatcaacgagaagaccggcaagatccccgtgaccgacgaggagcagaccaacgtgccctacatctacgccatcggcgacatcctggaggacaaggtggagctgacccccgtggccatccaggccggcagactgctggcccagagactgtacgccggcagcaccgtgaagtgcgactacgagaacgtgcccaccaccgtgttcacccccctggagtacggcgcctgcggcctgagcgaggagaaggccgtggagaagttcggcgaggagaacatcgaggtgtaccacagctacttctggcccctggagtggaccatccccagcagagacaacaacaagtgctacgccaagatcatctgcaacaccaaggacaacgagagagtggtgggcttccacgtgctgggccccaacgccggcgaggtgacccagggcttcgccgccgccctgaagtgcggcctgaccaagaagcagctggacagcaccatcggcatccaccccgtgtgcgccgaggtgttcaccaccctgagcgtgaccaagagaagcggcgccagcatcctgcaggccggctgctgaggctag

SEQ ID NO: 13157 - DNA, 1707 bp, synthetic construct
  misc_feature 1..1707: note = Description of Artificial Sequence: Synthetic coding sequence
  source 1..1707: mol_type = other DNA
  modified_base 1700: mod_base = OTHER; note = uracil
atgcccgccatgctgcccaccggcagccacagcgccgtgctgccccccagccactgcagcaccgccccccccagcaccagccaggagcccagcagcagcgccgaccccaagctgtgcctgagcccccccaccagcgacagcagacaggagagaaacgtgcagttcggcctggcctaccaggagggcagactgcagaagctgctgaagatgaacggccccgaggacctgcccaagagctacgactacgacctgatcatcatcggcggcggcagcggcggcctggccgccgccaaggaggccgcccagtacggcaagaaggtgatggtgctggacttcgtgacccccacccccctgggcaccagatggggcctgggcggcacctgcgtgaacgtgggctgcatccccaagaagctgatgcaccaggccgccctgctgggccaggccctgcaggacagcagaaactacggctggaaggtggaggagaccgtgaagcacgactgggacagaatgatcgaggccgtgcagaaccacatcggcagcctgaactggggctacagagtggccctgagagagaagaaggtggtgtacgagaacgcctacggccagttcatcggcccccacagaatcaaggccaccaacaacaagggcaaggagaagatctacagcgccgagagattcctgatcgccaccggcgagagacccagatacctgggcatccccggcgacaaggagtactgcatcagcagcgacgacctgttcagcctgccctactgccccggcaagaccctggtggtgggcgccagctacgtggccctggagtgcgccggcttcctggccggcatcggcctggacgtgaccgtgatggtgagaagcatcctgctgagaggcttcgaccaggacatggccaacaagatcggcgagcacatggaggagcacggcatcaagttcatcagacagttcgtgcccatcaaggtggagcagatcgaggccggcacccccggcagactgagagtggtggcccagagcaccaacagcgaggagatcatcgagggcgagtacaacaccgtgatgctggccatcggcagagacgcctgcaccagaaagatcggcctggagaccgtgggcgtgaagatcaacgagaagaccggcaagatccccgtgaccgacgaggagcagaccaacgtgccctacatctacgccatcggcgacatcctggaggacaaggtggagctgacccccgtggccatccaggccggcagactgctggcccagagactgtacgccggcagcaccgtgaagtgcgactacgagaacgtgcccaccaccgtgttcacccccctggagtacggcgcctgcggcctgagcgaggagaaggccgtggagaagttcggcgaggagaacatcgaggtgtaccacagctacttctggcccctggagtggaccatccccagcagagacaacaacaagtgctacgccaagatcatctgcaacaccaaggacaacgagagagtggtgggcttccacgtgctgggccccaacgccggcgaggtgacccagggcttcgccgccgccctgaagtgcggcctgaccaagaagcagctggacagcaccatcggcatccaccccgtgtgcgccgaggtgttcaccaccctgagcgtgaccaagagaagcggcgccagcatcctgcaggccggctgctgaggctag

SEQ ID NO: 13158 - DNA, 528 bp, synthetic construct
  misc_feature 1..528: note = Description of Artificial Sequence: Synthetic coding sequence
  source 1..528: mol_type = other DNA
atgaacggccccgaggacctgcccaagagctacgactacgacctgatcatcatcggcggcggcagcggcggcctggccgccgccaaggaggccgcccagtacggcaagaaggtgatggtgctggacttcgtgacccccacccccctgggcaccagatggggcctgggcggcacctgcgtgaacgtgggctgcatccccaagaagctgatgcaccaggccgccctgctgggccaggccctgcaggacagcagaaactacggctggaaggtggaggagaccgtgaagcacgactgggacagaatgatcgaggccgtgcagaaccacatcggcagcctgaactggggctacagagtggccctgagagagaagaaggtggtgtacgagaacgcctacggccagttcatcggcccccacagaatcaaggccaccaacaacaagggcaaggagaagatctacagcgccgagagattcctgatcgccaccggcgagagacccagatacctgggcatccccggcgacaaggagtag

SEQ ID NO: 13159 - DNA, 162 bp, synthetic construct
  misc_feature 1..162: note = Description of Artificial Sequence: Synthetic coding sequence
  source 1..162: mol_type = other DNA
atgaacggccccgaggacctgcccaagagctacgactacgacctgatcatcatcggcggcggcagcggcggcctggccgccgccaaggaggccgcccagtacggcaagaaggtgatggtgctggacttcgtgacccccacccccctgggcaccagatggtag

SEQ ID NO: 13160 - DNA, 219 bp, synthetic construct
  misc_feature 1..219: note = Description of Artificial Sequence: Synthetic coding sequence
  source 1..219: mol_type = other DNA
atgaacggccccgaggacctgcccaagagctacgactacgacctgatcatcatcggcggcggcagcggcggcctggccgccgccaaggaggccgcccagtacggcaagaaggtgatggtgctggacttcgtgacccccacccccctgggcaccagatggggcctgggcggcacctgcgtgaacgtgggctgcatccccaagaagctgatgcaccagtag

SEQ ID NO: 13161 - DNA, 420 bp, synthetic construct
  misc_feature 1..420: note = Description of Artificial Sequence: Synthetic coding sequence
  source 1..420: mol_type = other DNA
atgctgagcagactggtgctgaacagctgggcccaggccatcatcagacccagaccccccaaggtgctgggcctgcaggtgaccaccttcagcgaggcctaccaggagggcagactgcagaagctgctgaagatgaacggccccgaggacctgcccaagagctacgactacgacctgatcatcatcggcggcggcagcggcggcctggccgccgccaaggaggccgcccagtacggcaagaaggtgatggtgctggacttcgtgacccccacccccctgggcaccagatggggcctgggcggcacctgcgtgaacgtgggctgcatccccaagaagctgatgcaccaggccgccctgctgggccaggccctgcaggacagcagaaactacggctggaaggtggaggagaccggcatgtag

SEQ ID NO: 13162 - DNA, 1380 bp, synthetic construct
  misc_feature 1..1380: note = Description of Artificial Sequence: Synthetic coding sequence
  source 1..1380: mol_type = other DNA
atggtgctggacttcgtgacccccacccccctgggcaccagatggggcctgggcggcacctgcgtgaacgtgggctgcatccccaagaagctgatgcaccaggccgccctgctgggccaggccctgcaggacagcagaaactacggctggaaggtggaggagaccgtgaagcacgactgggacagaatgatcgaggccgtgcagaaccacatcggcagcctgaactggggctacagagtggccctgagagagaagaaggtggtgtacgagaacgcctacggccagttcatcggcccccacagaatcaaggccaccaacaacaagggcaaggagaagatctacagcgccgagagattcctgatcgccaccggcgagagacccagatacctgggcatccccggcgacaaggagtactgcatcagcagcgacgacctgttcagcctgccctactgccccggcaagaccctggtggtgggcgccagctacgtggccctggagtgcgccggcttcctggccggcatcggcctggacgtgaccgtgatggtgagaagcatcctgctgagaggcttcgaccaggacatggccaacaagatcggcgagcacatggaggagcacggcatcaagttcatcagacagttcgtgcccatcaaggtggagcagatcgaggccggcacccccggcagactgagagtggtggcccagagcaccaacagcgaggagatcatcgagggcgagtacaacaccgtgatgctggccatcggcagagacgcctgcaccagaaagatcggcctggagaccgtgggcgtgaagatcaacgagaagaccggcaagatccccgtgaccgacgaggagcagaccaacgtgccctacatctacgccatcggcgacatcctggaggacaaggtggagctgacccccgtggccatccaggccggcagactgctggcccagagactgtacgccggcagcaccgtgaagtgcgactacgagaacgtgcccaccaccgtgttcacccccctggagtacggcgcctgcggcctgagcgaggagaaggccgtggagaagttcggcgaggagaacatcgaggtgtaccacagctacttctggcccctggagtggaccatccccagcagagacaacaacaagtgctacgccaagatcatctgcaacaccaaggacaacgagagagtggtgggcttccacgtgctgggccccaacgccggcgaggtgacccagggcttcgccgccgccctgaagtgcggcctgaccaagaagcagctggacagcaccatcggcatccaccccgtgtgcgccgaggtgttcaccaccctgagcgtgaccaagagaagcggcgccagcatcctgcaggccggctgctag

SEQ ID NO: 13163 - DNA, 1644 bp, synthetic construct
  misc_feature 1..1644: note = Description of Artificial Sequence: Synthetic coding sequence
  source 1..1644: mol_type = other DNA
atggaggacggcagagccctggagggcaccctgagcgagctggccgccgagaccgacctgcccgtggtgttcgtgaagcagagaaagatcggcggccacggccccaccctgaaggcctaccaggagggcagactgcagaagctgctgaagatgaacggccccgaggacctgcccaagagctacgactacgacctgatcatcatcggcggcggcagcggcggcctggccgccgccaaggaggccgcccagtacggcaagaaggtgatggtgctggacttcgtgacccccacccccctgggcaccagatggggcctgggcggcacctgcgtgaacgtgggctgcatccccaagaagctgatgcaccaggccgccctgctgggccaggccctgcaggacagcagaaactacggctggaaggtggaggagaccgtgaagcacgactgggacagaatgatcgaggccgtgcagaaccacatcggcagcctgaactggggctacagagtggccctgagagagaagaaggtggtgtacgagaacgcctacggccagttcatcggcccccacagaatcaaggccaccaacaacaagggcaaggagaagatctacagcgccgagagattcctgatcgccaccggcgagagacccagatacctgggcatccccggcgacaaggagtactgcatcagcagcgacgacctgttcagcctgccctactgccccggcaagaccctggtggtgggcgccagctacgtggccctggagtgcgccggcttcctggccggcatcggcctggacgtgaccgtgatggtgagaagcatcctgctgagaggcttcgaccaggacatggccaacaagatcggcgagcacatggaggagcacggcatcaagttcatcagacagttcgtgcccatcaaggtggagcagatcgaggccggcacccccggcagactgagagtggtggcccagagcaccaacagcgaggagatcatcgagggcgagtacaacaccgtgatgctggccatcggcagagacgcctgcaccagaaagatcggcctggagaccgtgggcgtgaagatcaacgagaagaccggcaagatccccgtgaccgacgaggagcagaccaacgtgccctacatctacgccatcggcgacatcctggaggacaaggtggagctgacccccgtggccatccaggccggcagactgctggcccagagactgtacgccggcagcaccgtgaagtgcgactacgagaacgtgcccaccaccgtgttcacccccctggagtacggcgcctgcggcctgagcgaggagaaggccgtggagaagttcggcgaggagaacatcgaggtgtaccacagctacttctggcccctggagtggaccatccccagcagagacaacaacaagtgctacgccaagatcatctgcaacaccaaggacaacgagagagtggtgggcttccacgtgctgggccccaacgccggcgaggtgacccagggcttcgccgccgccctgaagtgcggcctgaccaagaagcagctggacagcaccatcggcatccaccccgtgtgcgccgaggtgttcaccaccctgagcgtgaccaagagaagcggcgccagcatcctgcaggccggctgctag

SEQ ID NO: 13164 - DNA, 945 bp, synthetic construct
  misc_feature 1..945: note = Description of Artificial Sequence: Synthetic coding sequence
  source 1..945: mol_type = other DNA
atgggcagccaggccctgccccccggccccatgcagaccctgatcttcttcgacatggaggccaccggcctgcccttcagccagcccaaggtgaccgagctgtgcctgctggccgtgcacagatgcgccctggagagcccccccaccagccagggccccccccccaccgtgccccccccccccagagtggtggacaagctgagcctgtgcgtggcccccggcaaggcctgcagccccgccgccagcgagatcaccggcctgagcaccgccgtgctggccgcccacggcagacagtgcttcgacgacaacctggccaacctgctgctggccttcctgagaagacagccccagccctggtgcctggtggcccacaacggcgacagatacgacttccccctgctgcaggccgagctggccatgctgggcctgaccagcgccctggacggcgccttctgcgtggacagcatcaccgccctgaaggccctggagagagccagcagccccagcgagcacggccccagaaagagctacagcctgggcagcatctacaccagactgtacggccagagcccccccgacagccacaccgccgagggcgacgtgctggccctgctgagcatctgccagtggagaccccaggccctgctgagatgggtggacgcccacgccagacccttcggcaccatcagacccatgtacggcgtgaccgccagcgccagaaccaagcccagacccagcgccgtgaccaccaccgcccacctggccaccaccagaaacaccagccccagcctgggcgagagcagaggcaccaaggacctgccccccgtgaaggaccccggcgccctgagcagagagggcctgctggcccccctgggcctgctggccatcctgaccctggccgtggccaccctgtacggcctgagcctggccacccccggcgagtag

SEQ ID NO: 13165 - DNA, 1110 bp, synthetic construct
  misc_feature 1..1110: note = Description of Artificial Sequence: Synthetic coding sequence
  source 1..1110: mol_type = other DNA
atgggccccggcgccagaagacagggcagaatcgtgcagggcagacccgagatgtgcttctgccccccccccacccccctgccccccctgagaatcctgaccctgggcacccacacccccaccccctgcagcagccccggcagcgccgccggcacctaccccaccatgggcagccaggccctgccccccggccccatgcagaccctgatcttcttcgacatggaggccaccggcctgcccttcagccagcccaaggtgaccgagctgtgcctgctggccgtgcacagatgcgccctggagagcccccccaccagccagggccccccccccaccgtgccccccccccccagagtggtggacaagctgagcctgtgcgtggcccccggcaaggcctgcagccccgccgccagcgagatcaccggcctgagcaccgccgtgctggccgcccacggcagacagtgcttcgacgacaacctggccaacctgctgctggccttcctgagaagacagccccagccctggtgcctggtggcccacaacggcgacagatacgacttccccctgctgcaggccgagctggccatgctgggcctgaccagcgccctggacggcgccttctgcgtggacagcatcaccgccctgaaggccctggagagagccagcagccccagcgagcacggccccagaaagagctacagcctgggcagcatctacaccagactgtacggccagagcccccccgacagccacaccgccgagggcgacgtgctggccctgctgagcatctgccagtggagaccccaggccctgctgagatgggtggacgcccacgccagacccttcggcaccatcagacccatgtacggcgtgaccgccagcgccagaaccaagcccagacccagcgccgtgaccaccaccgcccacctggccaccaccagaaacaccagccccagcctgggcgagagcagaggcaccaaggacctgccccccgtgaaggaccccggcgccctgagcagagagggcctgctggcccccctgggcctgctggccatcctgaccctggccgtggccaccctgtacggcctgagcctggccacccccggcgagtag

SEQ ID NO: 13166 - DNA, 528 bp, synthetic construct
  misc_feature 1..528: note = Description of Artificial Sequence: Synthetic coding sequence
  source 1..528: mol_type = other DNA
atgctgggcctgaccagcgccctggacggcgccttctgcgtggacagcatcaccgccctgaaggccctggagagagccagcagccccagcgagcacggccccagaaagagctacagcctgggcagcatctacaccagactgtacggccagagcccccccgacagccacaccgccgagggcgacgtgctggccctgctgagcatctgccagtggagaccccaggccctgctgagatgggtggacgcccacgccagacccttcggcaccatcagacccatgtacggcgtgaccgccagcgccagaaccaagcccagacccagcgccgtgaccaccaccgcccacctggccaccaccagaaacaccagccccagcctgggcgagagcagaggcaccaaggacctgccccccgtgaaggaccccggcgccctgagcagagagggcctgctggcccccctgggcctgctggccatcctgaccctggccgtggccaccctgtacggcctgagcctggccacccccggcgagtag

SEQ ID NO: 13167 - DNA, 945 bp, synthetic construct; identical to SEQ ID NO: 13164
  misc_feature 1..945: note = Description of Artificial Sequence: Synthetic coding sequence
  source 1..945: mol_type = other DNA

SEQ ID NO: 13168 - DNA, 915 bp, synthetic construct
  misc_feature 1..915: note = Description of Artificial Sequence: Synthetic coding sequence
  source 1..915: mol_type = other DNA
atgcagaccctgatcttcttcgacatggaggccaccggcctgcccttcagccagcccaaggtgaccgagctgtgcctgctggccgtgcacagatgcgccctggagagcccccccaccagccagggccccccccccaccgtgccccccccccccagagtggtggacaagctgagcctgtgcgtggcccccggcaaggcctgcagccccgccgccagcgagatcaccggcctgagcaccgccgtgctggccgcccacggcagacagtgcttcgacgacaacctggccaacctgctgctggccttcctgagaagacagccccagccctggtgcctggtggcccacaacggcgacagatacgacttccccctgctgcaggccgagctggccatgctgggcctgaccagcgccctggacggcgccttctgcgtggacagcatcaccgccctgaaggccctggagagagccagcagccccagcgagcacggccccagaaagagctacagcctgggcagcatctacaccagactgtacggccagagcccccccgacagccacaccgccgagggcgacgtgctggccctgctgagcatctgccagtggagaccccaggccctgctgagatgggtggacgcccacgccagacccttcggcaccatcagacccatgtacggcgtgaccgccagcgccagaaccaagcccagacccagcgccgtgaccaccaccgcccacctggccaccaccagaaacaccagccccagcctgggcgagagcagaggcaccaaggacctgccccccgtgaaggaccccggcgccctgagcagagagggcctgctggcccccctgggcctgctggccatcctgaccctggccgtggccaccctgtacggcctgagcctggccacccccggcgagtag

SEQ ID NO: 13169 - DNA, 528 bp, synthetic construct; identical to SEQ ID NO: 13166
  misc_feature 1..528: note = Description of Artificial Sequence: Synthetic coding sequence
  source 1..528: mol_type = other DNA

SEQ ID NO: 13170 - DNA, 3513 bp, synthetic construct
  misc_feature 1..3513: note = Description of Artificial Sequence: Synthetic coding sequence
  source 1..3513: mol_type = other DNA
atgggcctggcctggggcctgggcgtgctgttcctgatgcacgtgtgcggcaccaacagaatccccgagagcggcggcgacaacagcgtgttcgacatcttcgagctgaccggcgccgccagaaagggcagcggcagaagactggtgaagggccccgaccccagcagccccgccttcagaatcgaggacgccaacctgatcccccccgtgcccgacgacaagttccaggacctggtggacgccgtgagagccgagaagggcttcctgctgctggccagcctgagacagatgaagaagaccagaggcaccctgctggccctggagagaaaggaccacagcggccaggtgttcagcgtggtgagcaacggcaaggccggcaccctggacctgagcctgaccgtgcagggcaagcagcacgtggtgagcgtggaggaggccctgctggccaccggccagtggaagagcatcaccctgttcgtgcaggaggacagagcccagctgtacatcgactgcgagaagatggagaacgccgagctggacgtgcccatccagagcgtgttcaccagagacctggccagcatcgccagactgagaatcgccaagggcggcgtgaacgacaacttccagggcgtgctgcagaacgtgagattcgtgttcggcaccacccccgaggacatcctgagaaacaagggctgcagcagcagcaccagcgtgctgctgaccctggacaacaacgtggtgaacggcagcagccccgccatcagaaccaactacatcggccacaagaccaaggacctgcaggccatctgcggcatcagctgcgacgagctgagcagcatggtgctggagctgagaggcctgagaaccatcgtgaccaccctgcaggacagcatcagaaaggtgaccgaggagaacaaggagctggccaacgagctgagaagaccccccctgtgctaccacaacggcgtgcagtacagaaacaacgaggagtggaccgtggacagctgcaccgagtgccactgccagaacagcgtgaccatctgcaagaaggtgagctgccccatcatgccctgcagcaacgccaccgtgcccgacggcgagtgctgccccagatgctggcccagcgacagcgccgacgacggctggagcccctggagcgagtggaccagctgcagcaccagctgcggcaacggcatccagcagagaggcagaagctgcgacagcctgaacaacagatgcgagggcagcagcgtgcagaccagaacctgccacatccaggagtgcgacaagagattcaagcaggacggcggctggagccactggagcccctggagcagctgcagcgtgacctgcggcgacggcgtgatcaccagaatcagactgtgcaacagccccagcccccagatgaacggcaagccctgcgagggcgaggccagagagaccaaggcctgcaagaaggacgcctgccccatcaacggcggctggggcccctggagcccctgggacatctgcagcgtgacctgcggcggcggcgtgcagaagagaagcagactgtgcaacaaccccaccccccagttcggcggcaaggactgcgtgggcgacgtgaccgagaaccagatctgcaacaagcaggactgccccatcgacggctgcctgagcaacccctgcttcgccggcgtgaagtgcaccagctaccccgacggcagctggaagtgcggcgcctgcccccccggctacagcggcaacggcatccagtgcaccgacgtggacgagtgcaaggaggtgcccgacgcctgcttcaaccacaacggcgagcacagatgcgagaacaccgaccccggctacaactgcctgccctgcccccccagattcaccggcagccagcccttcggccagggcgtggagcacgccaccgccaacaagcaggtgtgcaagcccagaaacccctgcaccgacggcacccacgactgcaacaagaacgccaagtgcaactacctgggccactacagcgaccccatgtacagatgcgagtgcaagcccggctacgccggcaacggcatcatctgcggcgaggacaccgacctggacggctggcccaacgagaacctggtgtgcgtggccaacgccacctaccactgcaagaaggacaactgccccaacctgcccaacagcggccaggaggactacgacaaggacggcatcggcgacgcctgcgacgacgacgacgacaacgacaagatccccgacgacagagacaactgccccttccactacaaccccgcccagtacgactacgacagagacgacgtgggcgacagatgcgacaactgcccctacaaccacaaccccgaccaggccgacaccgacaacaacggcgagggcgacgcctgcgccgccgacatcgacggcgacggcatcctgaacgagagagacaactgccagtacgtgtacaacgtggaccagagagacaccgacatggacggcgtgggcgaccagtgcgacaactgccccctggagcacaaccccgaccagctggacagcgacagcgacagaatcggcgacacctgcgacaacaaccaggacatcgacgaggacggccaccagaacaacctggacaactgcccctacgtgcccaacgccaaccaggccgaccacgacaaggacggcaagggcgacgcctgcgaccacgacgacgacaacgacggcatccccgacgacaaggacaactgcagactggtgcccaaccccgaccagaaggacagcgacggcgacggcagaggcgacgcctgcaaggacgacttcgaccacgacagcgtgcccgacatcgacgacatctgccccgagaacgtggacatcagcgagaccgacttcagaagattccagatgatccccctggaccccaagggcaccagccagaacgaccccaactgggtggtgagacaccagggcaaggagctggtgcagaccgtgaactgcgaccccggcctggccgtgggctacgacgagttcaacgccgtggacttcagcggcaccttcttcatcaacaccgagagagacgacgactacgccggcttcgtgttcggctaccagagcagcagcagattctacgtggtgatgtggaagcaggtgacccagagctactgggacaccaaccccaccagagcccagggctacagcggcctgagcgtgaaggtggtgaacagcaccaccggccccggcgagcacctgagaaacgccctgtggcacaccggcaacacccccggccaggtgagaaccctgtggcacgaccccagacacatcggctggaaggacttcaccgcctacagatggagactgagccacagacccaagaccggcttcatcagagtggtgatgtacgagggcaagaagatcatggccgacagcggccccatctacgacaagacctacgccggcggcagactgggcctgttcgtgttcagccaggagatggtgttcttcagcgacctgaagtacgagtgcagagacccctag

SEQ ID NO: 13171 - DNA, 285 bp, synthetic construct
  misc_feature 1..285: note = Description of Artificial Sequence: Synthetic coding sequence
  source 1..285: mol_type = other DNA
atgggcctggcctggggcctgggcgtgctgttcctgatgcacgtgtgcggcaccaacagaatccccgagagcggcggcgacaacagcgtgttcgacatcttcgagctgaccggcgccgccagaaagggcagcggcagaagactggtgaagggccccgaccccagcagccccgccttcagaatcgaggacgccaacctgatcccccccgtgcccgacgacaagttccaggacctggtggacgccgtgagagccgagaagggcttcctgctgctggccagcctgtag

SEQ ID NO: 13172 - DNA, 501 bp, synthetic construct
  misc_feature 1..501: note = Description of Artificial Sequence: Synthetic coding sequence
  source 1..501: mol_type = other DNA
atggccgccggcaacgtggtgctggtgcccctggtgaccgtggagatggccagcagcgcccagatgctgatgagcgccaagaagtgcctgatgcccgccagcaccaccatggagagcaccggcgtgagaaccagaacccccgccaccaccgcctgccccgccccccacgccagccccgcccacagccccagcgccagagtgagcaacatgcccagacccaccaacagatgcgccagccccatccccctgtgcctgtgccacagagccggctgctactgcgaggccatcagcgagcagtggacccagaagcacttccaggcctgccagagaagagaggacagcctggagctggccaacaagaccaccctgaccagcagcttcagaaacaccggcagcagaggccagagcaccaagggcagagcccacaccagagacgactgcatgaagaagatctggagaaactgctacatgttcggcaccaagagcttcagcggcgactag

SEQ ID NO: 13173 - DNA, 3519 bp, synthetic construct
  misc_feature 1..3519: note = Description of Artificial Sequence: Synthetic coding sequence
  source 1..3519: mol_type = other DNA
atggtgtggagactggtgctgctggccctgtgggtgtggcccagcacccaggccggccaccaggacaaggacaccaccttcgacctgttcagcatcagcaacatcaacagaaagaccatcggcgccaagcagttcagaggccccgaccccggcgtgcccgcctacagattcgtgagattcgactacatcccccccgtgaacgccgacgacctgagcaagatcaccaagatcatgagacagaaggagggcttcttcctgaccgcccagctgaagcaggacggcaagagcagaggcaccctgctggccctggagggccccggcctgagccagagacagttcgagatcgtgagcaacggccccgccgacaccctggacctgacctactggatcgacggcaccagacacgtggtgagcctggaggacgtgggcctggccgacagccagtggaagaacgtgaccgtgcaggtggccggcgagacctacagcctgcacgtgggctgcgacctgatcgacagcttcgccctggacgagcccttctacgagcacctgcaggccgagaagagcagaatgtacgtggccaagggcagcgccagagagagccacttcagaggcctgctgcagaacgtgcacctggtgttcgagaacagcgtggaggacatcctgagcaagaagggctgccagcagggccagggcgccgagatcaacgccatcagcgagaacaccgagaccctgagactgggcccccacgtgaccaccgagtacgtgggccccagcagcgagagaagacccgaggtgtgcgagagaagctgcgaggagctgggcaacatggtgcaggagctgagcggcctgcacgtgctggtgaaccagctgagcgagaacctgaagagagtgagcaacgacaaccagttcctgtgggagctgatcggcggcccccccaagaccagaaacatgagcgcctgctggcaggacggcagattcttcgccgagaacgagacctgggtggtggacagctgcaccacctgcacctgcaagaagttcaagaccatctgccaccagatcacctgcccccccgccacctgcgccagccccagcttcgtggagggcgagtgctgccccagctgcctgcacagcgtggacggcgaggagggctggagcccctgggccgagtggacccagtgcagcgtgacctgcggcagcggcacccagcagagaggcagaagctgcgacgtgaccagcaacacctgcctgggccccagcatccagaccagagcctgcagcctgagcaagtgcgacaccagaatcagacaggacggcggctggagccactggagcccctggagcagctgcagcgtgacctgcggcgtgggcaacatcaccagaatcagactgtgcaacagccccgtgccccagatgggcggcaagaactgcaagggcagcggcagagagaccaaggcctgccagggcgccccctgccccatcgacggcagatggagcccctggagcccctggagcgcctgcaccgtgacctgcgccggcggcatcagagagagaaccagagtgtgcaacagccccgagccccagtacggcggcaaggcctgcgtgggcgacgtgcaggagagacagatgtgcaacaagagaagctgccccgtggacggctgcctgagcaacccctgcttccccggcgcccagtgcagcagcttccccgacggcagctggagctgcggcagctgccccgtgggcttcctgggcaacggcacccactgcgaggacctggacgagtgcgccctggtgcccgacatctgcttcagcaccagcaaggtgcccagatgcgtgaacacccagcccggcttccactgcctgccctgcccccccagatacagaggcaaccagcccgtgggcgtgggcctggaggccgccaagaccgagaagcaggtgtgcgagcccgagaacccctgcaaggacaagacccacaactgccacaagcacgccgagtgcatctacctgggccacttcagcgaccccatgtacaagtgcgagtgccagaccggctacgccggcgacggcctgatctgcggcgaggacagcgacctggacggctggcccaacctgaacctggtgtgcgccaccaacgccacctaccactgcatcaaggacaactgcccccacctgcccaacagcggccaggaggacttcgacaaggacggcatcggcgacgcctgcgacgacgacgacgacaacgacggcgtgaccgacgagaaggacaactgccagctgctgttcaaccccagacaggccgactacgacaaggacgaggtgggcgacagatgcgacaactgcccctacgtgcacaaccccgcccagatcgacaccgacaacaacggcgagggcgacgcctgcagcgtggacatcgacggcgacgacgtgttcaacgagagagacaactgcccctacgtgtacaacaccgaccagagagacaccgacggcgacggcgtgggcgaccactgcgacaactgccccctggtgcacaaccccgaccagaccgacgtggacaacgacctggtgggcgaccagtgcgacaacaacgaggacatcgacgacgacggccaccagaacaaccaggacaactgcccctacatcagcaacgccaaccaggccgaccacgacagagacggccagggcgacgcctgcgaccccgacgacgacaacgacggcgtgcccgacgacagagacaactgcagactggtgttcaaccccgaccaggaggacctggacggcgacggcagaggcgacatctgcaaggacgacttcgacaacgacaacatccccgacatcgacgacgtgtgccccgagaacaacgccatcagcgagaccgacttcagaaacttccagatggtgcccctggaccccaagggcaccacccagatcgaccccaactgggtgatcagacaccagggcaaggagctggtgcagaccgccaacagcgaccccggcatcgccgtgggcttcgacgagttcggcagcgtggacttcagcggcaccttctacgtgaacaccgacagagacgacgactacgccggcttcgtgttcggctaccagagcagcagcagattctacgtggtgatgtggaagcaggtgacccagacctactgggaggaccagcccaccagagcctacggctacagcggcgtgagcctgaaggtggtgaacagcaccaccggcaccggcgagcacctgagaaacgccctgtggcacaccggcaacacccccggccaggtgagaaccctgtggcacgaccccagaaacatcggctggaaggactacaccgcctacagatggcacctgacccacagacccaagaccggctacatcagagtgctggtgcacgagggcaagcaggtgatggccgacagcggccccatctacgaccagacctacgccggcggcagactgggcctgttcgtgttcagccaggagatggtgtacttcagcgacctgaagtacgagtgcagagacatctag

SEQ ID NO: 13174 - DNA, 1293 bp, synthetic construct
  misc_feature 1..1293: note = Description of Artificial Sequence: Synthetic coding sequence
  source 1..1293: mol_type = other DNA
gacgacgacaacgacggcgtgaccgacgagaaggacaactgccagctgctgttcaaccccagacaggccgactacgacaaggacgaggtgggcgacagatgcgacaactgcccctacgtgcacaaccccgcccagatcgacaccgacaacaacggcgagggcgacgcctgcagcgtggacatcgacggcgacgacgtgttcaacgagagagacaactgcccctacgtgtacaacaccgaccagagagacaccgacggcgacggcgtgggcgaccactgcgacaactgccccctggtgcacaaccccgaccagaccgacgtggacaacgacctggtgggcgaccagtgcgacaacaacgaggacatcgacgacgacggccaccagaacaaccaggacaactgcccctacatcagcaacgccaaccaggccgaccacgacagagacggccagggcgacgcctgcgaccccgacgacgacaacgacggcgtgcccgacgacagagacaactgcagactggtgttcaaccccgaccaggaggacctggacggcgacggcagaggcgacatctgcaaggacgacttcgacaacgacaacatccccgacatcgacgacgtgtgccccgagaacaacgccatcagcgagaccgacttcagaaacttccagatggtgcccctggaccccaagggcaccacccagatcgaccccaactgggtgatcagacaccagggcaaggagctggtgcagaccgccaacagcgaccccggcatcgccgtgggcttcgacgagttcggcagcgtggacttcagcggcaccttctacgtgaacaccgacagagacgacgactacgccggcttcgtgttcggctaccagagcagcagcagattctacgtggtgatgtggaagcaggtgacccagacctactgggaggaccagcccaccagagcctacggctacagcggcgtgagcctgaaggtggtgaacagcaccaccggcaccggcgagcacctgagaaacgccctgtggcacaccggcaacacccccggccaggtgagaaccctgtggcacgaccccagaaacatcggctggaaggactacaccgcctacagatggcacctgacccacagacccaagaccggctacatcagagtgctggtgcacgagggcaagcaggtgatggccgacagcggccccatctacgaccagacctacgccggcggcagactgggcctgttcgtgttcagccaggagatggtgtacttcagcgacctgaagtacgagtgcagagtgatctag

SEQ ID NO: 13175 - DNA, 252 bp, synthetic construct
  misc_feature 1..252: note = Description of Artificial Sequence: Synthetic coding sequence
  source 1..252: mol_type = other DNA
atggtgtggagactggtgctgctggccctgtgggtgtggcccagcacccaggccggccaccaggacaaggacaccaccttcgacctgttcagcatcagcaacatcaacagaaagaccatcggcgccaagcagttcagaggccccgaccccggcgtgcccgcctacagattcgtgagattcgactacatcccccccgtgaacgccgacgacctgagcaagatcaccaagatcatgagacagaaggagggctag

SEQ ID NO: 13176 - DNA, 1449 bp, synthetic construct
  misc_feature 1..1449: note = Description of Artificial Sequence: Synthetic coding sequence
  source 1..1449: mol_type = other DNA
atggccgccctgatgacccccggcaccggcgccccccccgcccccggcgacttcagcggcgagggcagccagggcctgcccgaccccagccccgagcccaagcagctgcccgagctgatcagaatgaagagagacggcggcagactgagcgaggccgacatcagaggcttcgtggccgccgtggtgaacggcagcgcccagggcgcccagatcggcgccatgctgatggccatcagactgagaggcatggacctggaggagaccagcgtgctgacccaggccctggcccagagcggccagcagctggagtggcccgaggcctggagacagcagctggtggacaagcacagcaccggcggcgtgggcgacaaggtgagcctggtgctggcccccgccctggccgcctgcggctgcaaggtgcccatgatcagcggcagaggcctgggccacaccggcggcaccctggacaagctggagagcatccccggcttcaacgtgatccagagccccgagcagatgcaggtgctgctggaccaggccggctgctgcatcgtgggccagagcgagcagctggtgcccgccgacggcatcctgtacgccgccagagacgtgaccgccaccgtggacagcctgcccctgatcaccgccagcatcctgagcaagaagctggtggagggcctgagcgccctggtggtggacgtgaagttcggcggcgccgccgtgttccccaaccaggagcaggccagagagctggccaagaccctggtgggcgtgggcgccagcctgggcctgagagtggccgccgccctgaccgccatggacaagcccctgggcagatgcgtgggccacgccctggaggtggaggaggccctgctgtgcatggacggcgccggcccccccgacctgagagacctggtgaccaccctgggcggcgccctgctgtggctgagcggccacgccggcacccaggcccagggcgccgccagagtggccgccgccctggacgacggcagcgccctgggcagattcgagagaatgctggccgcccagggcgtggaccccggcctggccagagccctgtgcagcggcagccccgccgagagaagacagctgctgcccagagccagagagcaggaggagctgctggcccccgccgacggcaccgtggagctggtgagagccctgcccctggccctggtgctgcacgagctgggcgccggcagaagcagagccggcgagcccctgagactgggcgtgggcgccgagctgctggtggacgtgggccagagactgagaagaggcaccccctggctgagagtgcacagagacggccccgccctgagcggcccccagagcagagccctgcaggaggccctggtgctgagcgacagagcccccttcgccgcccccagccccttcgccgagctggtgctgcccccccagcagtag

SEQ ID NO: 13177 - DNA, 1449 bp, synthetic construct; identical to SEQ ID NO: 13176
  misc_feature 1..1449: note = Description of Artificial Sequence: Synthetic coding sequence
  source 1..1449: mol_type = other DNA

SEQ ID NO: 13178 - DNA, 1449 bp, synthetic construct; identical to SEQ ID NO: 13176
  misc_feature 1..1449: note = Description of Artificial Sequence: Synthetic coding sequence
  source 1..1449: mol_type = other DNA

SEQ ID NO: 13179 - DNA, 1233 bp, synthetic construct
  misc_feature 1..1233: note = Description of Artificial Sequence: Synthetic coding sequence
  source 1..1233: mol_type = other DNA
atggaggccgagaacgccggcagctacagcctgcagcaggcccaggccttctacaccttccccttccagcagctgatggccgaggcccccaacatggccgtggtgaacgagcagcagatgcccgaggaggtgcccgcccccgcccccgcccaggagcccgtgcaggaggcccccaagggcagaaagagaaagcccagaaccaccgagcccaagcagcccgtggagcccaagaagcccgtggagagcaagaagagcggcaagagcgccaagagcaaggagaagcaggagaagatcaccgacaccttcaaggtgaagagaaaggtggacagattcaacggcgtgagcgaggccgagctgctgaccaagaccctgcccgacatcctgaccttcaacctggacatcgtgatcatcggcatcaaccccggcctgatggccgcctacaagggccaccactaccccggccccggcaaccacttctggaagtgcctgttcatgagcggcctgagcgaggtgcagctgaaccacatggacgaccacaccctgcccggcaagtacggcatcggcttcaccaacatggtggagagaaccacccccggcagcaaggacctgagcagcaaggagttcagagagggcggcagaatcctggtgcagaagctgcagaagtaccagcccagaatcgccgtgttcaacggcaagtgcatctacgagatcttcagcaaggaggtgttcggcgtgaaggtgaagaacctggagttcggcctgcagccccacaagatccccgacaccgagaccctgtgctacgtgatgcccagcagcagcgccagatgcgcccagttccccagagcccaggacaaggtgcactactacatcaagctgaaggacctgagagaccagctgaagggcatcgagagaaacatggacgtgcaggaggtgcagtacaccttcgacctgcagctggcccaggaggacgccaagaagatggccgtgaaggaggagaagtacgaccccggctacgaggccgcctacggcggcgcctacggcgagaacccctgcagcagcgagccctgcggcttcagcagcaacggcctgatcgagagcgtggagctgagaggcgagagcgccttcagcggcatccccaacggccagtggatgacccagagcttcaccgaccagatccccagcttcagcaaccactgcggcacccaggagcaggaggaggagagccacgcctag

SEQ ID NO: 13180 - DNA, 621 bp, synthetic construct
  misc_feature 1..621: note = Description of Artificial Sequence: Synthetic coding sequence
  source 1..621: mol_type = other DNA
atgatcaccctgtaccagggcagcatggtgctggacctgcccacctggtggaagggccccagacccgccgccaagatcagccccggcatctacgagatcttcagcaaggaggtgttcggcgtgaaggtgaagaacctggagttcggcctgcagccccacaagatccccgacaccgagaccctgtgctacgtgatgcccagcagcagcgccagatgcgcccagttccccagagcccaggacaaggtgcactactacatcaagctgaaggacctgagagaccagctgaagggcatcgagagaaacatggacgtgcaggaggtgcagtacaccttcgacctgcagctggcccaggaggacgccaagaagatggccgtgaaggaggagaagtacgaccccggctacgaggccgcctacggcggcgcctacggcgagaacccctgcagcagcgagccctgcggcttcagcagcaacggcctgatcgagagcgtggagctgagaggcgagagcgccttcagcggcatccccaacggccagtggatgacccagagcttcaccgaccagatccccagcttcagcaaccactgcggcacccaggagcaggaggaggagagccacgcctag

SEQ ID NO: 13181 - DNA, 3294 bp, synthetic construct
  misc_feature 1..3294: note = Description of Artificial Sequence: Synthetic coding sequence
  source 1..3294: mol_type = other DNA
atgagcagctgcagaagcctgtgctgcggcgacatcagccagagcgccgtgctgttcctgtgccagggcaccctggccatgctggactggcagaacggcagcatgggcagaagcggcgaggccctgctgctggacaccgcccacgtgctgttcaccctgagcagccagatcaaggagcccaccctggagatgttcctgagcagaatcctggccagctggaccaacagcgccatccaggtgctggagagcagcagccccagcctgaccgacagcctgaacggcaacagcagcatcgtgggcagactgctggagtacgtgtacacccactgggagcaccccctggacgccctgagacaccagaccaagatcatgttcaagaacctgctgcagatgcacagactgaccgtggagggcgccgacttcgtgcccgaccccttcttcgtggagctgaccgagagcctgctgagactggagtggcacatcaagggcaagtacacctgcctgggctgcctggtggagtgcatcggcgtggagcacatcctggccatcgacaagaccatccccagccagatcctggaggtgatgggcgaccagagcctggtgccctacgccagcgacctgctggagaccatgttcagaaaccacaagagccacctgaagagccagaccgccgagagcagctggatcgaccagtggcacgagacctgggtgagccccctgctgttcatcctgtgcgagggcaacctggaccagaagagctacgtgatcgactactacctgcccaagctgctgagctacagccccgagagcctgcagtacatggtgaagatcctgcagaccagcatcgacgccaagaccggccaggagcagagcttccccagcctgggcagctgcaacagcagaggcgccctgggcgccctgatggcctgcctgagaatcgccagagcccacggccacctgcagagcgccaccgacacctgggagaacctggtgagcgacgccagaatcaagcagggcctgatccaccagcactgccaggtgagaatcgacaccctgggcctgctgtgcgagagcaacagaagcaccgagatcgtgagcatggaggagatgcagtggatccagttcttcatcacctacaacctgaacagccagagccccggcgtgagacagcagatctgcagcctgctgaagaagctgttctgcagaatccaggagagcagccaggtgctgtacaagctggagcagagcaagagcaagagagagcccgagaacgagctgaccaagcagcaccccagcgtgagcctgcagcagtacaagaacttcatgagcagcatctgcaacagcctgttcgaggccctgttccccggcagcagctacagcaccagattcagcgccctgaccatcctgggcagcatcgccgaggtgttccacgtgcccgagggcagaatctacaccgtgtaccagctgagccacgacatcgacgtgggcagattccagaccctgatggagtgcttcaccagcaccttcgaggacgtgaagatcctggccttcgacctgctgatgaagctgagcaagaccgccgtgcacttccaggacagcggcaagctgcagggcctgttccaggccgccctggagctgagcaccagcaccaagccctacgactgcgtgaccgccagctacctgctgaacttcctgatctggcaggacgccctgcccagcagcctgagcgcctacctgacccagcaggtggcctgcgacaacggcgacagacccgccgccgtggtggagagaaacaccctgatggtgatcaagtgcctgatggagaacctggaggaggaggtgagccaggccgagaacagcctgctgcaggccgccgccgccttccccatgtacggcagagtgcactgcatcaccggcgccctgcagaagctgagcctgaacagcctgcagctggtgagcgagtggagacccgtggtggagaagctgctgctgatgagctacagactgagcaccgtggtgagccccgtgatccagagcagcagccccgagggcctgatccccatggacaccgacagcgagagcgccagcagactgcagatgatcctgaacgagatccagcccagagacaccaacgactacttcaaccaggccaagatcctgaaggagcacgacagcttcgacatgaaggacctgaacgccagcgtggtgaacatcgacaccagcaccgagatcaagggcaaggaggtgaagacctgcgacgtgaccgcccagatggtgctggtgtgctgctggagaagcatgaaggaggtggccctgctgctgggcatgctgtgccagctgctgcccatgcagcccgtgcccgagagcagcgacggcctgctgaccgtggagcaggtgaaggagatcggcgactacttcaagcagcacctgctgcagagcagacacagaggcgccttcgagctggcctacaccggcttcgtgaagctgaccgaggtgctgaacagatgccccaacgtgagcctgcagaagctgcccgagcagtggctgtggagcgtgctggaggagatcaagtgcagcgaccccagcagcaagctgtgcgccaccagaagaagcgccggcatccccttctacatccaggccctgctggccagcgagcccaagaagggcagaatggacctgctgaagatcaccatgaaggagctgatcagcctggccggccccaccgacgacatccagagcaccgtgccccaggtgcacgccctgaacatcctgagagccctgttcagagacaccagactgggcgagaacatcatcccctacgtggccgacggcgccaaggccgccatcctgggcttcaccagccccgtgtgggccgtgagaaacagcagcaccctgctgttcagcgccctgatcaccagaatcttcggcgtgaagagagccaaggacgagcacagcaagaccaacagaatgaccggcagagagttcttcagcagattccccgagctgtaccccttcctgctgaagcagctggagaccgtggccaacaccgtggacagcgacatgggcgagcccaacagacaccccagcatgttcctgctgctgctggtgctggagagactgtacgccagccccatggacggcaccagcagcgccctgagcatgggccccttcgtgcccttcatcatgagagtgctgctgtgctgccccggctggagcgccgtggccagaagccagctgaccgccaccagcaccagctgggtgcaggccatcctgctgccccagccccccgagtag

SEQ ID NO: 13182 - DNA, 5643 bp, synthetic construct
  misc_feature 1..5643: note = Description of Artificial Sequence: Synthetic coding sequence
  source 1..5643: mol_type = other DNA
atgggcgtgaagaagaagaaggagatgcaggtggccgccctgaccatctgccaccaggacctggagaccctgaagagcttcgccgacgtggagggcaagaacctggccagcctgctgctgcactgcgtgcagctgaccgacggcgtgagccagatccactacatcaagcagatcgtgcccctgctggagaaggccgacaagaacggcatgtgcgaccccaccatccagagctgcctggacatcctggccggcatctacctgagcctgagcctgaagaaccccctgaagaaggtgctggccagcagcctgaacagcctgcccgacttcttcctgcccgaggccatgcacagattcaccagcagactgcaggaggagctgaacaccaccgacctgtacagctacagaaaggtgaccgacaacatcagcagctgcatggagaacttcaacctgggcagagccagcgtgaacaacctgctgaagaacgtgctgcacttcctgcagaagagcctgatcgagatcctggaggagaacagaaagtgcgccggcaaccacatcatccagacccagctgatgaacgacctgctggtgggcatcagagtgagcatgatgctggtgcagaaggtgcaggacttccagggcaacctgtggaagaccagcgacagccccatctggcagaacatgtgcggcctgctgagcatcttcaccaaggtgctgagcgacgacgacctgctgcagaccgtgcagagcaccagcggcctggccatcatcctgttcatcaagaccatgttccaccccagcgagaagatcccccacctgatcagcagcgtgctgctgagaagcgtggactgcaccagcgtgcccgagtggttcatgagcagctgcagaagcctgtgctgcggcgacatcagccagagcgccgtgctgttcctgtgccagggcaccctggccatgctggactggcagaacggcagcatgggcagaagcggcgaggccctgctgctggacaccgcccacgtgctgttcaccctgagcagccagatcaaggagcccaccctggagatgttcctgagcagaatcctggccagctggaccaacagcgccatccaggtgctggagagcagcagccccagcctgaccgacagcctgaacggcaacagcagcatcgtgggcagactgctggagtacgtgtacacccactgggagcaccccctggacgccctgagacaccagaccaagatcatgttcaagaacctgctgcagatgcacagactgaccgtggagggcgccgacttcgtgcccgaccccttcttcgtggagctgaccgagagcctgctgagactggagtggcacatcaagggcaagtacacctgcctgggctgcctggtggagtgcatcggcgtggagcacatcctggccatcgacaagaccatccccagccagatcctggaggtgatgggcgaccagagcctggtgccctacgccagcgacctgctggagaccatgttcagaaaccacaagagccacctgaagagccagaccgccgagagcagctggatcgaccagtggcacgagacctgggtgagccccctgctgttcatcctgtgcgagggcaacctggaccagaagagctacgtgatcgactactacctgcccaagctgctgagctacagccccgagagcctgcagtacatggtgaagatcctgcagaccagcatcgacgccaagaccggccaggagcagagcttccccagcctgggcagctgcaacagcagaggcgccctgggcgccctgatggcctgcctgagaatcgccagagcccacggccacctgcagagcgccaccgacacctgggagaacctggtgagcgacgccagaatcaagcagggcctgatccaccagcactgccaggtgagaatcgacaccctgggcctgctgtgcgagagcaacagaagcaccgagatcgtgagcatggaggagatgcagtggatccagttcttcatcacctacaacctgaacagccagagccccggcgtgagacagcagatctgcagcctgctgaagaagaagctgttctgcagaatccaggagagcagccaggtgctgtacaagctggagcagagcaagagcaagagagagcccgagaacgagctgaccaagcagcaccccagcgtgagcctgcagcagtacaagaacttcatgagcagcatctgcaacagcctgttcgaggccctgttccccggcagcagctacagcaccagattcagcgccctgaccatcctgggcagcatcgccgaggtgttccacgtgcccgagggcagaatctacaccgtgtaccagctgagccacgacatcgacgtgggcagattccagaccctgatggagtgcttcaccagcaccttcgaggacgtgaagatcctggccttcgacctgctgatgaagctgagcaagaccgccgtgcacttccaggacagcggcaagctgcagggcctgttccaggccgccctggagctgagcaccagcaccaagccctacgactgcgtgaccgccagctacctgctgaacttcctgatctggcaggacgccctgcccagcagcctgagcgcctacctgacccagcaggtggcctgcgacaacggcgacagacccgccgccgtggtggagagaaacaccctgatggtgatcaagtgcctgatggagaacctggaggaggaggtgagccaggccgagaacagcctgctgcaggccgccgccgccttccccatgtacggcagagtgcactgcatcaccggcgccctgcagaagctgagcctgaacagcctgcagctggtgagcgagtggagacccgtggtggagaagctgctgctgatgagctacagactgagcaccgtggtgagccccgtgatccagagcagcagccccgagggcctgatccccatggacaccgacagcgagagcgccagcagactgcagatgatcctgaacgagatccagcccagagacaccaacgactacttcaaccaggccaagatcctgaaggagcacgacagcttcgacatgaaggacctgaacgccagcgtggtgaacatcgacaccagcaccgagatcaagggcaaggaggtgaagacctgcgacgtgaccgcccagatggtgctggtgtgctgctggagaagcatgaaggaggtggccctgctgctgggcatgctgtgccagctgctgcccatgcagcccgtgcccgagagcagcgacggcctgctgaccgtggagcaggtgaaggagatcggcgactacttcaagcagcacctgctgcagagcagacacagaggcgccttcgagctggcctacaccggcttcgtgaagctgaccgaggtgctgaacagatgccccaacgtgagcctgcagaagctgcccgagcagtggctgtggagcgtgctggaggagatcaagtgcagcgaccccagcagcaagctgtgcgccaccagaagaagcgccggcatccccttctacatccaggccctgctggccagcgagcccaagaagggcagaatggacctgctgaagatcaccatgaaggagctgatcagcctggccggccccaccgacgacatccagagcaccgtgccccaggtgcacgccctgaacatcctgagagccctgttcagagacaccagactgggcgagaacatcatcccctacgtggccgacggcgccaaggccgccatcctgggcttcaccagccccgtgtgggccgtgagaaacagcagcaccctgctgttcagcgccctgatcaccagaatcttcggcgtgaagagagccaaggacgagcacagcaagaccaacagatgcggccacagccccgtgtaccacagcagagagatggccgccagagccctggtgcccttcgtgatgatcgaccacatccccaacaccatcagaaccctgctgagcaccctgcccagctgcaccgaccagtgcttcagacagaaccacatccacggcaccctgctgcaggtgttccacctgctgcaggcctacagcgacagcaagcacggcaccaacagcgacttccagcacgagctgaccgacatcaccgtgtgcaccaaggccaagctgtggctggccaagagacagaacccctgcctggtgaccagagccgtgtacatcgacatcctgttcctgctgacctgctgcctgaacagaagcgccaaggacaaccagcccgtgctggagagcctgggcttctgggaggaggtgagaggcatcatcagcggcagcgagctgatcaccggcttcccctgggccttcaaggtgcccggcctgccccagtacctgcagagcctgaccagactggccatcgccgccgtgtgggccgccgccgccaagagcggcgagagagagaccaacgtgcccatcagcttcagccagctgctggagagcgccttccccgaggtgagaagcctgaccctggaggccctgctggagaagttcctggccgccgccagcggcctgggcgagaagggcgtgccccccctgctgtgcaacatgggcgagaagttcctgctgctggccatgaaggagaaccaccccgagtgcttctgcaagatcctgaagatcctgcactgcatggaccccggcgagtggctgccccagaccgagcactgcgtgcacctgacccccaaggagttcctgatctggaccatggacatcgccagcaacgagagaagcgagatccagagcgtggccctgagactggccagcaaggtgatcagccaccacatgcagacctgcgtggagaacagagagctgatcgccgccgagctgaagcagtgggtgcagctggtgatcctgagctgcgaggaccacctgcccaccgagagcagactggccgtggtggaggtgctgaccagcaccacccccctgttcctgaccaacccccaccccatcctggagctgcaggacaccctggccctgtggaagtgcgtgctgaccctgctgcagagcgaggagcaggccgtgagagacgccgccaccgagaccgtgaccaccgccatgagccaggagaacacctgccagagcaccgagttcgccttctgccaggtggacgccagcatcgccctggccctggccctggccgtgctgtgcgacctgctgcagcagtgggaccagctggcccccggcctgcccatcctgctgggctggctgctgggcgagagcgacgacctggtggcctgcgtggagagcatgcaccaggtggaggaggactacctgttcgagaaggccgaggtgaacttctgggccgagaccctgatcttcgtgaagtacctgtgcaagcacctgttctgcctgctgagcaagagcggctggagaccccccagccccgagatgctgtgccacctgcagagaatggtgagcgagcagtgccacctgctgagccagttcttcagagagctgccccccgccgccgagttcgtgaagaccgtggagttcaccagactgagaatccaggaggagagaaccctggcctgcctgagactgctggccttcctggagggcaaggagggcgaggacaccctggtgctgagcgtgtgggacagctacgccgagagcagacagctgaccctgcccagaaccgaggccgcctgctag

SEQ ID NO: 13183 - DNA, 5862 bp, synthetic construct
  misc_feature 1..5862: note = Description of Artificial Sequence: Synthetic coding sequence
  source 1..5862: mol_type = other DNA
atgggcgtgaagaagaagaaggagatgcaggtggccgccctgaccatctgccaccaggacctggagaccctgaagagcttcgccgacgtggagggcaagaacctggccagcctgctgctgcactgcgtgcagctgaccgacggcgtgagccagatccactacatcaagcagatcgtgcccctgctggagaaggccgacaagaacggcatgtgcgaccccaccatccagagctgcctggacatcctggccggcatctacctgagcctgagcctgaagaaccccctgaagaaggtgctggccagcagcctgaacagcctgcccgacttcttcctgcccgaggccatgcacagattcaccagcagactgcaggaggagctgaacaccaccgacctgtacagctacagaaaggtgaccgacaacatcagcagctgcatggagaacttcaacctgggcagagccagcgtgaacaacctgctgaagaacgtgctgcacttcctgcagaagagcctgatcgagatcctggaggagaacagaaagtgcgccggcaaccacatcatccagacccagctgatgaacgacctgctggtgggcatcagagtgagcatgatgctggtgcagaaggtgcaggacttccagggcaacctgtggaagaccagcgacagccccatctggcagaacatgtgcggcctgctgagcatcttcaccaaggtgctgagcgacgacgacctgctgcagaccgtgcagagcaccagcggcctggccatcatcctgttcatcaagaccatgttccaccccagcgagaagatcccccacctgatcagcagcgtgctgctgagaagcgtggactgcaccagcgtgcccgagtggttcatgagcagctgcagaagcctgtgctgcggcgacatcagccagagcgccgtgctgttcctgtgccagggcaccctggccatgctggactggcagaacggcagcatgggcagaagcggcgaggccctgctgctggacaccgcccacgtgctgttcaccctgagcagccagatcaaggagcccaccctggagatgttcctgagcagaatcctggccagctggaccaacagcgccatccaggtgctggagagcagcagccccagcctgaccgacagcctgaacggcaacagcagcatcgtgggcagactgctggagtacgtgtacacccactgggagcaccccctggacgccctgagacaccagaccaagatcatgttcaagaacctgctgcagatgcacagactgaccgtggagggcgccgacttcgtgcccgaccccttcttcgtggagctgaccgagagcctgctgagactggagtggcacatcaagggcaagtacacctgcctgggctgcctggtggagtgcatcggcgtggagcacatcctggccatcgacaagaccatccccagccagatcctggaggtgatgggcgaccagagcctggtgccctacgccagcgacctgctggagaccatgttcagaaaccacaagagccacctgaagagccagaccgccgagagcagctggatcgaccagtggcacgagacctgggtgagccccctgctgttcatcctgtgcgagggcaacctggaccagaagagctacgtgatcgactactacctgcccaagctgctgagctacagccccgagagcctgcagtacatggtgaagatcctgcagaccagcatcgacgccaagaccggccaggagcagagcttccccagcctgggcagctgcaacagcagaggcgccctgggcgccctgatggcctgcctgagaatcgccagagcccacggccacctgcagagcgccaccgacacctgggagaacctggtgagcgacgccagaatcaagcagggcctgatccaccagcactgccaggtgagaatcgacaccctgggcctgctgtgcgagagcaacagaagcaccgagatcgtgagcatggaggagatgcagtggatccagttcttcatcacctacaacctgaacagccagagccccggcgtgagacagcagatctgcagcctgctgaagaagctgttctgcagaatccaggagagcagccaggtgctgtacaagctggagcagagcaagagcaagagagagcccgagaacgagctgaccaagcagcaccccagcgtgagcctgcagcagtacaagaacttcatgagcagcatctgcaacagcctgttcgaggccctgttccccggcagcagctacagcaccagattcagcgccctgaccatcctgggcagcatcgccgaggtgttccacgtgcccgagggcagaatctacaccgtgtaccagctgagccacgacatcgacgtgggcagattccagaccctgatggagtgcttcaccagcaccttcgaggacgtgaagatcctggccttcgacctgctgatgaagctgagcaagaccgccgtgcacttccaggacagcggcaagctgcagggcctgttccaggccgccctggagctgagcaccagcaccaagccctacgactgcgtgaccgccagctacctgctgaacttcctgatctggcaggacgccctgcccagcagcctgagcgcctacctgacccagcaggtggcctgcgacaacggcgacagacccgccgccgtggtggagagaaacaccctgatggtgatcaagtgcctgatggagaacctggaggaggaggtgagccaggccgagaacagcctgctgcaggccgccgccgccttccccatgtacggcagagtgcactgcatcaccggcgccctgcagaagctgagcctgaacagcctgcagctggtgagcgagtggagacccgtggtggagaagctgctgctgatgagctacagactgagcaccgtggtgagccccgtgatccagagcagcagccccgagggcctgatccccatggacaccgacagcgagagcgccagcagactgcagatgatcctgaacgagatccagcccagagacaccaacgactacttcaaccaggccaagatcctgaaggagcacgacagcttcgacatgaaggacctgaacgccagcgtggtgaacatcgacaccagcaccgagatcaagggcaaggaggtgaagacctgcgacgtgaccgcccagatggtgctggtgtgctgctggagaagcatgaaggaggtggccctgctgctgggcatgctgtgccagctgctgcccatgcagcccgtgcccgagagcagcgacggcctgctgaccgtggagcaggtgaaggagatcggcgactacttcaagcagcacctgctgcagagcagacacagaggcgccttcgagctggcctacaccggcttcgtgaagctgaccgaggtgctgaacagatgccccaacgtgagcctgcagaagctgcccgagcagtggctgtggagcgtgctggaggagatcaagtgcagcgaccccagcagcaagctgtgcgccaccagaagaagcgccggcatccccttctacatccaggccctgctggccagcgagcccaagaagggcagaatggacctgctgaagatcaccatgaaggagctgatcagcctggccggccccaccgacgacatccagagcaccgtgccccaggtgcacgccctgaacatcctgagagccctgttcagagacaccagactgggcgagaacatcatcccctacgtggccgacggcgccaaggccgccatcctgggcttcaccagccccgtgtgggccgtgagaaacagcagcaccctgctgttcagcgccctgatcaccagaatcttcggcgtgaagagagccaaggacgagcacagcaagaccaacagaatgaccggcagagagttcttcagcagattccccgagctgtaccccttcctgctgaagcagctggagaccgtggccaacaccgtggacagcgacatgggcgagcccaacagacaccccagcatgttcctgctgctgctggtgctggagagactgtacgccagccccatggacggcaccagcagcgccctgagcatgggccccttcgtgcccttcatcatgagatgcggccacagccccgtgtaccacagcagagagatggccgccagagccctggtgcccttcgtgatgatcgaccacatccccaacaccatcagaaccctgctgagcaccctgcccagctgcaccgaccagtgcttcagacagaaccacatccacggcaccctgctgcaggtgttccacctgctgcaggcctacagcgacagcaagcacggcaccaacagcgacttccagcacgagctgaccgacatcaccgtgtgcaccaaggccaagctgtggctggccaagagacagaacccctgcctggtgaccagagccgtgtacatcgacatcctgttcctgctgacctgctgcctgaacagaagcgccaaggacaaccagcccgtgctggagagcctgggcttctgggaggaggtgagaggcatcatcagcggcagcgagctgatcaccggcttcccctgggccttcaaggtgcccggcctgccccagtacctgcagagcctgaccagactggccatcgccgccgtgtgggccgccgccgccaagagcggcgagagagagaccaacgtgcccatcagcttcagccagctgctggagagcgccttccccgaggtgagaagcctgaccctggaggccctgctggagaagttcctggccgccgccagcggcctgggcgagaagggcgtgccccccctgctgtgcaacatgggcgagaagttcctgctgctggccatgaaggagaaccaccccgagtgcttctgcaagatcctgaagatcctgcactgcatggaccccggcgagtggctgccccagaccgagcactgcgtgcacctgacccccaaggagttcctgatctggaccatggacatcgccagcaacgagagaagcgagatccagagcgtggccctgagactggccagcaaggtgatcagccaccacatgcagacctgcgtggagaacagagagctgatcgccgccgagctgaagcagtgggtgcagctggtgatcctgagctgcgaggaccacctgcccaccgagagcagactggccgtggtggaggtgctgaccagcaccacccccctgttcctgaccaacccccaccccatcctggagctgcaggacaccctggccctgtggaagtgcgtgctgaccctgctgcagagcgaggagcaggccgtgagagacgccgccaccgagaccgtgaccaccgccatgagccaggagaacacctgccagagcaccgagttcgccttctgccaggtggacgccagcatcgccctggccctggccctggccgtgctgtgcgacctgctgcagcagtgggaccagctggcccccggcctgcccatcctgctgggctggctgctgggcgagagcgacgacctggtggcctgcgtggagagcatgcaccaggtggaggaggactacctgttcgagaaggccgaggtgaacttctgggccgagaccctgatcttcgtgaagtacctgtgcaagcacctgttctgcctgctgagcaagagcggctggagaccccccagccccgagatgctgtgccacctgcagagaatggtgagcgagcagtgccacctgctgagccagttcttcagagagctgccccccgccgccgagttcgtgaagaccgtggagttcaccagactgagaatccaggaggagagaaccctggcctgcctgagactgctggccttcctggagggcaaggagggcgaggacaccctggtgctgagcgtgtgggacagctacgccgagagcagacagctgaccctgcccagaaccgaggccgcctgctag

SEQ ID NO: 13184 - DNA, 5862 bp, synthetic construct; identical to SEQ ID NO: 13183
  misc_feature 1..5862: note = Description of Artificial Sequence: Synthetic coding sequence
  source 1..5862: mol_type = other DNA

SEQ ID NO: 13185 - DNA, 4905 bp, synthetic construct
  misc_feature 1..4905: note = Description of Artificial Sequence: Synthetic coding sequence
  source 1..4905: mol_type = other DNA
atgagcagctgcagaagcctgtgctgcggcgacatcagccagagcgccgtgctgttcctgtgccagggcaccctggccatgctggactggcagaacggcagcatgggcagaagcggcgaggccctgctgctggacaccgcccacgtgctgttcaccctgagcagccagatcaaggagcccaccctggagatgttcctgagcagaatcctggccagctggaccaacagcgccatccaggtgctggagagcagcagccccagcctgaccgacagcctgaacggcaacagcagcatcgtgggcagactgctggagtacgtgtacacccactgggagcaccccctggacgccctgagacaccagaccaagatcatgttcaagaacctgctgcagatgcacagactgaccgtggagggcgccgacttcgtgcccgaccccttcttcgtggagctgaccgagagcctgctgagactggagtggcacatcaagggcaagtacacctgcctgggctgcctggtggagtgcatcggcgtggagcacatcctggccatcgacaagaccatccccagccagatcctggaggtgatgggcgaccagagcctggtgccctacgccagcgacctgctggagaccatgttcagaaaccacaagagccacctgaagagccagaccgccgagagcagctggatcgaccagtggcacgagacctgggtgagccccctgctgttcatcctgtgcgagggcaacctggaccagaagagctacgtgatcgactactacctgcccaagctgctgagctacagccccgagagcctgcagtacatggtgaagatcctgcagaccagcatcgacgccaagaccggccaggagcagagcttccccagcctgggcagctgcaacagcagaggcgccctgggcgccctgatggcctgcctgagaatcgccagagcccacggccacctgcagagcgccaccgacacctgggagaacctggtgagcgacgccagaatcaagcagggcctgatccaccagcactgccaggtgagaatcgacaccctgggcctgctgtgcgagagcaacagaagcaccgagatcgtgagcatggaggagatgcagtggatccagttcttcatcacctacaacctgaacagccagagccccggcgtgagacagcagatctgcagcctgctgaagaagctgttctgcagaatccaggagagcagccaggtgctgtacaagctggagcagagcaagagcaagagagagcccgagaacgagctgaccaagcagcaccccagcgtgagcctgcagcagtacaagaacttcatgagcagcatctgcaacagcctgttcgaggccctgttccccggcagcagctacagcaccagattcagcgccctgaccatcctgggcagcatcgccgaggtgttccacgtgcccgagggcagaatctacaccgtgtaccagctgagccacgacatcgacgtgggcagattccagaccctgatggagtgcttcaccagcaccttcgaggacgtgaagatcctggccttcgacctgctgatgaagctgagcaagaccgccgtgcacttccaggacagcggcaagctgcagggcctgttccaggccgccctggagctgagcaccagcaccaagccctacgactgcgtgaccgccagctacctgctgaacttcctgatctggcaggacgccctgcccagcagcctgagcgcctacctgacccagcaggtggcctgcgacaacggcgacagacccgccgccgtggtggagagaaacaccctgatggtgatcaagtgcctgatggagaacctggaggaggaggtgagccaggccgagaacagcctgctgcaggccgccgccgccttccccatgtacggcagagtgcactgcatcaccggcgccctgcagaagctgagcctgaacagcctgcagctggtgagcgagtggagacccgtggtggagaagctgctgctgatgagctacagactgagcaccgtggtgagccccgtgatccagagcagcagccccgagggcctgatccccatggacaccgacagcgagagcgccagcagactgcagatgatcctgaacgagatccagcccagagacaccaacgactacttcaaccaggccaagatcctgaaggagcacgacagcttcgacatgaaggacctgaacgccagcgtggtgaacatcgacaccagcaccgagatcaagggcaaggaggtgaagacctgcgacgtgaccgcccagatggtgctggtgtgctgctggagaagcatgaaggaggtggccctgctgctgggcatgctgtgccagctgctgcccatgcagcccgtgcccgagagcagcgacggcctgctgaccgtggagcaggtgaaggagatcggcgactacttcaagcagcacctgctgcagagcagacacagaggcgccttcgagctggcctacaccggcttcgtgaagctgaccgaggtgctgaacagatgccccaacgtgagcctgcagaagctgcccgagcagtggctgtggagcgtgctggaggagatcaagtgcagcgaccccagcagcaagctgtgcgccaccagaagaagcgccggcatccccttctacatccaggccctgctggccagcgagcccaagaagggcagaatggacctgctgaagatcaccatgaaggagctgatcagcctggccggccccaccgacgacatccagagcaccgtgccccaggtgcacgccctgaacatcctgagagccctgttcagagacaccagactgggcgagaacatcatcccctacgtggccgacggcgccaaggccgccatcctgggcttcaccagccccgtgtgggccagccagatgaccggcagagagttcttcagcagattccccgagctgtaccccttcctgctgaagcagctggagaccgtggccaacaccgtggacagcgacatgggcgagcccaacagacaccccagcatgttcctgctgctgctggtgctggagagactgtacgccagccccatggacggcaccagcagcgccctgagcatgggccccttcgtgcccttcatcatgagatgcggccacagccccgtgtaccacagcagagagatggccgccagagccctggtgcccttcgtgatgatcgaccacatccccaacaccatcagaaccctgctgagcaccctgcccagctgcaccgaccagtgcttcagacagaaccacatccacggcaccctgctgcaggtgttccacctgctgcaggcctacagcgacagcaagcacggcaccaacagcgacttccagcacgagctgaccgacatcaccgtgtgcaccaaggccaagctgtggctggccaagagacagaacccctgcctggtgaccagagccgtgtacatcgacatcctgttcctgctgacctgctgcctgaacagaagcgccaaggacaaccagcccgtgctggagagcctgggcttctgggaggaggtgagaggcatcatcagcggcagcgagctgatcaccggcttcccctgggccttcaaggtgcccggcctgccccagtacctgcagagcctgaccagactggccatcgccgccgtgtgggccgccgccgccaagagcggcgagagagagaccaacgtgcccatcagcttcagccagctgctggagagcgccttccccgaggtgagaagcctgaccctggaggccctgctggagaagttcctggccgccgccagcggcctgggcgagaagggcgtgccccccctgctgtgcaacatgggcgagaagttcctgctgctggccatgaaggagaaccaccccgagtgcttctgcaagatcctgaagatcctgcactgcatggaccccggcgagtggctgccccagaccgagcactgcgtgcacctgacccccaaggagttcctgatctggaccatggacatcgccagcaacgagagaagcgagatccagagcgtggccctgagactggccagcaaggtgatcagccaccacatgcagacctgcgtggagaacagagagctgatcgccgccgagctgaagcagtgggtgcagctggtgatcctgagctgcgaggaccacctgcccaccgagagcagactggccgtggtggaggtgctgaccagcaccacccccctgttcctgaccaacccccaccccatcctggagctgcaggacaccctggccctgtggaagtgcgtgctgaccctgctgcagagcgaggagcaggccgtgagagacgccgccaccgagaccgtgaccaccgccatgagccaggagaacacctgccagagcaccgagttcgccttctgccaggtggacgccagcatcgccctggccctggccctggccgtgctgtgcgacctgctgcagcagtgggaccagctggcccccggcctgcccatcctgctgggctggctgctgggcgagagcgacgacctggtggcctgcgtggagagcatgcaccaggtggaggaggactacctgttcgagaaggccgaggtgaacttctgggccgagaccctgatcttcgtgaagtacctgtgcaagcacctgttctgcctgctgagcaagagcggctggagaccccccagccccgagatgctgtgccacctgcagagaatggtgagcgagcagtgccacctgctgagccagttcttcagagagctgccccccgccgccgagttcgtgaagaccgtggagttcaccagactgagaatccaggaggagagaaccctggcctgcctgagactgctggccttcctggagggcaaggagggcgaggacaccctggtgctgagcgtgtgggacagctacgccgagagcagacagctgaccctgcccagaaccgaggccgcctgctag

SEQ ID NO: 13186 - DNA, 2685 bp, synthetic construct
  misc_feature 1..2685: note = Description of Artificial Sequence: Synthetic coding sequence
  source 1..2685: mol_type = other DNA
atgggcgtgaagaagaagaaggagatgcaggtggccgccctgaccatctgccaccaggacctggagaccctgaagagcttcgccgacgtggagggcaagaacctggccagcctgctgctgcactgcgtgcagctgaccgacggcgtgagccagatccactacatcaagcagatcgtgcccctgctggagaaggccgacaagaacggcatgtgcgaccccaccatccagagctgcctggacatcctggccggcatctacctgagcctgagcctgaagaaccccctgaagaaggtgctggccagcagcctgaacagcctgcccgacttcttcctgcccgaggccatgcacagattcaccagcagactgcaggaggagctgaacaccaccgacctgtacagctacagaaaggtgaccgacaacatcagcagctgcatggagaacttcaacctgggcagagccagcgtgaacaacctgctgaagaacgtgctgcacttcctgcagaagagcctgatcgagatcctggaggagaacagaaagtgcgccggcaaccacatcatccagacccagctgatgaacgacctgctggtgggcatcagagtgagcatgatgctggtgcagaaggtgcaggacttccagggcaacctgtggaagaccagcgacagccccatctggcagaacatgtgcggcctgctgagcatcttcaccaaggtgctgagcgacgacgacctgctgcagaccgtgcagagcaccagcggcctggccatcatcctgttcatcaagaccatgttccaccccagcgagaagatcccccacctgatcagcagcgtgctgctgagaagcgtggactgcaccagcgtgcccgagtggttcatgagcagctgcagaagcctgtgctgcggcgacatcagccagagcgccgtgctgttcctgtgccagggcaccctggccatgctggactggcagaacggcagcatgggcagaagcggcgaggccctgctgctggacaccgcccacgtgctgttcaccctgagcagccagatcaaggagcccaccctggagatgttcctgagcagaatcctggccagctggaccaacagcgccatccaggtgctggagagcagcagccccagcctgaccgacagcctgaacggcaacagcagcatcgtgggcagactgctggagtacgtgtacacccactgggagcaccccctggacgccctgagacaccagaccaagatcatgttcaagaacctgctgcagatgcacagactgaccgtggagggcgccgacttcgtgcccgaccccttcttcgtggagctgaccgagagcctgctgagactggagtggcacatcaagggcaagtacacctgcctgggctgcctggtggagtgcatcggcgtggagcacatcctggccatcgacaagaccatccccagccagatcctggaggtgatgggcgaccagagcctggtgccctacgccagcgacctgctggagaccatgttcagaaaccacaagagccacctgaagagccagaccgccgagagcagctggatcgaccagtggcacgagacctgggtgagccccctgctgttcatcctgtgcgagggcaacctggaccagaagagctacgtgatcgactactacctgcccaagctgctgagctacagccccgagagcctgcagtacatggtgaagatcctgcagaccagcatcgacgccaagaccggccaggagcagagcttccccagcctgggcagctgcaacagcagaggcgccctgggcgccctgatggcctgcctgagaatcgccagagcccacggccacctgcagagcgccaccgacacctgggagaacctggtgagcgacgccagaatcaagcagggcctgatccaccagcactgccaggtgagaatcgacaccctgggcctgctgtgcgagagcaacagaagcaccgagatcgtgagcatggaggagatgcagtggatccagttcttcatcacctacaacctgaacagccagagccccggcgtgagacagcagatctgcagcctgctgaagaagctgttctgcagaatccaggagagcagccaggtgctgtacaagctggagcagagcaagagcaagagagagcccgagaacgagctgaccaagcagcaccccagcgtgagcctgcagcagtacaagaacttcatgagcagcatctgcaacagcctgttcgaggccctgttccccggcagcagctacagcaccagattcagcgccctgaccatcctgggcagcatcgccgaggtgttccacgtgcccgagggcagaatctacaccgtgtaccagctgagccacgacatcgacgtgggcagattccagaccctgatggagtgcttcaccagcaccttcgaggacgtgaagatcctggccttcgacctgctgatgaagctgagcaagaccgccgtgcacttccaggacagcggcaagctgcagggcctgttccaggccgccctggagctgagcaccagcaccaagccctacgactgcgtgaccgccagctacctgctgaacttcctgatctggcaggacgccctgcccagcagcctgagcgcctacctgacccagcaggtggcctgcgacaacggcgacagacccgccgccgtggtggagagaaacaccctgatgggcctgtactag

SEQ ID NO: 13187 - DNA, 2268 bp, synthetic construct
  misc_feature 1..2268: note = Description of Artificial Sequence: Synthetic coding sequence
  source 1..2268: mol_type = other DNA
atgagcggcaccaacctggacggcaacgacgagttcgacgagcagctgagaatgcaggagctgtacggcgacggcaaggacggcgacacccagaccgacgccggcggcgagcccgacagcctgggccagcagcccaccgacaccccctacgagtgggacctggacaagaaggcctggttccccaagatcaccgaggacttcatcgccacctaccaggccaactacggcttcagcaacgacggcgccagcagcagcaccgccaacgtggaggacgtgcacgccagaaccgccgaggagcccccccaggagaaggcccccgagcccaccgacgccagaaagaagggcgagaagagaaaggccgagagcggctggttccacgtggaggaggacagaaacaccaacgtgtacgtgagcggcctgccccccgacatcaccgtggacgagttcatccagctgatgagcaagttcggcatcatcatgagagacccccagaccgaggagttcaaggtgaagctgtacaaggacaaccagggcaacctgaagggcgacggcctgtgctgctacctgaagagagagagcgtggagctggccctgaagctgctggacgaggacgagatcagaggctacaagctgcacgtggaggtggccaagttccagctgaagggcgagtacgacgccagcaagaagaagaagaagtgcaaggactacaagaagaagctgagcatgcagcagaagcagctggactggagacccgagagaagagccggccccagcagaatgagacacgagagagtggtgatcatcaagaacatgttccaccccatggacttcgaggacgaccccctggtgctgaacgagatcagagaggacctgagagtggagtgcagcaagttcggccagatcagaaagctgctgctgttcgacagacaccccgacggcgtggccagcgtgagcttcagagaccccgaggaggccgactactgcatccagaccctggacggcagatggttcggcggcagacagatcaccgcccaggcctgggacggcaccaccgactaccaggtggaggagaccagcagagagagagaggagagactgagaggctgggaggccttcctgaacgcccccgaggccaacagaggcctgagaagaagcgacagcgtgagcgccagcgagagagccggccccagcagagccagacacttcagcgagcaccccagcaccagcaagatgaacgcccaggagaccgccaccggcatggccttcgaggagcccatcgacgagaagaagttcgagaagaccgaggacggcggcgagttcgaggagggcgccagcgagaacaacgccaaggagagcagccccgagaaggaggccgaggagggctgccccgagaaggagagcgaggagggctgccccaagagaggcttcgagggcagctgcagccagaaggagagcgaggagggcaaccccgtgagaggcagcgaggaggacagccccaagaaggagagcaagaagaagaccctgaagaacgactgcgaggagaacggcctggccaaggagagcgaggacgacctgaacaaggagagcgaggaggaggtgggccccaccaaggagagcgaggaggacgacagcgagaaggagagcgacgaggactgcagcgagaagcagagcgaggacggcagcgagagagagttcgaggagaacggcctggagaaggacctggacgaggagggcagcgagaaggagctgcacgagaacgtgctggacaaggagctggaggagaacgacagcgagaacagcgagttcgaggacgacggcagcgagaaggtgctggacgaggagggcagcgagagagagttcgacgaggacagcgacgagaaggaggaggaggaggacacctacgagaaggtgttcgacgacgagagcgacgagaaggaggacgaggagtacgccgacgagaagggcctggaggccgccgacaagaaggccgaggagggcgacgccgacgagaagctgttcgaggagagcgacgacaaggaggacgaggacgccgacggcaaggaggtggaggacgccgacgagaagctgttcgaggacgacgacagcaacgagaagctgttcgacgaggaggaggacagcagcgagaagctgttcgacgacagcgacgagagaggcaccctgggcggcttcggcagcgtggaggagggccccctgagcaccggcagcagcttcatcctgagcagcgacgacgacgacgacgacatctag

SEQ ID NO: 13188 - DNA, 432 bp, synthetic construct
  misc_feature 1..432: note = Description of Artificial Sequence: Synthetic coding sequence
  source 1..432: mol_type = other DNA
atgaccaagatgtacaagggcttccaggccctgggcgacgccgccgacatcagattcgtgtacacccccgccatggagagcgtgtgcggctacttccacagaagccacaacagaagcgaggagttcctgatcgccggcaagctgcaggacggcctgctgcacatcaccacctgcagcttcgtggccccctggaacagcctgagcctggcccagagaagaggcttcaccaagacctacaccgtgggctgcgaggagtgcaccgtgttcccctgcctgagcatcccctgcaagctgcagagcggcacccactgcctgtggaccgaccagctgctgcagggcagcgagaagggcttccagagcagacacctggcctgcctgcccagagagcccggcctgtgcacctggcagagcctgagaagccagatcgcctag

SEQ ID NO: 13189 - DNA, 786 bp, synthetic construct
  misc_feature 1..786: note = Description of Artificial Sequence: Synthetic coding sequence
  source 1..786: mol_type = other DNA
atgcccctgaccagcggcagcagcaccccccccccctggagagtgagcgccgacaccagcaccggccccaccaccgccgccagaagcttcagcctgctggtgagacacagacccagagccctgtgccacaccaaccagagcctgggcagaggcctggccaccaccagaggcagaggcagcgacggcaacggccccaccggcaacggcgaccaccccaacttcagcctgagcgagggcagagccttcggcagcctggccgcccagcccatcaccagctgcctgagcgtgcccgccccccccttcagcctgggcaagctgcaggacggcctgctgcacatcaccacctgcagcttcgtggccccctggaacagcctgagcctggcccagagaagaggcttcaccaagacctacaccgtgggctgcgaggagtgcaccgtgagcgcctggaccctgaccagcaacggcagaagcttccccggccccttccccaagagctgggcctgcttcctgctgcccctggccatcctgtgcccctgcggctgcagccccaccctgagagccgtgcccgacctgagctgctacttccccaagcccgagaccgcccccctgcagatcctggccgcccccttcccctgcgtgcagtacagagtgatcacctgccccagcctggtgcccctgatcctgccctgcgactacagcgtgatccccctgcccgtgcccgagccccccggcctgttcctgggcagccccgagtgcagccccagaacccagagcgccgtgccctag

SEQ ID NO: 13190 - DNA, 291 bp, synthetic construct
  misc_feature 1..291: note = Description of Artificial Sequence: Synthetic coding sequence
  source 1..291: mol_type = other DNA
atgcccgtgtacagcgcctggcccgccgagcccaccatggcccccttcgagcccctggccagcggcatcctgctgctgctgtggctgatcgcccccagcagagcctgcacctgcgtgcccccccacccccagaccgccttctgcaacagcgacctggtgatcagagccaagttcgtgggcacccccgaggtgaaccagaccaccctgtaccagagatacgagatcaagatgaccaagatgtacaagggcttccaggccctgggcgacgccgccgacatcagattcgtgtag

SEQ ID NO: 13191 - DNA, 498 bp, synthetic construct
  misc_feature 1..498: note = Description of Artificial Sequence: Synthetic coding sequence
  source 1..498: mol_type = other DNA
tgacccagagccctgtgccacaccaaccagagcctgggcagaggcctggccaccaccagaggcagaggcagcgacggcaacggccccaccggcaacggcgaccaccccaacttcagcctgagcgagggcagagccttcggcagcctggccgcccagcccatcaccagctgcctgagcgtgcccgccccccccttcagcctgggcaagctgcaggacggcctgctgcacatcaccacctgcagcttcgtggccccctggaacagcctgagcctggcccagagaagaggcttcaccaagacctacaccgtgggctgcgaggagtgcaccgtgttcccctgcctgagcatcccctgcaagctgcagagcggcacccactgcctgtggaccgaccagctgctgcagggcagcgagaagggcttccagagcagacacctggcctgcctgcccagagagcccggcctgtgcacctggcagagcctgagaagccagatcgcctag

SEQ ID NO: 13192 - DNA, 411 bp, synthetic construct
  misc_feature 1..411: note = Description of Artificial Sequence: Synthetic coding sequence
  source 1..411: mol_type = other DNA
atggcccccttcgagcccctggccagcggcatcctgctgctgctgtggctgatcgcccccagcagagcctgcacctgcgtgcccccccacccccagaccgccttctgcaacagcgacctggtgatcagagccaagttcgtgggcacccccgaggtgaaccagaccaccctgtaccagagatacgagatcaagatgaccaagatgtacaagggcttccaggccctgggcgacgccgccgacatcagattcgtgtacacccccgccatggagagcgtgtgcggctacttccacagaagccacaacagaagcgaggagttcctgatcgccggcgaggcccccagccccagacccgtgccccaccagcccgtgcccggcgccagacccagcaaccacgagggcgccagactgtag

SEQ ID NO: 13193 - DNA, 663 bp, synthetic construct
  misc_feature 1..663: note = Description of Artificial Sequence: Synthetic coding sequence
  source 1..663: mol_type = other DNA
atgggcgccgccgccagaaccctgagactggccctgggcctgctgctgctggccaccctgctgagacccgccgacgcctgcagctgcagccccgtgcacccccagcaggccttctgcaacgccgacgtggtgatcagagccaaggccgtgagcgagaaggaggtggacagcggcaacgacatctacggcaaccccatcaagagaatccagtacgagatcaagcagatcaagatgttcaagggccccgagaaggacatcgagttcatctacaccgcccccagcagcgccgtgtgcggcgtgagcctggacgtgggcggcaagaaggagtacctgatcgccggcaaggccgagggcgacggcaagatgcacatcaccctgtgcgacttcatcgtgccctgggacaccctgagcaccacccagaagaagagcctgaaccacagataccagatgggctgcgagtgcaagatcaccagatgccccatgatcccctgctacatcagcagccccgacgagtgcctgtggatggactgggtgaccgagaagaacatcaacggccaccaggccaagttcttcgcctgcatcaagagaagcgacggcagctgcgcctggtacagaggcgccgccccccccaagcaggagttcctggacatcgaggacccctag

SEQ ID NO: 13194 - DNA, 432 bp, synthetic construct
  misc_feature 1..432: note = Description of Artificial Sequence: Synthetic coding sequence
  source 1..432: mol_type = other DNA
atgttcaagggccccgagaaggacatcgagttcatctacaccgcccccagcagcgccgtgtgcggcgtgagcctggacgtgggcggcaagaaggagtacctgatcgccggcaaggccgagggcgacggcaagatgcacatcaccctgtgcgacttcatcgtgccctgggacaccctgagcaccacccagaagaagagcctgaaccacagataccagatgggctgcgagtgcaagatcaccagatgccccatgatcccctgctacatcagcagccccgacgagtgcctgtggatggactgggtgaccgagaagaacatcaacggccaccaggccaagttcttcgcctgcatcaagagaagcgacggcagctgcgcctggtacagaggcgccgccccccccaagcaggagttcctggacatcgaggacccctag

SEQ ID NO: 13195 - DNA, 636 bp, synthetic construct
  misc_feature 1..636: note = Description of Artificial Sequence: Synthetic coding sequence
  source 1..636: mol_type = other DNA
atgaccccctggctgggcctgatcgtgctgctgggcagctggagcctgggcgactggggcgccgaggcctgcacctgcagccccagccacccccaggacgccttctgcaacagcgacatcgtgatcagagccaaggtggtgggcaagaagctggtgaaggagggccccttcggcaccctggtgtacaccatcaagcagatgaagatgtacagaggcttcaccaagatgccccacgtgcagtacatccacaccgaggccagcgagagcctgtgcggcctgaagctggaggtgaacaagtaccagtacctgctgaccggcagagtgtacgacggcaagatgtacaccggcctgtgcaacttcgtggagagatgggaccagctgaccctgagccagagaaagggcctgaactacagataccacctgggctgcaactgcaagatcaagagctgctactacctgccctgcttcgtgaccagcaagaacgagtgcctgtggaccgacatgctgagcaacttcggctaccccggctaccagagcaagcactacgcctgcatcagacagaagggcggctactgcagctggtacagaggctgggccccccccgacaagagcatcatcaacgccaccgacccctag

SEQ ID NO: 13196 - DNA, 438 bp, synthetic construct
  misc_feature 1..438: note = Description of Artificial Sequence: Synthetic coding sequence
  source 1..438: mol_type = other DNA
atgaagatgtacagaggcttcaccaagatgccccacgtgcagtacatccacaccgaggccagcgagagcctgtgcggcctgaagctggaggtgaacaagtaccagtacctgctgaccggcagagtgtacgacggcaagatgtacaccggcctgtgcaacttcgtggagagatgggaccagctgaccctgagccagagaaagggcctgaactacagataccacctgggctgcaactgcaagatcaagagctgctactacctgccctgcttcgtgaccagcaagaacgagtgcctgtggaccgacatgctgagcaacttcggctaccccggctaccagagcaagcactacgcctgcatcagacagaagggcggctactgcagctggtacagaggctgggccccccccgacaagagcatcatcaacgccaccgacccctag

SEQ ID NO: 13197 - DNA, 675 bp, synthetic construct
  misc_feature 1..675: note = Description of Artificial Sequence: Synthetic coding sequence
  source 1..675: mol_type = other DNA
atgcccggcagccccagacccgcccccagctgggtgctgctgctgagactgctggccctgctgagaccccccggcctgggcgaggcctgcagctgcgcccccgcccacccccagcagcacatctgccacagcgccctggtgatcagagccaagatcagcagcgagaaggtggtgcccgccagcgccgaccccgccgacaccgagaagatgctgagatacgagatcaagcagatcaagatgttcaagggcttcgagaaggtgaaggacgtgcagtacatctacacccccttcgacagcagcctgtgcggcgtgaagctggaggccaacagccagaagcagtacctgctgaccggccaggtgctgagcgacggcaaggtgttcatccacctgtgcaactacatcgagccctgggaggacctgagcctggtgcagagagagagcctgaaccaccactaccacctgaactgcggctgccagatcaccacctgctacaccgtgccctgcaccatcagcgcccccaacgagtgcctgtggaccgactggctgctggagagaaagctgtacggctaccaggcccagcactacgtgtgcatgaagcacgtggacggcacctgcagctggtacagaggccacctgcccctgagaaaggagttcgtggacatcgtgcagccctag

SEQ ID NO: 13198 - DNA, 1164 bp, synthetic construct
  misc_feature 1..1164: note = Description of Artificial Sequence: Synthetic coding sequence
  source 1..1164: mol_type = other DNA
atggtgcactgcagctgcgtgctgttcagaaagtacggcaacttcatcgacaagctgagactgttcaccagaggcggcagcggcggcatgggctaccccagactgggcggcgagggcggcaagggcggcgacgtgtgggtggtggcccagaacagaatgaccctgaagcagctgaaggacagataccccagaaagagattcgtggccggcgtgggcgccaacagcaagatcagcgccctgaagggcagcaagggcaaggactgcgagatccccgtgcccgtgggcatcagcgtgaccgacgagaacggcaagatcatcggcgagctgaacaaggagaacgacagaatcctggtggcccagggcggcctgggcggcaagctgctgaccaacttcctgcccctgaagggccagaagagaatcatccacctggacctgaagctgatcgccgacgtgggcctggtgggcttccccaacgccggcaagagcagcctgctgagctgcgtgagccacgccaagcccgccatcgccgactacgccttcaccaccctgaagcccgagctgggcaagatcatgtacagcgacttcaagcagatcagcgtggccgacctgcccggcctgatcgagggcgcccacatgaacaagggcatgggccacaagttcctgaagcacatcgagagaaccagacagctgctgttcgtggtggacatcagcggcttccagctgagcagccacacccagtacagaaccgccttcgagaccatcatcctgctgaccaaggagctggagctgtacaaggaggagctgcagaccaagcccgccctgctggccgtgaacaagatggacctgcccgacgcccaggacaagttccacgagctgatgagccagctgcagaaccccaaggacttcctgcacctgttcgagaagaacatgatccccgagagaaccgtggagttccagcacatcatccccatcagcgccgtgaccggcgagggcatcgaggagctgaagaactgcatcagaaagagcctggacgagcaggccaaccaggagaacgacgccctgcacaagaagcagctgctgaacctgtggatcagcgacaccatgagcagcaccgagccccccagcaagcacgccgtgaccaccagcaagatggacatcatctag

SEQ ID NO: 13199 - DNA, 375 bp, synthetic construct
  misc_feature 1..375: note = Description of Artificial Sequence: Synthetic coding sequence
  source 1..375: mol_type = other DNA
atggaccccgccagacccctgggcctgagcatcctgctgctgttcctgaccgaggccgccctgggcgacgccgcccaggagcccaccggcaacaacgccgagatctgcctgctgcccctggactacggcccctgcagagccctgctgctgagatactactacgacagatacacccagagctgcagacagttcctgtacggcggctgcgagggcaacgccaacaacttctacacctgggaggcctgcgacgacgcctgctggagaatcgagaaggtgcccaagctgagcagcatgaccagcctgaagaagaagaagaagatgcccaagctgagattcgccagcagaatcagaaagatcagaaagaagcagttctag

SEQ ID NO: 13200 - DNA, 1506 bp, synthetic construct
  misc_feature 1..1506: note = Description of Artificial Sequence: Synthetic coding sequence
  source 1..1506: mol_type = other DNA
atggccgccgccagcgtgaccccccccggcagcctggagctgctgcagcccggcttcagcaagaccctgctgggcaccaagctggaggccaagtacctgtgcagcgcctgcagaaacgtgctgagaagacccttccaggcccagtgcggccacagatactgcagcttctgcctggccagcatcctgagcagcggcccccagaactgcgccgcctgcgtgcacgagggcatctacgaggagggcatcagcatcctggagagcagcagcgccttccccgacaacgccgccagaagagaggtggagagcctgcccgccgtgtgccccagcgacggctgcacctggaagggcaccctgaaggagtacgagagctgccacgagggcagatgccccctgatgctgaccgagtgccccgcctgcaagggcctggtgagactgggcgagaaggagagacacctggagcacgagtgccccgagagaagcctgagctgcagacactgcagagccccctgctgcggcgccgacgtgaaggcccaccacgaggtgtgccccaagttccccctgacctgcgacggctgcggcaagaagaagatccccagagagaagttccaggaccacgtgaagacctgcggcaagtgcagagtgccctgcagattccacgccatcggctgcctggagaccgtggagggcgagaagcagcaggagcacgaggtgcagtggctgagagagcacctggccatgctgctgagcagcgtgctggaggccaagcccctgctgggcgaccagagccacgccggcagcgagctgctgcagagatgcgagagcctggagaagaagaccgccaccttcgagaacatcgtgtgcgtgctgaacagagaggtggagagagtggccatgaccgccgaggcctgcagcagacagcacagactggaccaggacaagatcgaggccctgagcagcaaggtgcagcagctggagagaagcatcggcctgaaggacctggccatggccgacctggagcagaaggtgctggagatggaggccagcacctacgacggcgtgttcatctggaagatcagcgacttcgccagaaagagacaggaggccgtggccggcagaatccccgccatcttcagccccgccttctacaccagcagatacggctacaagatgtgcctgagaatctacctgaacggcgacggcaccggcagaggcacccacctgagcctgttcttcgtggtgatgaagggccccaacgacgccctgctgagatggcccttcaaccagaaggtgaccctgatgctgctggaccagaacaacagagagcacgtgatcgacgccttcagacccgacgtgaccagcagcagcttccagagacccgtgaacgacatgaacatcgccagcggctgccccctgttctgccccgtgagcaagatggaggccaagaacagctacgtgagagacgacgccatcttcatcaaggccatcgtggacctgaccggcctgtag

SEQ ID NO: 13201 - DNA, 1662 bp, synthetic construct
  misc_feature 1..1662: note = Description of Artificial Sequence: Synthetic coding sequence
  source 1..1662: mol_type = other DNA
atggccgccgccagcgtgaccccccccggcagcctggagctgctgcagcccggcttcagcaagaccctgctgggcaccaagctggaggccaagtacctgtgcagcgcctgcagaaacgtgctgagaagacccttccaggcccagtgcggccacagatactgcagcttctgcctggccagcatcctgagcagcggcccccagaactgcgccgcctgcgtgcacgagggcatctacgaggagggcatcagcatcctggagagcagcagcgccttccccgacaacgccgccagaagagaggtggagagcctgcccgccgtgtgccccagcgacggctgcacctggaagggcaccctgaaggagtacgaggtgaagatgcccgcctgcggcatggtgaccgaggcccccgccgtgggcagcagacccagaagccccagcagctacgacctggtgctgcacgtgcccctgaccggcgccgaggcctgcctgatgagcgtggaggaggagaccgagctgctgctgagaagctgccacgagggcagatgccccctgatgctgaccgagtgccccgcctgcaagggcctggtgagactgggcgagaaggagagacacctggagcacgagtgccccgagagaagcctgagctgcagacactgcagagccccctgctgcggcgccgacgtgaaggcccaccacgaggtgtgccccaagttccccctgacctgcgacggctgcggcaagaagaagatccccagagagaagttccaggaccacgtgaagacctgcggcaagtgcagagtgccctgcagattccacgccatcggctgcctggagaccgtggagggcgagaagcagcaggagcacgaggtgcagtggctgagagagcacctggccatgctgctgagcagcgtgctggaggccaagcccctgctgggcgaccagagccacgccggcagcgagctgctgcagagatgcgagagcctggagaagaagaccgccaccttcgagaacatcgtgtgcgtgctgaacagagaggtggagagagtggccatgaccgccgaggcctgcagcagacagcacagactggaccaggacaagatcgaggccctgagcagcaaggtgcagcagctggagagaagcatcggcctgaaggacctggccatggccgacctggagcagaaggtgctggagatggaggccagcacctacgacggcgtgttcatctggaagatcagcgacttcgccagaaagagacaggaggccgtggccggcagaatccccgccatcttcagccccgccttctacaccagcagatacggctacaagatgtgcctgagaatctacctgaacggcgacggcaccggcagaggcacccacctgagcctgttcttcgtggtgatgaagggccccaacgacgccctgctgagatggcccttcaaccagaaggtgaccctgatgctgctggaccagaacaacagagagcacgtgatcgacgccttcagacccgacgtgaccagcagcagcttccagagacccgtgaacgacatgaacatcgccagcggctgccccctgttctgccccgtgagcaagatggaggccaagaacagctacgtgagagacgacgccatcttcatcaaggccatcgtggacctgaccggcctgtag

SEQ ID NO: 13202 - DNA, 1269 bp, synthetic construct
  misc_feature 1..1269: note = Description of Artificial Sequence: Synthetic coding sequence
  source 1..1269: mol_type = other DNA
atggccgccgccagcgtgaccccccccggcagcctggagctgctgcagcccggcttcagcaagaccctgctgggcaccaagctggaggccaagtacctgtgcagcgcctgcagaaacgtgctgagaagacccttccaggcccagtgcggccacagatactgcagcttctgcctggccagcatcctgagcagcggcccccagaactgcgccgcctgcgtgcacgagggcatctacgaggagggcatcagcatcctggagagcagcagcgccttccccgacaacgccgccagaagagaggtggagagcctgcccgccgtgtgccccagcgacggctgcacctggaagggcaccctgaaggagtacgaggtgaagatgcccgcctgcggcatggtgaccgaggcccccgccgtgggcagcagacccagaagccccagcagctacgacctggtgctgcacgtgcccctgaccggcgccgaggcctgcctgatgagcgtggaggaggagaccgagctgctgctgagaagctgccacgagggcagatgccccctgatgctgaccgagtgccccgcctgcaagggcctggtgagactgggcgagaaggagagacacctggagcacgagtgccccgagagaagcctgagctgcagacactgcagagccccctgctgcggcgccgacgtgaagagactggaccaggacaagatcgaggccctgagcagcaaggtgcagcagctggagagaagcatcggcctgaaggacctggccatggccgacctggagcagaaggtgctggagatggaggccagcacctacgacggcgtgttcatctggaagatcagcgacttcgccagaaagagacaggaggccgtggccggcagaatccccgccatcttcagccccgccttctacaccagcagatacggctacaagatgtgcctgagaatctacctgaacggcgacggcaccggcagaggcacccacctgagcctgttcttcgtggtgatgaagggccccaacgacgccctgctgagatggcccttcaaccagaaggtgaccctgatgctgctggaccagaacaacagagagcacgtgatcgacgccttcagacccgacgtgaccagcagcagcttccagagacccgtgaacgacatgaacatcgccagcggctgccccctgttctgccccgtgagcaagatggaggccaagaacagctacgtgagagacgacgccatcttcatcaaggccatcgtggacctgaccggcctgtag

SEQ ID NO: 13203 - DNA, 366 bp, synthetic construct
  misc_feature 1..366: note = Description of Artificial Sequence: Synthetic coding sequence
  source 1..366: mol_type = other DNA
atggccgccgccagcgtgaccccccccggcagcctggagctgctgcagcccggcttcagcaagaccctgctgggcaccaagctggaggccaagtacctgtgcagcgcctgcagaaacgtgctgagaagacccttccaggcccagtgcggccacagatactgcagcttctgcctggccagcatcctgagcagcggcccccagaactgcgccgcctgcgtgcacgagggcatctacgaggagggcatcagcatcctggagagcagcagcgccttccccgacaacgccgccagaagagaggtggagagcctgcccgccgtgtgccccagcgacggctgcacctggaagggcaccctgaaggagtactag

SEQ ID NO: 13204 - DNA, 519 bp, synthetic construct
  misc_feature 1..519: note = Description of Artificial Sequence: Synthetic coding sequence
  source 1..519: mol_type = other DNA
atggccgccgccagcgtgaccccccccggcagcctggagctgctgcagcccggcttcagcaagaccctgctgggcaccaagctggaggccaagtacctgtgcagcgcctgcagaaacgtgctgagaagacccttccaggcccagtgcggccacagatactgcagcttctgcctggccagcatcctgagcagcggcccccagaactgcgccgcctgcgtgcacgagggcatctacgaggagggcatcagcatcctggagagcagcagcgccttccccgacaacgccgccagaagagaggtggagagcctgcccgccgtgtgccccagcgacggctgcacctggaagggcaccctgaaggagtacgagagctgccacgagggcagatgccccctgatgctgaccgagtgccccgcctgcaagggcctggtgagactgggcgagaaggagagacacctggagcacgagtgccccgagagaagcctgagctgcagacactgcagagccccctgctgcggctag

SEQ ID NO: 13205 - DNA, 582 bp, synthetic construct
  misc_feature 1..582: note = Description of Artificial Sequence: Synthetic coding sequence
  source 1..582: mol_type = other DNA
atggccgccgccagcgtgaccccccccggcagcctggagctgctgcagcccggcttcagcaagaccctgctgggcaccaagctggaggccaagtacctgtgcagcgcctgcagaaacgtgctgagaagacccttccaggcccagtgcggccacagatactgcagcttctgcctggccagcatcctgagcagcggcccccagaactgcgccgcctgcgtgcacgagggcatctacgaggagggcatcagcatcctggagagcagcagcgccttccccgacaacgccgccagaagagaggtggagagcctgcccgccgtgtgccccagcgacggctgcacctggaagggcaccctgaaggagtacgagagctgccacgagggcagatgccccctgatgctgaccgagtgccccgcctgcaagggcctggtgagactgggcgagaaggagagacacctggagcacgagtgccccgagagaagcctgagctgcagacactgcagagccccctgctgcggcgccgacgtgaaggcccaccacgaggtgtgccccaagttccccctgacctgcgacggctgcggctag

SEQ ID NO: 13206 - DNA, 1503 bp, synthetic construct
  misc_feature 1..1503: note = Description of Artificial Sequence: Synthetic coding sequence
  source 1..1503: mol_type = other DNA
gtggccggcagagccctgagcagcggcagagccgccaccgtgggcgccctgttcgccggcgtgaccgccctgatggccgccgccagcgtgaccccccccggcagcctggagctgctgcagcccggcttcagcaagaccctgctgggcaccaagctggaggccaagtacctgtgcagcgcctgcagaaacgtgctgagaagacccttccaggcccagtgcggccacagatactgcagcttctgcctggccagcatcctgagcagcggcccccagaactgcgccgcctgcgtgcacgagggcatctacgaggagggcatcagcatcctggagagcagcagcgccttccccgacaacgccgccagaagagaggtggagagcctgcccgccgtgtgccccagcgacggctgcacctggaagggcaccctgaaggagtacgagagctgccacgagggcagatgccccctgatgctgaccgagtgccccgcctgcaagggcctggtgagactgggcgagaaggagagacacctggagcacgagtgccccgagagaagcctgagctgcagacactgcagagccccctgctgcggcgccgacgtgaagttccaggaccacgtgaagacctgcggcaagtgcagagtgccctgcagattccacgccatcggctgcctggagaccgtggagggcgagaagcagcaggagcacgaggtgcagtggctgagagagcacctggccatgctgctgagcagcgtgctggaggccaagcccctgctgggcgaccagagccacgccggcagcgagctgctgcagagatgcgagagcctggagaagaagaccgccaccttcgagaacatcgtgtgcgtgctgaacagagaggtggagagagtggccatgaccgccgaggcctgcagcagacagcacagactggaccaggacaagatcgaggccctgagcagcaaggtgcagcagctggagagaagcatcggcctgaaggacctggccatggccgacctggagcagaaggtgctggagatggaggccagcacctacgacggcgtgttcatctggaagatcagcgacttcgccagaaagagacaggaggccgtggccggcagaatccccgccatcttcagccccgccttctacaccagcagatacggctacaagatgtgcctgagaatctacctgaacggcgacggcaccggcagaggcacccacctgagcctgttcttcgtggtgatgaagggccccaacgacgccctgctgagatggcccttcaaccagaaggtgaccctgatgctgctggaccagaacaacagagagcacgtgatcgacgccttcagacccgacgtgaccagcagcagcttccagagacccgtgaacgacatgaacatcgccagcggctgccccctgttctgccccgtgagcaagatggaggccaagaacagctacgtgagagacgacgccatcttcatcaaggccatcgtggacctgaccggcctgtag

SEQ ID NO: 13207 - DNA, 1506 bp, synthetic construct; identical to SEQ ID NO: 13200
  misc_feature 1..1506: note = Description of Artificial Sequence: Synthetic coding sequence
  source 1..1506: mol_type = other DNA

SEQ ID NO: 13208 - DNA, 1632 bp, synthetic construct
  misc_feature 1..1632: note = Description of Artificial Sequence: Synthetic coding sequence
  source 1..1632: mol_type = other DNA
atggagagcagcaagaagatggacagccccggcgccctgcagaccaacccccccctgaagctgcacaccgacagaagcgccggcacccccgtgttcgtgcccgagcagggcggctacaaggagaagttcgtgaagaccgtggaggacaagtacaagtgcgagaagtgccacctggtgctgtgcagccccaagcagaccgagtgcggccacagattctgcgagagctgcatggccgccctgctgagcagcagcagccccaagtgcaccgcctgccaggagagcatcgtgaaggacaaggtgttcaaggacaactgctgcaagagagagatcctggccctgcagatctactgcagaaacgagagcagaggctgcgccgagcagctgatgctgggccacctgctggtgcacctgaagaacgactgccacttcgaggagctgccctgcgtgagacccgactgcaaggagaaggtgctgagaaaggacctgagagaccacgtggagaaggcctgcaagtacagagaggccacctgcagccactgcaagagccaggtgcccatgatcgccctgcagaagcacgaggacaccgactgcccctgcgtggtggtgagctgcccccacaagtgcagcgtgcagaccctgctgagaagcgagggcaccaaccagcagatcaaggcccacgaggccagcagcgccgtgcagcacgtgaacctgctgaaggagtggagcaacagcctggagaagaaggtgagcctgctgcagaacgagagcgtggagaagaacaagagcatccagagcctgcacaaccagatctgcagcttcgagatcgagatcgagagacagaaggagatgctgagaaacaacgagagcaagatcctgcacctgcagagagtgatcgacagccaggccgagaagctgaaggagctggacaaggagatcagacccttcagacagaactgggaggaggccgacagcatgaagagcagcgtggagagcctgcagaacagagtgaccgagctggagagcgtggacaagagcgccggccaggtggccagaaacaccggcctgctggagagccagctgagcagacacgaccagatgctgagcgtgcacgacatcagactggccgacatggacctgagattccaggtgctggagaccgccagctacaacggcgtgctgatctggaagatcagagactacaagagaagaaagcaggaggccgtgatgggcaagaccctgagcctgtacagccagcccttctacaccggctacttcggctacaagatgtgcgccagagtgtacctgaacggcgacggcatgggcaagggcacccacctgagcctgttcttcgtgatcatgagaggcgagtacgacgccctgctgccctggcccttcaagcagaaggtgaccctgatgctgatggaccagggcagcagcagaagacacctgggcgacgccttcaagcccgaccccaacagcagcagcttcaagaagcccaccggcgagatgaacatcgccagcggctgccccgtgttcgtggcccagaccgtgctggagaacggcacctacatcaaggacgacaccatcttcatcaaggtgatcgtggacaccagcgacctgcccgacccctag

SEQ ID NO: 13209 - DNA, 1632 bp, synthetic construct; identical to SEQ ID NO: 13208
  misc_feature 1..1632: note = Description of Artificial Sequence: Synthetic coding sequence
  source 1..1632: mol_type = other DNA

SEQ ID NO: 13210 - DNA, 1707 bp, synthetic construct
  misc_feature 1..1707: note = Description of Artificial Sequence: Synthetic coding sequence
  source 1..1707: mol_type = other DNA
atggagagcagcaagaagatggacagccccggcgccctgcagaccaacccccccctgaagctgcacaccgacagaagcgccggcacccccgtgttcgtgcccgagcagggcggctacaaggagaagttcgtgaagaccgtggaggacaagtacaagtgcgagaagtgccacctggtgctgtgcagccccaagcagaccgagtgcggccacagattctgcgagagctgcatggccgccctgctgagcagcagcagccccaagtgcaccgcctgccaggagagcatcgtgaaggacaaggtgttcaaggacaactgctgcaagagagagatcctggccctgcagatctactgcagaaacgagagcagaggctgcgccgagcagctgatgctgggccacctgctggtgcacctgaagaacgactgccacttcgaggagctgccctgcgtgagacccgactgcaaggagaaggtgctgagaaaggacctgagagaccacgtggagaaggcctgcaagtacagagaggccacctgcagccactgcaagagccaggtgcccatgatcgccctgcagaagcacgaggacaccgactgcccctgcgtggtggtgagctgcccccacaagtgcagcgtgcagaccctgctgagaagcgagctgagcgcccacctgagcgagtgcgtgaacgcccccagcacctgcagcttcaagagatacggctgcgtgttccagggcaccaaccagcagatcaaggcccacgaggccagcagcgccgtgcagcacgtgaacctgctgaaggagtggagcaacagcctggagaagaaggtgagcctgctgcagaacgagagcgtggagaagaacaagagcatccagagcctgcacaaccagatctgcagcttcgagatcgagatcgagagacagaaggagatgctgagaaacaacgagagcaagatcctgcacctgcagagagtgatcgacagccaggccgagaagctgaaggagctggacaaggagatcagacccttcagacagaactgggaggaggccgacagcatgaagagcagcgtggagagcctgcagaacagagtgaccgagctggagagcgtggacaagagcgccggccaggtggccagaaacaccggcctgctggagagccagctgagcagacacgaccagatgctgagcgtgcacgacatcagactggccgacatggacctgagattccaggtgctggagaccgccagctacaacggcgtgctgatctggaagatcagagactacaagagaagaaagcaggaggccgtgatgggcaagaccctgagcctgtacagccagcccttctacaccggctacttcggctacaagatgtgcgccagagtgtacctgaacggcgacggcatgggcaagggcacccacctgagcctgttcttcgtgatcatgagaggcgagtacgacgccctgctgccctggcccttcaagcagaaggtgaccctgatgctgatggaccagggcagcagcagaagacacctgggcgacgccttcaagcccgaccccaacagcagcagcttcaagaagcccaccggcgagatgaacatcgccagcggctgccccgtgttcgtggcccagaccgtgctggagaacggcacctacatcaaggacgacaccatcttcatcaaggtgatcgtggacaccagcgacctgcccgacccctag

SEQ ID NO: 13211 - DNA, 1458 bp, synthetic construct
  misc_feature 1..1458: note = Description of Artificial Sequence: Synthetic coding sequence
  source 1..1458: mol_type = other DNA
atggagagcagcaagaagatggacagccccggcgccctgcagaccaacccccccctgaagctgcacaccgacagaagcgccggcacccccgtgttcgtgcccgagcagggcggctacaaggagaagttcgtgaagaccgtggaggacaagtacaagtgcgagaagtgccacctggtgctgtgcagccccaagcagaccgagtgcggccacagattctgcgagagctgcatggccgccctgctgagcagcagcagccccaagtgcaccgcctgccaggagagcatcgtgaaggacaaggtgttcaaggacaactgctgcaagagagagatcctggccctgcagatctactgcagaaacgagagcagaggctgcgccgagcagctgatgctgggccacctgctggtgcacctgaagaacgactgccacttcgaggagctgccctgcgtgagacccgactgcaaggagaaggtgctgagaaaggacctgagagaccacgtggagaaggcctgcaagtacagagaggccacctgcagccactgcaagagccaggtgcccatgatcgccctgcaggtgagcctgctgcagaacgagagcgtggagaagaacaagagcatccagagcctgcacaaccagatctgcagcttcgagatcgagatcgagagacagaaggagatgctgagaaacaacgagagcaagatcctgcacctgcagagagtgatcgacagccaggccgagaagctgaaggagctggacaaggagatcagacccttcagacagaactgggaggaggccgacagcatgaagagcagcgtggagagcctgcagaacagagtgaccgagctggagagcgtggacaagagcgccggccaggtggccagaaacaccggcctgctggagagccagctgagcagacacgaccagatgctgagcgtgcacgacatcagactggccgacatggacctgagattccaggtgctggagaccgccagctacaacggcgtgctgatctggaagatcagagactacaagagaagaaagcaggaggccgtgatgggcaagaccctgagcctgtacagccagcccttctacaccggctacttcggctacaagatgtgcgccagagtgtacctgaacggcgacggcatgggcaagggcacccacctgagcctgttcttcgtgatcatgagaggcgagtacgacgccctgctgccctggcccttcaagcagaaggtgaccctgatgctgatggaccagggcagcagcagaagacacctgggcgacgccttcaagcccgaccccaacagcagcagcttcaagaagcccaccggcgagatgaacatcgccagcggctgccccgtgttcgtggcccagaccgtgctggagaacggcacctacatcaaggacgacaccatcttcatcaaggtgatcgtggacaccagcgacctgcccgacccctag

SEQ ID NO: 13212 - DNA, 1707 bp, synthetic construct; identical to SEQ ID NO: 13210
  misc_feature 1..1707: note = Description of Artificial Sequence: Synthetic coding sequence
  source 1..1707: mol_type = other DNA

SEQ ID NO: 13213 - DNA, 285 bp, synthetic construct
  misc_feature 1..285: note = Description of Artificial Sequence: Synthetic coding sequence
  source 1..285: mol_type = other DNA
atggagagcagcaagaagatggacagccccggcgccctgcagaccaacccccccctgaagctgcacaccgacagaagcgccggcacccccgtgttcgtgcccgagcagggcggctacaaggagaagttcgtgaagaccgtggaggacaagtacaagtgcgagaagtgccacctggtgctgtgcagccccaagcagaccgagtgcggccacagattctgcgagagctgcatggccgccctgctgagcagcagcagccccaagtgcaccgcctgccaggagagctag

SEQ ID NO: 13214 - DNA, 939 bp, synthetic construct
  misc_feature 1..939: note = Description of Artificial Sequence: Synthetic coding sequence
  source 1..939: mol_type = other DNA
atggccgccggccagaacggccacgaggagtgggtgggcagcgcctacctgttcgtggagagcagcctggacaaggtggtgctgagcgacgcctacgcccacccccagcagaaggtggccgtgtacagagccctgcaggccgccctggccgagagcggcggcagccccgacgtgctgcagatgctgaagatccacagaagcgacccccagctgatcgtgcagctgagattctgcggcagacagccctgcggcagattcctgagagcctacagagagggcgccctgagagccgccctgcagagaagcctggccgccgccctggcccagcacagcgtgcccctgcagctggagctgagagccggcgccgagagactggacgccctgctggccgacgaggagagatgcctgagctgcatcctggcccagcagcccgacagactgagagacgaggagctggccgagctggaggacgccctgagaaacctgaagtgcggcagcggcgccagaggcggcgacggcgaggtggccagcgcccccctgcagccccccgtgcccagcctgagcgaggtgaagcccccccccccccccccccccgcccagaccttcctgttccagggccagcccgtggtgaacagacccctgagcctgaaggaccagcagaccttcgccagaagcgtgggcctgaagtggagaaaggtgggcagaagcctgcagagaggctgcagagccctgagagaccccgccctggacagcctggcctacgagtacgagagagagggcctgtacgagcaggccttccagctgctgagaagattcgtgcaggccgagggcagaagagccaccctgcagagactggtggaggccctggaggagaacgagctgaccagcctggccgaggacctgctgggcctgaccgaccccaacggcggcctggcctag

SEQ ID NO: 13215 - DNA, 825 bp, synthetic construct
  misc_feature 1..825: note = Description of Artificial Sequence: Synthetic coding sequence
  source 1..825: mol_type = other DNA
atggccaccaccgtgagcacccagagaggccccgtgtacatcggcgagctgccccaggacttcctgagaatcacccccacccagcagcagagacaggtgcagctggacgcccaggccgcccagcagctgcagtacggcggcgccgtgggcaccgtgggcagactgaacatcaccgtggtgcaggccaagctggccaagaactacggcatgaccagaatggacccctactgcagactgagactgggctacgccgtgtacgagacccccaccgcccacaacggcgccaagaaccccagatggaacaaggtgatccactgcaccgtgccccccggcgtggacagcttctacctggagatcttcgacgagagagccttcagcatggacgacagaatcgcctggacccacatcaccatccccgagagcctgagacagggcaaggtggaggacaagtggtacagcctgagcggcagacagggcgacgacaaggagggcatgatcaacctggtgatgagctacgccctgctgcccgccgccatggtgatgcccccccagcccgtggtgctgatgcccaccgtgtaccagcagggcgtgggctacgtgcccatcaccggcatgcccgccgtgtgcagccccggcatggtgcccgtggccctgccccccgccgccgtgaacgcccagcccagatgcagcgaggaggacctgaaggccatccaggacatgttccccaacatggaccaggaggtgatcagaagcgtgctggaggcccagagaggcaacaaggacgccgccatcaacagcctgctgcagatgggcgaggagccctag

SEQ ID NO: 13216 - DNA, 1059 bp, synthetic construct
  misc_feature 1..1059: note = Description of Artificial Sequence: Synthetic coding sequence
  source 1..1059: mol_type = other DNA
cagctgagccccagccaggcccccgccggcgcccaggaggtggccagaagagtgaccgtgggcagcgccagccacggcggcagaagaagcaccatggccaccaccgtgagcacccagagaggccccgtgtacatcggcgagctgccccaggacttcctgagaatcacccccacccagcagcagagacaggtgcagctggacgcccaggccgcccagcagctgcagtacggcggcgccgtgggcaccgtgggcagactgaacatcaccgtggtgcaggccaagctggccaagaactacggcatgaccagaatggacccctactgcagactgagactgggctacgccgtgtacgagacccccaccgcccacaacggcgccaagaaccccagatggaacaaggtgatccactgcaccgtgccccccggcgtggacagcttctacctggagatcttcgacgagagagccttcagcatggacgacagaatcgcctggacccacatcaccatccccgagagcctgagacagggcaaggtggaggacaagtggtacagcctgagcggcagacagggcgacgacaaggagggcatgatcaacctggtgatgagctacgccctgctgcccgccgccatggtgatgcccccccagcccgtggtgctgatgcccaccgtgtaccagcagggcgtgggctacgtgcccatcaccggcatgcccgccgtgtgcagccccggcatggtgcccgtggccctgccccccgccgccgtgaacgcccagcccagatgcagcgaggaggacctgaaggccatccaggacatgttccccaacatggaccaggaggtgatcagaagcgtgctggaggcccagagaggcaacaaggacgccgccatccccagccacctggtgctgggcggcctgagcgccctgagctgcccctgggacgtgagactgagcttcagctgcagaagcggcaagtgcagctgctgcagagagcagctgctgctgcccggctgctggagatggtggagcgccttcagattccacagctggcacttcgtgatgtag

SEQ ID NO: 13217 - DNA, 675 bp, synthetic construct
  misc_feature 1..675: note = Description of Artificial Sequence: Synthetic coding sequence
  source 1..675: mol_type = other DNA
atggccaccaccgtgagcacccagagaggccccgccaagctggccaagaactacggcatgaccagaatggacccctactgcagactgagactgggctacgccgtgtacgagacccccaccgcccacaacggcgccaagaaccccagatggaacaaggtgatccactgcaccgtgccccccggcgtggacagcttctacctggagatcttcgacgagagagccttcagcatggacgacagaatcgcctggacccacatcaccatccccgagagcctgagacagggcaaggtggaggacaagtggtacagcctgagcggcagacagggcgacgacaaggagggcatgatcaacctggtgatgagctacgccctgctgcccgccgccatggtgatgcccccccagcccgtggtgctgatgcccaccgtgtaccagcagggcgtgggctacgtgcccatcaccggcatgcccgccgtgtgcagccccggcatggtgcccgtggccctgccccccgccgccgtgaacgcccagcccagatgcagcgaggaggacctgaaggccatccaggacatgttccccaacatggaccaggaggtgatcagaagcgtgctggaggcccagagaggcaacaaggacgccgccatcaacagcctgctgcagatgggcgaggagccctag

SEQ ID NO: 13218 - DNA, 768 bp, synthetic construct
  misc_feature 1..768: note = Description of Artificial Sequence: Synthetic coding sequence
  source 1..768: mol_type = other DNA
atggccagcagcaccagcctgcccgcccccggcagcagacccaagaagcccctgggcaagatggccgactggttcagacagaccctgctgaagaagcccaagaagagacccaacagccccgagagcaccagcagcgacgccagccagcccaccagccaggacagccccctgccccccagcctgagcagcgtgaccagccccagcctgccccccacccacgccagcgacagcggcagcagcagatggagcaaggactacgacgtgtgcgtgtgccacagcgaggaggacctggtggccgcccaggacctggtgagctacctggagggcagcaccgccagcctgagatgcttcctgcagctgagagacgccacccccggcggcgccatcgtgagcgagctgtgccaggccctgagcagcagccactgcagagtgctgctgatcacccccggcttcctgcaggacccctggtgcaagtaccagatgctgcaggccctgaccgaggcccccggcgccgagggctgcaccatccccctgctgagcggcctgagcagagccgcctacccccccgagctgagattcatgtactacgtggacggcagaggccccgacggcggcttcagacaggtgaaggaggccgtgatgagaagcaaccaggtgctgaagcacctgctgtaccacggcacccccgagatcggcgtgaagctggagaccgagaacccctgcagagccagcgacagccacaagtgcgacaagagatacagagagtag

SEQ ID NO: 13219 - DNA, 708 bp, synthetic construct
  misc_feature 1..708: note = Description of Artificial Sequence: Synthetic coding sequence
  source 1..708: mol_type = other DNA
atggccagcagcaccagcctgcccgcccccggcagcagacccaagaagcccctgggcaagatggccgactggttcagacagaccctgctgaagaagcccaagaagagacccaacagccccgagagcaccagcagcgacgccagccagcccaccagccaggacagccccctgccccccagcctgagcagcgtgaccagccccagcctgccccccacccacgccagcgacagcggcagcagcagatggagcaaggactacgacgtgtgcgtgtgccacagcgaggaggacctggtggccgcccaggacctggtgagctacctggagggcagcaccgccagcctgagatgcttcctgcagctgagagacgccacccccggcggcgccatcgtgagcgagctgtgccaggccctgagcagcagccactgcagagtgctgctgatcacccccggcttcctgcaggacccctggtgcaagtaccagatgctgcaggccctgaccgaggcccccggcgccgagggctgcaccatccccctgctgagcggcctgagcagagccgcctacccccccgagctgagattcatgtactacgtggacggcagaggccccgacggcggcttcagacaggtgaaggaggccgtgatgagatgcaagctgctgcaggagggcgagggcgagagagacagcgccaccgtgagcgacctgctgtag

SEQ ID NO: 13220 - DNA, 666 bp, synthetic construct
  misc_feature 1..666: note = Description of Artificial Sequence: Synthetic coding sequence
  source 1..666: mol_type = other DNA
atggccagcagcaccagcctgcccgcccccggcagcagacccaagaagcccctgggcaagatggccgactggttcagacagaccctgctgaagaagcccaagaagagacccaacagccccgagagcaccagcagcgacgccagccagcccaccagccaggacagccccctgccccccagcctgagcagcgtgaccagccccagcctgccccccacccacgccagcgacagcggcagcagcagatggagcaaggactacgacgtgtgcgtgtgccacagcgaggaggacctggtggccgcccaggacctggtgagctacctggagggcagcaccgccagcctgagatgcttcctgcagctgagagacgccacccccggcggcgccatcgtgagcgagctgtgccaggccctgagcagcagccactgcagagtgctgctgatcacccccggcttcctgcaggacccctggtgcaagtaccagatgctgcaggccctgaccgaggcccccggcgccgagggctgcaccatccccctgctgagcggcctgagcagagccgcctacccccccgagctgagattcatgtactacgtggacggcagaggccccgacggcggcttcagacaggtgaaggaggccgtgatgagatacctgcagaccctgagctag

SEQ ID NO: 13221 - DNA, 666 bp, synthetic construct; identical to SEQ ID NO: 13220
  misc_feature 1..666: note = Description of Artificial Sequence: Synthetic coding sequence
  source 1..666: mol_type = other DNA

SEQ ID NO: 13222 - DNA, 666 bp, synthetic construct; identical to SEQ ID NO: 13220
  misc_feature 1..666: note = Description of Artificial Sequence: Synthetic coding sequence
  source 1..666: mol_type = other DNA

SEQ ID NO: 13223 - DNA, 2520 bp, synthetic construct
  misc_feature 1..2520: note = Description of Artificial Sequence: Synthetic coding sequence
  source 1..2520: mol_type = other DNA
atgatgagcgccagcagactggccggcaccctgatccccgccatggccttcctgagctgcgtgagacccgagagctgggagccctgcgtggaggtggtgcccaacatcacctaccagtgcatggagctgaacttctacaagatccccgacaacctgcccttcagcaccaagaacctggacctgagcttcaaccccctgagacacctgggcagctacagcttcttcagcttccccgagctgcaggtgctggacctgagcagatgcgagatccagaccatcgaggacggcgcctaccagagcctgagccacctgagcaccctgatcctgaccggcaaccccatccagagcctggccctgggcgccttcagcggcctgagcagcctgcagaagctggtggccgtggagaccaacctggccagcctggagaacttccccatcggccacctgaagaccctgaaggagctgaacgtggcccacaacctgatccagagcttcaagctgcccgagtacttcagcaacctgaccaacctggagcacctggacctgagcagcaacaagatccagagcatctactgcaccgacctgagagtgctgcaccagatgcccctgctgaacctgagcctggacctgagcctgaaccccatgaacttcatccagcccggcgccttcaaggagatcagactgcacaagctgaccctgagaaacaacttcgacagcctgaacgtgatgaagacctgcatccagggcctggccggcctggaggtgcacagactggtgctgggcgagttcagaaacgagggcaacctggagaagttcgacaagagcgccctggagggcctgtgcaacctgaccatcgaggagttcagactggcctacctggactactacctggacgacatcatcgacctgttcaactgcctgaccaacgtgagcagcttcagcctggtgagcgtgaccatcgagagagtgaaggacttcagctacaacttcggctggcagcacctggagctggtgaactgcaagttcggccagttccccaccctgaagctgaagagcctgaagagactgaccttcaccagcaacaagggcggcaacgccttcagcgaggtggacctgcccagcctggagttcctggacctgagcagaaacggcctgagcttcaagggctgctgcagccagagcgacttcggcaccaccagcctgaagtacctggacctgagcttcaacggcgtgatcaccatgagcagcaacttcctgggcctggagcagctggagcacctggacttccagcacagcaacctgaagcagatgagcgagttcagcgtgttcctgagcctgagaaacctgatctacctggacatcagccacacccacaccagagtggccttcaacggcatcttcaacggcctgagcagcctggaggtgctgaagatggccggcaacagcttccaggagaacttcctgcccgacatcttcaccgagctgagaaacctgaccttcctggacctgagccagtgccagctggagcagctgagccccaccgccttcaacagcctgagcagcctgcaggtgctgaacatgagccacaacaacttcttcagcctggacaccttcccctacaagtgcctgaacagcctgcaggtgctggactacagcctgaaccacatcatgaccagcaagaagcaggagctgcagcacttccccagcagcctggccttcctgaacctgacccagaacgacttcgcctgcacctgcgagcaccagagcttcctgcagtggatcaaggaccagagacagctgctggtggaggtggagagaatggagtgcgccacccccagcgacaagcagggcatgcccgtgctgagcctgaacatcacctgccagatgaacaagaccatcatcggcgtgagcgtgctgagcgtgctggtggtgagcgtggtggccgtgctggtgtacaagttctacttccacctgatgctgctggccggctgcatcaagtacggcagaggcgagaacatctacgacgccttcgtgatctacagcagccaggacgaggactgggtgagaaacgagctggtgaagaacctggaggagggcgtgccccccttccagctgtgcctgcactacagagacttcatccccggcgtggccatcgccgccaacatcatccacgagggcttccacaagagcagaaaggtgatcgtggtggtgagccagcacttcatccagagcagatggtgcatcttcgagtacgagatcgcccagacctggcagttcctgagcagcagagccggcatcatcttcatcgtgctgcagaaggtggagaagaccctgctgagacagcaggtggagctgtacagactgctgagcagaaacacctacctggagtgggaggacagcgtgctgggcagacacatcttctggagaagactgagaaaggccctgctggacggcaagagctggaaccccgagggcaccgtgggcaccggctgcaactggcaggaggccaccagcatctag

SEQ ID NO: 13224 - DNA, 2400 bp, synthetic construct
  misc_feature 1..2400: note = Description of Artificial Sequence: Synthetic coding sequence
  source 1..2400: mol_type = other DNA
atggagctgaacttctacaagatccccgacaacctgcccttcagcaccaagaacctggacctgagcttcaaccccctgagacacctgggcagctacagcttcttcagcttccccgagctgcaggtgctggacctgagcagatgcgagatccagaccatcgaggacggcgcctaccagagcctgagccacctgagcaccctgatcctgaccggcaaccccatccagagcctggccctgggcgccttcagcggcctgagcagcctgcagaagctggtggccgtggagaccaacctggccagcctggagaacttccccatcggccacctgaagaccctgaaggagctgaacgtggcccacaacctgatccagagcttcaagctgcccgagtacttcagcaacctgaccaacctggagcacctggacctgagcagcaacaagatccagagcatctactgcaccgacctgagagtgctgcaccagatgcccctgctgaacctgagcctggacctgagcctgaaccccatgaacttcatccagcccggcgccttcaaggagatcagactgcacaagctgaccctgagaaacaacttcgacagcctgaacgtgatgaagacctgcatccagggcctggccggcctggaggtgcacagactggtgctgggcgagttcagaaacgagggcaacctggagaagttcgacaagagcgccctggagggcctgtgcaacctgaccatcgaggagttcagactggcctacctggactactacctggacgacatcatcgacctgttcaactgcctgaccaacgtgagcagcttcagcctggtgagcgtgaccatcgagagagtgaaggacttcagctacaacttcggctggcagcacctggagctggtgaactgcaagttcggccagttccccaccctgaagctgaagagcctgaagagactgaccttcaccagcaacaagggcggcaacgccttcagcgaggtggacctgcccagcctggagttcctggacctgagcagaaacggcctgagcttcaagggctgctgcagccagagcgacttcggcaccaccagcctgaagtacctggacctgagcttcaacggcgtgatcaccatgagcagcaacttcctgggcctggagcagctggagcacctggacttccagcacagcaacctgaagcagatgagcgagttcagcgtgttcctgagcctgagaaacctgatctacctggacatcagccacacccacaccagagtggccttcaacggcatcttcaacggcctgagcagcctggaggtgctgaagatggccggcaacagcttccaggagaacttcctgcccgacatcttcaccgagctgagaaacctgaccttcctggacctgagccagtgccagctggagcagctgagccccaccgccttcaacagcctgagcagcctgcaggtgctgaacatgagccacaacaacttcttcagcctggacaccttcccctacaagtgcctgaacagcctgcaggtgctggactacagcctgaaccacatcatgaccagcaagaagcaggagctgcagcacttccccagcagcctggccttcctgaacctgacccagaacgacttcgcctgcacctgcgagcaccagagcttcctgcagtggatcaaggaccagagacagctgctggtggaggtggagagaatggagtgcgccacccccagcgacaagcagggcatgcccgtgctgagcctgaacatcacctgccagatgaacaagaccatcatcggcgtgagcgtgctgagcgtgctggtggtgagcgtggtggccgtgctggtgtacaagttctacttccacctgatgctgctggccggctgcatcaagtacggcagaggcgagaacatctacgacgccttcgtgatctacagcagccaggacgaggactgggtgagaaacgagctggtgaagaacctggaggagggcgtgccccccttccagctgtgcctgcactacagagacttcatccccggcgtggccatcgccgccaacatcatccacgagggcttccacaagagcagaaaggtgatcgtggtggtgagccagcacttcatccagagcagatggtgcatcttcgagtacgagatcgcccagacctggcagttcctgagcagcagagccggcatcatcttcatcgtgctgcagaaggtggagaagaccctgctgagacagcaggtggagctgtacagactgctgagcagaaacacctacctggagtgggaggacagcgtgctgggcagacacatcttctggagaagactgagaaaggccctgctggacggcaagagctggaaccccgagggcaccgtgggcaccggctgcaactggcaggaggccaccagcatctag

SEQ ID NO: 13225 - DNA, 2577 bp, synthetic construct
  misc_feature 1..2577: note = Description of Artificial Sequence: Synthetic coding sequence
  source 1..2577: mol_type = other DNA
atgggcgaccacctggacctgctgctgggcgtggtgctgatggccggccccgtgttcggcatccccagctgcagcttcgacggcagaatcgccttctacagattctgcaacctgacccaggtgccccaggtgctgaacaccaccgagagactgctgctgagcttcaactacatcagaaccgtgaccgccagcagcttccccttcctggagcagctgcagctgctggagctgggcagccagtacacccccctgaccatcgacaaggaggccttcagaaacctgcccaacctgagaatcctggacctgggcagcagcaagatctacttcctgcaccccgacgccttccagggcctgttccacctgttcgagctgagactgtacttctgcggcctgagcgacgccgtgctgaaggacggctacttcagaaacctgaaggccctgaccagactggacctgagcaagaaccagatcagaagcctgtacctgcaccccagcttcggcaagctgaacagcctgaagagcatcgacttcagcagcaaccagatcttcctggtgtgcgagcacgagctggagcccctgcagggcaagaccctgagcttcttcagcctggccgccaacagcctgtacagcagagtgagcgtggactggggcaagtgcatgaaccccttcagaaacatggtgctggagatcctggacgtgagcggcaacggctggaccgtggacatcaccggcaacttcagcaacgccatcagcaagagccaggccttcagcctgatcctggcccaccacatcatgggcgccggcttcggcttccacaacatcaaggaccccgaccagaacaccttcgccggcctggccagaagcagcgtgagacacctggacctgagccacggcttcgtgttcagcctgaacagcagagtgttcgagaccctgaaggacctgaaggtgctgaacctggcctacaacaagatcaacaagatcgccgacgaggccttctacggcctggacaacctgcaggtgctgaacctgagctacaacctgctgggcgagctgtacagcagcaacttctacggcctgcccaaggtggcctacatcgacctgcagaagaaccacatcgccatcatccaggaccagaccttcaagttcctggagaagctgcagaccctggacctgagagacaacgccctgaccaccatccacttcatccccagcatccccgacatcttcctgagcggcaacaagctggtgaccctgcccaagatcaacctgaccgccaacctgatccacctgagcgagaacagactggagaacctggacatcctgtacttcctgctgagagtgccccacctgcagatcctgatcctgaaccagaacagattcagcagctgcagcggcgaccagacccccagcgagaaccccagcctggagcagctgttcctgggcgagaacatgctgcagctggcctgggagaccgagctgtgctgggacgtgttcgagggcctgagccacctgcaggtgctgtacctgaaccacaactacctgaacagcctgccccccggcgtgttcagccacctgaccgccctgagaggcctgagcctgaacagcaacagactgaccgtgctgagccacaacgacctgcccgccaacctggagatcctggacatcagcagaaaccagctgctggcccccaaccccgacgtgttcgtgagcctgagcgtgctggacatcacccacaacaagttcatctgcgagtgcgagctgagcaccttcatcaactggctgaaccacaccaacgtgaccatcgccggcccccccgccgacatctactgcgtgtaccccgacagcttcagcggcgtgagcctgttcagcctgagcaccgagggctgcgacgaggaggaggtgctgaagagcctgaagttcagcctgttcatcgtgtgcaccgtgaccctgaccctgttcctgatgaccatcctgaccgtgaccaagttcagaggcttctgcttcatctgctacaagaccgcccagagactggtgttcaaggaccacccccagggcaccgagcccgacatgtacaagtacgacgcctacctgtgcttcagcagcaaggacttcacctgggtgcagaacgccctgctgaagcacctggacacccagtacagcgaccagaacagattcaacctgtgcttcgaggagagagacttcgtgcccggcgagaacagaatcgccaacatccaggacgccatctggaacagcagaaagatcgtgtgcctggtgagcagacacttcctgagagacggctggtgcctggaggccttcagctacgcccagggcagatgcctgagcgacctgaacagcgccctgatcatggtggtggtgggcagcctgagccagtaccagctgatgaagcaccagagcatcagaggcttcgtgcagaagcagcagtacctgagatggcccgaggacttccaggacgtgggctggttcctgcacaagctgagccagcagatcctgaagaaggagaaggagaagaagaaggacaacaacatccccctgcagaccgtggccaccatcagctag

SEQ ID NO: 13226 - DNA, 2577 bp, synthetic construct; identical to SEQ ID NO: 13225
  misc_feature 1..2577: note = Description of Artificial Sequence: Synthetic coding sequence
  source 1..2577: mol_type = other DNA

SEQ ID NO: 13227 - DNA, 66 bp, synthetic construct
  misc_feature 1..66: note = Description of Artificial Sequence: Synthetic coding sequence
  source 1..66: mol_type = other DNA
atgggcgaccacctggacctgctgctgggcgtggtgctgatggccggccccgtgttcggcatctag

SEQ ID NO: 13228 - DNA, 2577 bp, synthetic construct; identical to SEQ ID NO: 13225
  misc_feature 1..2577: note = Description of Artificial Sequence: Synthetic coding sequence
  source 1..2577: mol_type = other DNA

SEQ ID NO: 13229 - DNA, 4836 bp, synthetic construct
  misc_feature 1..4836: note = Description of Artificial Sequence: Synthetic coding sequence
  source 1..4836: mol_type = other DNA
caggtgagccccagccaccccgtgaacgagaacatgcaggtgaacaagatcaagaagaacgaggacgccaagaagagactgagcgtggagagaatctaccagaagaagacccagctggagcacatcctgctgagacccgacacctacatcggcagcgtggagctggtgacccagcagatgtgggtgtacgacgaggacgtgggcatcaactacagagaggtgaccttcgtgcccggcctgtacaagatcttcgacgagatcctggtgaacgccgccgacaacaagcagagagaccccaagatgagctgcatcagagtgaccatcgaccccgagaacaacctgatcagcatctggaacaacggcaagggcatccccgtggtggagcacaaggtggagaagatgtacgtgcccgccctgatcttcggccagctgctgaccagcagcaactacgacgacgacgagaagaaggtgaccggcggcagaaacggctacggcgccaagctgtgcaacatcttcagcaccaagttcaccgtggagaccgccagcagagagtacaagaagatgttcaagcagacctggatggacaacatgggcagagccggcgagatggagctgaagcccttcaacggcgaggactacacctgcatcaccttccagcccgacctgagcaagttcaagatgcagagcctggacaaggacatcgtggccctgatggtgagaagagcctacgacatcgccggcagcaccaaggacgtgaaggtgttcctgaacggcaacaagctgcccgtgaagggcttcagaagctacgtggacatgtacctgaaggacaagctggacgagaccggcaacagcctgaaggtgatccacgagcaggtgaaccacagatgggaggtgtgcctgaccatgagcgagaagggcttccagcagatcagcttcgtgaacagcatcgccaccagcaagggcggcagacacgtggactacgtggccgaccagatcgtgaccaagctggtggacgtggtgaagaagaagaacaagggcggcgtggccgtgaaggcccaccagagactggagtgcagcggcaccatcagcgcccactgcaacctgagactgctgggcttcagcgacagcctggccagcgccagcagagtggccgagatcaccgacatgcaccaccacatccagctgatcttcgtgttcctgatcgagatgggcttctaccacgtgggccaggccggcctggagctgctggccagcctggacccccccagcagcgccagctgcgtgagccactgcacccagctgttcgtgagcaacttcatctacctgttcctgatcttcctgagaagaagcttcaccttcgtgacccaggccggcgtgcagtgcaccatcagccccaccagcagcagcgtgctggcccagttcttcgagagcttcctgttcgtggccatcggctgcggcatcgtggagagcatcctgaactgggtgaagttcaaggcccaggtgcagctgaacaagaagtgcagcgccgtgaagcacaacagaatcaagggcatccccaagctggacgacgccaacgacgccggcggcagaaacagcaccgagtgcaccctgatcctgaccgagggcgacagcgccaagaccctggccgtgagcggcctgggcgtggtgggcagagacaagtacggcgtgttccccctgagaggcaagatcctgaacgtgagagaggccagccacaagcagatcatggagaacgccgagatcaacaacatcatcaagatcgtgggcctgcagtacaagaagaactacgaggacgaggacagcctgaagaccctgagatacggcaagatcatgatcatgaccgaccaggaccaggacggcagccacatcaagggcctgctgatcaacttcatccaccacaactggcccagcctgctgagacacagattcctggaggagttcatcacccccatcgtgaaggtgagcaagaacaagcaggagatggccttctacagcctgcccgagttcgaggagtggaagagcagcacccccaaccacaagaagtggaaggtgaagtactacaagggcctgggcaccagcaccagcaaggaggccaaggagtacttcgccgacatgaagagacacagaatccagttcaagtacagcggccccgaggacgacgccgccatcagcctggccttcagcaagaagcagatcgacgacagaaaggagtggctgaccaacttcatggaggacagaagacagagaaagctgctgggcctgcccgaggactacctgtacggccagaccaccacctacctgacctacaacgacttcatcaacaaggagctgatcctgttcagcaacagcgacaacgagagaagcatccccagcatggtggacggcctgaagcccggccagagaaaggtgctgttcacctgcttcaagagaaacgacaagagagaggtgaaggtggcccagctggccggcagcgtggccgagatgagcagctaccaccacggcgagatgagcctgatgatgaccatcatcaacctggcccagaacttcgtgggcagcaacaacctgaacctgctgcagcccatcggccagttcggcaccagactgcacggcggcaaggacagcgccagccccagatacatcttcaccatgctgagcagcctggccagactgctgttcccccccaaggacgaccacaccctgaagttcctgtacgacgacaaccagagagtggagcccgagtggtacatccccatcatccccatggtgctgatcaacggcgccgagggcatcggcaccggctggagctgcaagatccccaacttcgacgtgagagagatcgtgaacaacatcagaagactgatggacggcgaggagcccctgcccatgctgcccagctacaagaacttcaagggcaccatcgaggagctggcccccaaccagtacgtgatcagcggcgaggtggccatcctgaacagcaccaccatcgagatcagcgagctgcccgtgagaacctggacccagacctacaaggagcaggtgctggagcccatgctgaacggcaccgagaagaccccccccctgatcaccgactacagagagtaccacaccgacaccaccgtgaagttcgtggtgaagatgaccgaggagaagctggccgaggccgagagagtgggcctgcacaaggtgttcaagctgcagaccagcctgacctgcaacagcatggtgctgttcgaccacgtgggctgcctgaagaagtacgacaccgtgctggacatcctgagagacttcttcgagctgagactgaagtactacggcctgagaaaggagtggctgctgggcatgctgggcgccgagagcgccaagctgaacaaccaggccagattcatcctggagaagatcgacggcaagatcatcatcgagaacaagcccaagaaggagctgatcaaggtgctgatccagagaggctacgacagcgaccccgtgaaggcctggaaggaggcccagcagaaggtgcccgacgaggaggagaacgaggagagcgacaacgagaaggagaccgagaagagcgacagcgtgaccgacagcggccccaccttcaactacctgctggacatgcccctgtggtacctgaccaaggagaagaaggacgagctgtgcagactgagaaacgagaaggagcaggagctggacaccctgaagagaaagagccccagcgacctgtggaaggaggacctggccaccttcatcgaggagctggaggccgtggaggccaaggagaagcaggacgagcaggtgggcctgcccggcaagggcggcaaggccaagggcaagaagacccagatggccgaggtgctgcccagccccagaggccagagagtgatccccagaatcaccatcgagatgaaggccgaggccgagaagaagaacaagaagaagatcaagaacgagaacaccgagggcagcccccaggaggacggcgtggagctggagggcctgaagcagagactggagaagaagcagaagagagagcccggcaccaagaccaagaagcagaccaccctggccttcaagcccatcaagaagggcaagaagagaaacccctggagcgacagcgagagcgacagaagcagcgacgagagcaacttcgacgtgccccccagagagaccgagcccagaagagccgccaccaagaccaagttcaccatggacctggacagcgacgaggacttcagcgacttcgacgagaagaccgacgacgaggacttcgtgcccagcgacgccagcccccccaagaccaagaccagccccaagctgagcaacaaggagctgaagccccagaagagcgtggtgagcgacctggaggccgacgacgtgaagggcagcgtgcccctgagcagcagcccccccgccacccacttccccgacgagaccgagatcaccaaccccgtgcccaagaagaacgtgaccgtgaagaagaccgccgccaagagccagagcagcaccagcaccaccggcgccaagaagagagccgcccccaagggcaccaagagagaccccgccctgaacagcggcgtgagccagaagcccgaccccgccaagaccaagaacagaagaaagagaaagcccagcaccagcgacgacagcgacagcaacttcgagaagatcgtgagcaaggccgtgaccagcaagaagagcaagggcgagagcgacgacttccacatggacttcgacagcgccgtggcccccagagccaagagcgtgagagccaagaagcccatcaagtacctggaggagagcgacgaggacgacctgttctag

SEQ ID NO: 13230 - DNA, 4665 bp, synthetic construct
  misc_feature 1..4665: note = Description of Artificial Sequence: Synthetic coding sequence
  source 1..4665: mol_type = other DNA
caggtgagccccagccaccccgtgaacgagaacatgcaggtgaacaagatcaagaagaacgaggacgccaagaagagactgagcgtggagagaatctaccagaagaagacccagctggagcacatcctgctgagacccgacacctacatcggcagcgtggagctggtgacccagcagatgtgggtgtacgacgaggacgtgggcatcaactacagagaggtgaccttcgtgcccggcctgtacaagatcttcgacgagatcctggtgaacgccgccgacaacaagcagagagaccccaagatgagctgcatcagagtgaccatcgaccccgagaacaacctgatcagcatctggaacaacggcaagggcatccccgtggtggagcacaaggtggagaagatgtacgtgcccgccctgatcttcggccagctgctgaccagcagcaactacgacgacgacgagaagaaggtgaccggcggcagaaacggctacggcgccaagctgtgcaacatcttcagcaccaagttcaccgtggagaccgccagcagagagtacaagaagatgttcaagcagacctggatggacaacatgggcagagccggcgagatggagctgaagcccttcaacggcgaggactacacctgcatcaccttccagcccgacctgagcaagttcaagatgcagagcctggacaaggacatcgtggccctgatggtgagaagagcctacgacatcgccggcagcaccaaggacgtgaaggtgttcctgaacggcaacaagctgcccgtgaagggcttcagaagctacgtggacatgtacctgaaggacaagctggacgagaccggcaacagcctgaaggtgatccacgagcaggtgaaccacagatgggaggtgtgcctgaccatgagcgagaagggcttccagcagatcagcttcgtgaacagcatcgccaccagcaagggcggcagacacgtggactacgtggccgaccagatcgtgaccaagctggtggacgtggtgaagaagaagaacaagggcggcgtggccgtgaaggcccaccaggtgaagaaccacatgtggatcttcgtgaacgccctgatcgagaaccccaccttcgacagccagaccaaggagaacatgaccctgcagcccaagagcttcggcagcacctgccagctgagcgagaagttcatcaaggccgcccacctgtacagcagattcctgatcgaccccttcttccccaacatgatccccaacatgaacctgttccaggccatcggctgcggcatcgtggagagcatcctgaactgggtgaagttcaaggcccaggtgcagctgaacaagaagtgcagcgccgtgaagcacaacagaatcaagggcatccccaagctggacgacgccaacgacgccggcggcagaaacagcaccgagtgcaccctgatcctgaccgagggcgacagcgccaagaccctggccgtgagcggcctgggcgtggtgggcagagacaagtacggcgtgttccccctgagaggcaagatcctgaacgtgagagaggccagccacaagcagatcatggagaacgccgagatcaacaacatcatcaagatcgtgggcctgcagtacaagaagaactacgaggacgaggacagcctgaagaccctgagatacggcaagatcatgatcatgaccgaccaggaccaggacggcagccacatcaagggcctgctgatcaacttcatccaccacaactggcccagcctgctgagacacagattcctggaggagttcatcacccccatcgtgaaggtgagcaagaacaagcaggagatggccttctacagcctgcccgagttcgaggagtggaagagcagcacccccaaccacaagaagtggaaggtgaagtactacaagggcctgggcaccagcaccagcaaggaggccaaggagtacttcgccgacatgaagagacacagaatccagttcaagtacagcggccccgaggacgacgccgccatcagcctggccttcagcaagaagcagatcgacgacagaaaggagtggctgaccaacttcatggaggacagaagacagagaaagctgctgggcctgcccgaggactacctgtacggccagaccaccacctacctgacctacaacgacttcatcaacaaggagctgatcctgttcagcaacagcgacaacgagagaagcatccccagcatggtggacggcctgaagcccggccagagaaaggtgctgttcacctgcttcaagagaaacgacaagagagaggtgaaggtggcccagctggccggcagcgtggccgagatgagcagctaccaccacggcgagatgagcctgatgatgaccatcatcaacctggcccagaacttcgtgggcagcaacaacctgaacctgctgcagcccatcggccagttcggcaccagactgcacggcggcaaggacagcgccagccccagatacatcttcaccatgctgagcagcctggccagactgctgttcccccccaaggacgaccacaccctgaagttcctgtacgacgacaaccagagagtggagcccgagtggtacatccccatcatccccatggtgctgatcaacggcgccgagggcatcggcaccggctggagctgcaagatccccaacttcgacgtgagagagatcgtgaacaacatcagaagactgatggacggcgaggagcccctgcccatgctgcccagctacaagaacttcaagggcaccatcgaggagctggcccccaaccagtacgtgatcagcggcgaggtggccatcctgaacagcaccaccatcgagatcagcgagctgcccgtgagaacctggacccagacctacaaggagcaggtgctggagcccatgctgaacggcaccgagaagaccccccccctgatcaccgactacagagagtaccacaccgacaccaccgtgaagttcgtggtgaagatgaccgaggagaagctggccgaggccgagagagtgggcctgcacaaggtgttcaagctgcagaccagcctgacctgcaacagcatggtgctgttcgaccacgtgggctgcctgaagaagtacgacaccgtgctggacatcctgagagacttcttcgagctgagactgaagtactacggcctgagaaaggagtggctgctgggcatgctgggcgccgagagcgccaagctgaacaaccaggccagattcatcctggagaagatcgacggcaagatcatcatcgagaacaagcccaagaaggagctgatcaaggtgctgatccagagaggctacgacagcgaccccgtgaaggcctggaaggaggcccagcagaaggtgcccgacgaggaggagaacgaggagagcgacaacgagaaggagaccgagaagagcgacagcgtgaccgacagcggccccaccttcaactacctgctggacatgcccctgtggtacctgaccaaggagaagaaggacgagctgtgcagactgagaaacgagaaggagcaggagctggacaccctgaagagaaagagccccagcgacctgtggaaggaggacctggccaccttcatcgaggagctggaggccgtggaggccaaggagaagcaggacgagcaggtgggcctgcccggcaagggcggcaaggccaagggcaagaagacccagatggccgaggtgctgcccagccccagaggccagagagtgatccccagaatcaccatcgagatgaaggccgaggccgagaagaagaacaagaagaagatcaagaacgagaacaccgagggcagcccccaggaggacggcgtggagctggagggcctgaagcagagactggagaagaagcagaagagagagcccggcaccaagaccaagaagcagaccaccctggccttcaagcccatcaagaagggcaagaagagaaacccctggagcgacagcgagagcgacagaagcagcgacgagagcaacttcgacgtgccccccagagagaccgagcccagaagagccgccaccaagaccaagttcaccatggacctggacagcgacgaggacttcagcgacttcgacgagaagaccgacgacgaggacttcgtgcccagcgacgccagcccccccaagaccaagaccagccccaagctgagcaacaaggagctgaagccccagaagagcgtggtgagcgacctggaggccgacgacgtgaagggcagcgtgcccctgagcagcagcccccccgccacccacttccccgacgagaccgagatcaccaaccccgtgcccaagaagaacgtgaccgtgaagaagaccgccgccaagagccagagcagcaccagcaccaccggcgccaagaagagagccgcccccaagggcaccaagagagaccccgccctgaacagcggcgtgagccagaagcccgaccccgccaagaccaagaacagaagaaagagaaagcccagcaccagcgacgacagcgacagcaacttcgagaagatcgtgagcaaggccgtgaccagcaagaagagcaagggcgagagcgacgacttccacatggacttcgacagcgccgtggcccccagagccaagagcgtgagagccaagaagcccatcaagtacctggaggagagcgacgaggacgacctgttctag

SEQ ID NO: 13231 - DNA, 4707 bp, synthetic construct
  misc_feature 1..4707: note = Description of Artificial Sequence: Synthetic coding sequence
  source 1..4707: mol_type = other DNA
atggaggtgagccccctgcagcccgtgaacgagaacatgcaggtgaacaagatcaagaagaacgaggacgccaagaagagactgagcgtggagagaatctaccagaagaagacccagctggagcacatcctgctgagacccgacacctacatcggcagcgtggagctggtgacccagcagatgtgggtgtacgacgaggacgtgggcatcaactacagagaggtgaccttcgtgcccggcctgtacaagatcttcgacgagatcctggtgaacgccgccgacaacaagcagagagaccccaagatgagctgcatcagagtgaccatcgaccccgagaacaacctgatcagcatctggaacaacggcaagggcatccccgtggtggagcacaaggtggagaagatgtacgtgcccgccctgatcttcggccagctgctgaccagcagcaactacgacgacgacgagaagaaggtgaccggcggcagaaacggctacggcgccaagctgtgcaacatcttcagcaccaagttcaccgtggagaccgccagcagagagtacaagaagatgttcaagcaggccatcacctggatggacaacatgggcagagccggcgagatggagctgaagcccttcaacggcgaggactacacctgcatcaccttccagcccgacctgagcaagttcaagatgcagagcctggacaaggacatcgtggccctgatggtgagaagagcctacgacatcgccggcagcaccaaggacgtgaaggtgttcctgaacggcaacaagctgcccgtgaagggcttcagaagctacgtggacatgtacctgaaggacaagctggacgagaccggcaacagcctgaaggtgatccacgagcaggtgaaccacagatgggaggtgtgcctgaccatgagcgagaagggcttccagcagatcagcttcgtgaacagcatcgccaccagcaaggtgatcctgttcctgaactacatgatctacctgtacatctacgtgttcctgctgttcctgatctacaaggtggacctgaacatcggcctggcctacttcaccggcggcagacacgtggactacgtggccgaccagatcgtgaccaagctggtggacgtggtgaagaagaagaacaagggcggcgtggccgtgaaggcccaccaggtgaagaaccacatgtggatcttcgtgaacgccctgatcgagaaccccaccttcgacagccagaccaaggagaacatgaccctgcagcccaagagcttcggcagcacctgccagctgagcgagaagttcatcaaggccgccatcggctgcggcatcgtggagagcatcctgaactgggtgaagttcaaggcccaggtgcagctgaacaagaagtgcagcgccgtgaagcacaacagaatcaagggcatccccaagctggacgacgccaacgacgccggcggcagaaacagcaccgagtgcaccctgatcctgaccgagggcgacagcgccaagaccctggccgtgagcggcctgggcgtggtgggcagagacaagtacggcgtgttccccctgagaggcaagatcctgaacgtgagagaggccagccacaagcagatcatggagaacgccgagatcaacaacatcatcaagatcgtgggcctgcagtacaagaagaactacgaggacgaggacagcctgaagaccctgagatacggcaagatcatgatcatgaccgaccaggaccaggacggcagccacatcaagggcctgctgatcaacttcatccaccacaactggcccagcctgctgagacacagattcctggaggagttcatcacccccatcgtgaaggtgagcaagaacaagcaggagatggccttctacagcctgcccgagttcgaggagtggaagagcagcacccccaaccacaagaagtggaaggtgaagtactacaagggcctgggcaccagcaccagcaaggaggccaaggagtacttcgccgacatgaagagacacagaatccagttcaagtacagcggccccgaggacgacgccgccatcagcctggccttcagcaagaagcagatcgacgacagaaaggagtggctgaccaacttcatggaggacagaagacagagaaagctgctgggcctgcccgaggactacctgtacggccagaccaccacctacctgacctacaacgacttcatcaacaaggagctgatcctgttcagcaacagcgacaacgagagaagcatccccagcatggtggacggcctgaagcccggccagagaaaggtgctgttcacctgcttcaagagaaacgacaagagagaggtgaaggtggcccagctggccggcagcgtggccgagatgagcagctaccaccacggcgagatgagcctgatgatgaccatcatcaacctggcccagaacttcgtgggcagcaacaacctgaacctgctgcagcccatcggccagttcggcaccagactgcacggcggcaaggacagcgccagccccagatacatcttcaccatgctgagcagcctggccagactgctgttcccccccaaggacgaccacaccctgaagttcctgtacgacgacaaccagagagtggagcccgagtggtacatccccatcatccccatggtgctgatcaacggcgccgagggcatcggcaccggctggagctgcaagatccccaacttcgacgtgagagagatcgtgaacaacatcagaagactgatggacggcgaggagcccctgcccatgctgcccagctacaagaacttcaagggcaccatcgaggagctggcccccaaccagtacgtgatcagcggcgaggtggccatcctgaacagcaccaccatcgagatcagcgagctgcccgtgagaacctggacccagacctacaaggagcaggtgctggagcccatgctgaacggcaccgagaagaccccccccctgatcaccgactacagagagtaccacaccgacaccaccgtgaagttcgtggtgaagatgaccgaggagaagctggccgaggccgagagagtgggcctgcacaaggtgttcaagctgcagaccagcctgacctgcaacagcatggtgctgttcgaccacgtgggctgcctgaagaagtacgacaccgtgctggacatcctgagagacttcttcgagctgagactgaagtactacggcctgagaaaggagtggctgctgggcatgctgggcgccgagagcgccaagctgaacaaccaggccagattcatcctggagaagatcgacggcaagatcatcatcgagaacaagcccaagaaggagctgatcaaggtgctgatccagagaggctacgacagcgaccccgtgaaggcctggaaggaggcccagcagaaggtgcccgacgaggaggagaacgaggagagcgacaacgagaaggagaccgagaagagcgacagcgtgaccgacagcggccccaccttcaactacctgctggacatgcccctgtggtacctgaccaaggagaagaaggacgagctgtgcagactgagaaacgagaaggagcaggagctggacaccctgaagagaaagagccccagcgacctgtggaaggaggacctggccaccttcatcgaggagctggaggccgtggaggccaaggagaagcaggacgagcaggtgggcctgcccggcaagggcggcaaggccaagggcaagaagacccagatggccgaggtgctgcccagccccagaggccagagagtgatccccagaatcaccatcgagatgaaggccgaggccgagaagaagaacaagaagaagatcaagaacgagaacaccgagggcagcccccaggaggacggcgtggagctggagggcctgaagcagagactggagaagaagcagaagagagagcccggcaccaagaccaagaagcagaccaccctggccttcaagcccatcaagaagggcaagaagagaaacccctggagcgacagcgagagcgacagaagcagcgacgagagcaacttcgacgtgccccccagagagaccgagcccagaagagccgccaccaagaccaagttcaccatggacctggacagcgacgaggacttcagcgacttcgacgagaagaccgacgacgaggacttcgtgcccagcgacgccagcccccccaagaccaagaccagccccaagcagaactgcaacaaggagctgaagccccagaagagcgtggtgagcgacctggaggccgacgacgtgaagggcagcgtgcccctgagcagcagcccccccgccacccacttccccgacgagaccgagatcaccaaccccgtgcccaagaagaacgtgaccgtgaagaagaccgccgccaagagccagagcagcaccagcaccaccggcgccaagaagagagccgcccccaagggcaccaagagagaccccgccctgaacagcggcgtgagccagaagcccgaccccgccaagaccaagaacagaagaaagagaaagcccagcaccagcgacgacagcgacagcaacttcgagaagatcgtgagcaaggccgtgaccagcaagaagagcaagggcgagagcgacgacttccacatggacttcgacagcgccgtggcccccagagccaagagcgtgagagccaagaagcccatcaagtacctggaggagagcgacgaggacgacctgttctag

SEQ ID NO: 13232 - DNA, 4596 bp, synthetic construct
  misc_feature 1..4596: note = Description of Artificial Sequence: Synthetic coding sequence
  source 1..4596: mol_type = other DNA
atggaggtgagccccctgcagcccgtgaacgagaacatgcaggtgaacaagatcaagaagaacgaggacgccaagaagagactgagcgtggagagaatctaccagaagaagacccagctggagcacatcctgctgagacccgacacctacatcggcagcgtggagctggtgacccagcagatgtgggtgtacgacgaggacgtgggcatcaactacagagaggtgaccttcgtgcccggcctgtacaagatcttcgacgagatcctggtgaacgccgccgacaacaagcagagagaccccaagatgagctgcatcagagtgaccatcgaccccgagaacaacctgatcagcatctggaacaacggcaagggcatccccgtggtggagcacaaggtggagaagatgtacgtgcccgccctgatcttcggccagctgctgaccagcagcaactacgacgacgacgagaagaaggtgaccggcggcagaaacggctacggcgccaagctgtgcaacatcttcagcaccaagttcaccgtggagaccgccagcagagagtacaagaagatgttcaagcagacctggatggacaacatgggcagagccggcgagatggagctgaagcccttcaacggcgaggactacacctgcatcaccttccagcccgacctgagcaagttcaagatgcagagcctggacaaggacatcgtggccctgatggtgagaagagcctacgacatcgccggcagcaccaaggacgtgaaggtgttcctgaacggcaacaagctgcccgtgaagggcttcagaagctacgtggacatgtacctgaaggacaagctggacgagaccggcaacagcctgaaggtgatccacgagcaggtgaaccacagatgggaggtgtgcctgaccatgagcgagaagggcttccagcagatcagcttcgtgaacagcatcgccaccagcaagggcggcagacacgtggactacgtggccgaccagatcgtgaccaagctggtggacgtggtgaagaagaagaacaagggcggcgtggccgtgaaggcccaccaggtgaagaaccacatgtggatcttcgtgaacgccctgatcgagaaccccaccttcgacagccagaccaaggagaacatgaccctgcagcccaagagcttcggcagcacctgccagctgagcgagaagttcatcaaggccgccatcggctgcggcatcgtggagagcatcctgaactgggtgaagttcaaggcccaggtgcagctgaacaagaagtgcagcgccgtgaagcacaacagaatcaagggcatccccaagctggacgacgccaacgacgccggcggcagaaacagcaccgagtgcaccctgatcctgaccgagggcgacagcgccaagaccctggccgtgagcggcctgggcgtggtgggcagagacaagtacggcgtgttccccctgagaggcaagatcctgaacgtgagagaggccagccacaagcagatcatggagaacgccgagatcaacaacatcatcaagatcgtgggcctgcagtacaagaagaactacgaggacgaggacagcctgaagaccctgagatacggcaagatcatgatcatgaccgaccaggaccaggacggcagccacatcaagggcctgctgatcaacttcatccaccacaactggcccagcctgctgagacacagattcctggaggagttcatcacccccatcgtgaaggtgagcaagaacaagcaggagatggccttctacagcctgcccgagttcgaggagtggaagagcagcacccccaaccacaagaagtggaaggtgaagtactacaagggcctgggcaccagcaccagcaaggaggccaaggagtacttcgccgacatgaagagacacagaatccagttcaagtacagcggccccgaggacgacgccgccatcagcctggccttcagcaagaagcagatcgacgacagaaaggagtggctgaccaacttcatggaggacagaagacagagaaagctgctgggcctgcccgaggactacctgtacggccagaccaccacctacctgacctacaacgacttcatcaacaaggagctgatcctgttcagcaacagcgacaacgagagaagcatccccagcatggtggacggcctgaagcccggccagagaaaggtgctgttcacctgcttcaagagaaacgacaagagagaggtgaaggtggcccagctggccggcagcgtggccgagatgagcagctaccaccacggcgagatgagcctgatgatgaccatcatcaacctggcccagaacttcgtgggcagcaacaacctgaacctgctgcagcccatcggccagttcggcaccagactgcacggcggcaaggacagcgccagccccagatacatcttcaccatgctgagcagcctggccagactgctgttcccccccaaggacgaccacaccctgaagttcctgtacgacgacaaccagagagtggagcccgagtggtacatccccatcatccccatggtgctgatcaacggcgccgagggcatcggcaccggctggagctgcaagatccccaacttcgacgtgagagagatcgtgaacaacatcagaagactgatggacggcgaggagcccctgcccatgctgcccagctacaagaacttcaagggcaccatcgaggagctggcccccaaccagtacgtgatcagcggcgaggtggccatcctgaacagcaccaccatcgagatcagcgagctgcccgtgagaacctggacccagacctacaaggagcaggtgctggagcccatgctgaacggcaccgagaagaccccccccctgatcaccgactacagagagtaccacaccgacaccaccgtgaagttcgtggtgaagatgaccgaggagaagctggccgaggccgagagagtgggcctgcacaaggtgttcaagctgcagaccagcctgacctgcaacagcatggtgctgttcgaccacgtgggctgcctgaagaagtacgacaccgtgctggacatcctgagagacttcttcgagctgagactgaagtactacggcctgagaaaggagtggctgctgggcatgctgggcgccgagagcgccaagctgaacaaccaggccagattcatcctggagaagatcgacggcaagatcatcatcgagaacaagcccaagaaggagctgatcaaggtgctgatccagagaggctacgacagcgaccccgtgaaggcctggaaggaggcccagcagaaggtgcccgacgaggaggagaacgaggagagcgacaacgagaaggagaccgagaagagcgacagcgtgaccgacagcggccccaccttcaactacctgctggacatgcccctgtggtacctgaccaaggagaagaaggacgagctgtgcagactgagaaacgagaaggagcaggagctggacaccctgaagagaaagagccccagcgacctgtggaaggaggacctggccaccttcatcgaggagctggaggccgtggaggccaaggagaagcaggacgagcaggtgggcctgcccggcaagggcggcaaggccaagggcaagaagacccagatggccgaggtgctgcccagccccagaggccagagagtgatccccagaatcaccatcgagatgaaggccgaggccgagaagaagaacaagaagaagatcaagaacgagaacaccgagggcagcccccaggaggacggcgtggagctggagggcctgaagcagagactggagaagaagcagaagagagagcccggcaccaagaccaagaagcagaccaccctggccttcaagcccatcaagaagggcaagaagagaaacccctggagcgacagcgagagcgacagaagcagcgacgagagcaacttcgacgtgccccccagagagaccgagcccagaagagccgccaccaagaccaagttcaccatggacctggacagcgacgaggacttcagcgacttcgacgagaagaccgacgacgaggacttcgtgcccagcgacgccagcccccccaagaccaagaccagccccaagctgagcaacaaggagctgaagccccagaagagcgtggtgagcgacctggaggccgacgacgtgaagggcagcgtgcccctgagcagcagcccccccgccacccacttccccgacgagaccgagatcaccaaccccgtgcccaagaagaacgtgaccgtgaagaagaccgccgccaagagccagagcagcaccagcaccaccggcgccaagaagagagccgcccccaagggcaccaagagagaccccgccctgaacagcggcgtgagccagaagcccgaccccgccaagaccaagaacagaagaaagagaaagcccagcaccagcgacgacagcgacagcaacttcgagaagatcgtgagcaaggccgtgaccagcaagaagagcaagggcgagagcgacgacttccacatggacttcgacagcgccgtggcccccagagccaagagcgtgagagccaagaagcccatcaagtacctggaggagagcgacgaggacgacctgttctag

SEQ ID NO: 13233 - DNA, 4881 bp, synthetic construct
  misc_feature 1..4881: note = Description of Artificial Sequence: Synthetic coding sequence
  source 1..4881: mol_type = other DNA
atggccaagagcggcggctgcggcgccggcgccggcgtgggcggcggcaacggcgccctgacctgggtgaccctgttcgaccagaacaacgccgccaagaaggaggagagcgagaccgccaacaagaacgacagcagcaagaagctgagcgtggagagagtgtaccagaagaagacccagctggagcacatcctgctgagacccgacacctacatcggcagcgtggagcccctgacccagttcatgtgggtgtacgacgaggacgtgggcatgaactgcagagaggtgaccttcgtgcccggcctgtacaagatcttcgacgagatcctggtgaacgccgccgacaacaagcagagagacaagaacatgacctgcatcaaggtgagcatcgaccccgagagcaacatcatcagcatctggaacaacggcaagggcatccccgtggtggagcacaaggtggagaaggtgtacgtgcccgccctgatcttcggccagctgctgaccagcagcaactacgacgacgacgagaagaaggtgaccggcggcagaaacggctacggcgccaagctgtgcaacatcttcagcaccaagttcaccgtggagaccgcctgcaaggagtacaagcacagcttcaagcagacctggatgaacaacatgatgaagaccagcgaggccaagatcaagcacttcgacggcgaggactacacctgcatcaccttccagcccgacctgagcaagttcaagatggagaagctggacaaggacatcgtggccctgatgaccagaagagcctacgacctggccggcagctgcagaggcgtgaaggtgatgttcaacggcaagaagctgcccgtgaacggcttcagaagctacgtggacctgtacgtgaaggacaagctggacgagaccggcgtggccctgaaggtgatccacgagctggccaacgagagatgggacgtgtgcctgaccctgagcgagaagggcttccagcagatcagcttcgtgaacagcatcgccaccaccaagggcggcagacacgtggactacgtggtggaccaggtggtgggcaagctgatcgaggtggtgaagaagaagaacaaggccggcgtgagcgtgaagcccttccaggtgaagaaccacatctgggtgttcatcaactgcctgatcgagaaccccaccttcgacagccagaccaaggagaacatgaccctgcagcccaagagcttcggcagcaagtgccagctgagcgagaagttcttcaaggccgccagcaactgcggcatcgtggagagcatcctgaactgggtgaagttcaaggcccagacccagctgaacaagaagtgcagcagcgtgaagtacagcaagatcaagggcatccccaagctggacgacgccaacgacgccggcggcaagcacagcctggagtgcaccctgatcctgaccgagggcgacagcgccaagagcctggccgtgagcggcctgggcgtgatcggcagagacagatacggcgtgttccccctgagaggcaagatcctgaacgtgagagaggccagccacaagcagatcatggagaacgccgagatcaacaacatcatcaagatcgtgggcctgcagtacaagaagagctacgacgacgccgagagcctgaagaccctgagatacggcaagatcatgatcatgaccgaccaggaccaggacggcagccacatcaagggcctgctgatcaacttcatccaccacaactggcccagcctgctgaagcacggcttcctggaggagttcatcacccccatcgtgaaggccagcaagaacaagcaggagctgagcttctacagcatccccgagttcgacgagtggaagaagcacatcgagaaccagaaggcctggaagatcaagtactacaagggcctgggcaccagcaccgccaaggaggccaaggagtacttcgccgacatggagagacacagaatcctgttcagatacgccggccccgaggacgacgccgccatcaccctggccttcagcaagaagaagatcgacgacagaaaggagtggctgaccaacttcatggaggacagaagacagagaagactgcacggcctgcccgagcagttcctgtacggcaccgccaccaagcacctgacctacaacgacttcatcaacaaggagctgatcctgttcagcaacagcgacaacgagagaagcatccccagcctggtggacggcttcaagcccggccagagaaaggtgctgttcacctgcttcaagagaaacgacaagagagaggtgaaggtggcccagctggccggcagcgtggccgagatgagcgcctaccaccacggcgagcaggccctgatgatgaccatcgtgaacctggcccagaacttcgtgggcagcaacaacatcaacctgctgcagcccatcggccagttcggcaccagactgcacggcggcaaggacgccgccagccccagatacatcttcaccatgctgagcaccctggccagactgctgttccccgccgtggacgacaacctgctgaagttcctgtacgacgacaaccagagagtggagcccgagtggtacatccccatcatccccatggtgctgatcaacggcgccgagggcatcggcaccggctgggcctgcaagctgcccaactacgacgccagagagatcgtgaacaacgtgagaagaatgctggacggcctggacccccaccccatgctgcccaactacaagaacttcaagggcaccatccaggagctgggccagaaccagtacgccgtgagcggcgagatcttcgtggtggacagaaacaccgtggagatcaccgagctgcccgtgagaacctggacccaggtgtacaaggagcaggtgctggagcccatgctgaacggcaccgacaagacccccgccctgatcagcgactacaaggagtaccacaccgacaccaccgtgaagttcgtggtgaagatgaccgaggagaagctggcccaggccgaggccgccggcctgcacaaggtgttcaagctgcagaccaccctgacctgcaacagcatggtgctgttcgaccacatgggctgcctgaagaagtacgagaccgtgcaggacatcctgaaggagttcttcgacctgagactgagctactacggcctgagaaaggagtggctggtgggcatgctgggcgccgagagcaccaagctgaacaaccaggccagattcatcctggagaagatccagggcaagatcaccatcgagaacagaagcaagaaggacctgatccagatgctggtgcagagaggctacgagagcgaccccgtgaaggcctggaaggaggcccaggagaaggccgccgaggaggacgagacccagaaccagcacgacgacagcagcagcgacagcggcacccccagcggccccgacttcaactacatcctgaacatgagcctgtggagcctgaccaaggagaaggtggaggagctgatcaagcagagagacgccaagggcagagaggtgaacgacctgaagagaaagagccccagcgacctgtggaaggaggacctggccgccttcgtggaggagctggacaaggtggagagccaggagagagaggacgtgctggccggcatgagcggcaaggccatcaagggcaaggtgggcaagcccaaggtgaagaagctgcagctggaggagaccatgcccagcccctacggcagaagaatcatccccgagatcaccgccatgaaggccgacgccagcaagaagctgctgaagaagaagaagggcgacctggacaccgccgccgtgaaggtggagttcgacgaggagttcagcggcgcccccgtggagggcgccggcgaggaggccctgacccccagcgtgcccatcaacaagggccccaagcccaagagagagaagaaggagcccggcaccagagtgagaaagacccccaccagcagcggcaagcccagcgccaagaaggtgaagaagagaaacccctggagcgacgacgagagcaagagcgagagcgacctggaggagaccgagcccgtggtgatccccagagacagcctgctgagaagagccgccgccgagagacccaagtacaccttcgacttcagcgaggaggaggacgacgacgccgacgacgacgacgacgacaacaacgacctggaggagctgaaggtgaaggccagccccatcaccaacgacggcgaggacgagttcgtgcccagcgacggcctggacaaggacgagtacaccttcagccccggcaagagcaaggccacccccgagaagagcctgcacgacaagaagagccaggacttcggcaacctgttcagcttccccagctacagccagaagagcgaggacgacagcgccaagttcgacagcaacgaggaggacagcgccagcgtgttcagccccagcttcggcctgaagcagaccgacaaggtgcccagcaagaccgtggccgccaagaagggcaagcccagcagcgacaccgtgcccaagcccaagagagcccccaagcagaagaaggtggtggaggccgtgaacagcgacagcgacagcgagttcggcatccccaagaagaccaccacccccaagggcaagggcagaggcgccaagaagagaaaggccagcggcagcgagaacgagggcgactacaaccccggcagaaagaccagcaagaccaccagcaagaagcccaagaagaccagcttcgaccaggacagcgacgtggacatcttccccagcgacttccccaccgagccccccagcctgcccagaaccggcagagccagaaaggaggtgaagtacttcgccgagagcgacgaggaggaggacgacgtggacttcgccatgttcaactag

SEQ ID NO: 13234 - DNA, 3453 bp, synthetic construct
  misc_feature 1..3453: note = Description of Artificial Sequence: Synthetic coding sequence
  source 1..3453: mol_type = other DNA
atggccaagagcggcggctgcggcgccggcgccggcgtgggcggcggcaacggcgccctgacctgggtgaacaacgccgccaagaaggaggagagcgagaccgccaacaagaacgacagcagcaagaagctgagcgtggagagagtgtaccagaagaagacccagctggagcacatcctgctgagacccgacacctacatcggcagcgtggagcccctgacccagttcatgtgggtgtacgacgaggacgtgggcatgaactgcagagaggtgaccttcgtgcccggcctgtacaagatcttcgacgagatcctggtgaacgccgccgacaacaagcagagagacaagaacatgacctgcatcaaggtgagcatcgaccccgagagcaacatcatcagcatctggaacaacggcaagggcatccccgtggtggagcacaaggtggagaaggtgtacgtgcccgccctgatcttcggccagctgctgaccagcagcaactacgacgacgacgagaagaaggtgaccggcggcagaaacggctacggcgccaagctgtgcaacatcttcagcaccaagttcaccgtggagaccgcctgcaaggagtacaagcacagcttcaagcagacctggatgaacaacatgatgaagaccagcgaggccaagatcaagcacttcgacggcgaggactacacctgcatcaccttccagcccgacctgagcaagttcaagatggagaagctggacaaggacatcgtggccctgatgaccagaagagcctacgacctggccggcagctgcagaggcgtgaaggtgatgttcaacggcaagaagctgcccgtgaacggcttcagaagctacgtggacctgtacgtgaaggacaagctggacgagaccggcgtggccctgaaggtgatccacgagctggccaacgagagatgggacgtgtgcctgaccctgagcgagaagggcttccagcagatcagcttcgtgaacagcatcgccaccaccaagggcggcagacacgtggactacgtggtggaccaggtggtgggcaagctgatcgaggtggtgaagaagaagaacaaggccggcgtgagcgtgaagcccttccaggtgaagaaccacatctgggtgttcatcaactgcctgatcgagaaccccaccttcgacagccagaccaaggagaacatgaccctgcagcccaagagcttcggcagcaagtgccagctgagcgagaagttcttcaaggccgccagcaactgcggcatcgtggagagcatcctgaactgggtgaagttcaaggcccagacccagctgaacaagaagtgcagcagcgtgaagtacagcaagatcaagggcatccccaagctggacgacgccaacgacgccggcggcaagcacagcctggagtgcaccctgatcctgaccgagggcgacagcgccaagagcctggccgtgagcggcctgggcgtgatcggcagagacagatacggcgtgttccccctgagaggcaagatcctgaacgtgagagaggccagccacaagcagatcatggagaacgccgagatcaacaacatcatcaagatcgtgggcctgcagtacaagaagagctacgacgacgccgagagcctgaagaccctgagatacggcaagatcatgatcatgaccgaccaggaccaggacggcagccacatcaagggcctgctgatcaacttcatccaccacaactggcccagcctgctgaagcacggcttcctggaggagttcatcacccccatcgtgaaggccagcaagaacaagcaggagctgagcttctacagcatccccgagttcgacgagtggaagaagcacatcgagaaccagaaggcctggaagatcaagtactacaagggcctgggcaccagcaccgccaaggaggccaaggagtacttcgccgacatggagagacacagaatcctgttcagatacgccggccccgaggacgacgccgccatcaccctggccttcagcaagaagaagatcgacgacagaaaggagtggctgaccaacttcatggaggacagaagacagagaagactgcacggcctgcccgagcagttcctgtacggcaccgccaccaagcacctgacctacaacgacttcatcaacaaggagctgatcctgttcagcaacagcgacaacgagagaagcatccccagcctggtggacggcttcaagcccggccagagaaaggtgctgttcacctgcttcaagagaaacgacaagagagaggtgaaggtggcccagctggccggcagcgtggccgagatgagcgcctaccaccacggcgagcaggccctgatgatgaccatcgtgaacctggcccagaacttcgtgggcagcaacaacatcaacctgctgcagcccatcggccagttcggcaccagactgcacggcggcaaggacgccgccagccccagatacatcttcaccatgctgagcaccctggccagactgctgttccccgccgtggacgacaacctgctgaagttcctgtacgacgacaaccagagagtggagcccgagtggtacatccccatcatccccatggtgctgatcaacggcgccgagggcatcggcaccggctgggcctgcaagctgcccaactacgacgccagagagatcgtgaacaacgtgagaagaatgctggacggcctggacccccaccccatgctgcccaactacaagaacttcaagggcaccatccaggagctgggccagaaccagtacgccgtgagcggcgagatcttcgtggtggacagaaacaccgtggagatcaccgagctgcccgtgagaacctggacccaggtgtacaaggagcaggtgctggagcccatgctgaacggcaccgacaagacccccgccctgatcagcgactacaaggagtaccacaccgacaccaccgtgaagttcgtggtgaagatgaccgaggagaagctggcccaggccgaggccgccggcctgcacaaggtgttcaagctgcagaccaccctgacctgcaacagcatggtgctgttcgaccacatgggctgcctgaagaagtacgagaccgtgcaggacatcctgaaggagttcttcgacctgagactgagctactacggcctgagaaaggagtggctggtgggcatgctgggcgccgagagcaccaagctgaacaaccaggccagattcatcctggagaagatccagggcaagatcaccatcgagaacagaagcaagaaggacctgatccagatgctggtgcagagaggctacgagagcgaccccgtgaaggcctggaaggaggcccaggagaaggccgccgaggaggacgagacccagaaccagcacgacgacagcagcagcgacagcggcacccccagcggccccgacttcaactacatcctgaacatgagcctgtggagcctgacctag

SEQ ID NO: 13235 - DNA, 4866 bp, synthetic construct
  misc_feature 1..4866: note = Description of Artificial Sequence: Synthetic coding sequence
  source 1..4866: mol_type = other DNA
atggccaagagcggcggctgcggcgccggcgccggcgtgggcggcggcaacggcgccctgacctgggtgaacaacgccgccaagaaggaggagagcgagaccgccaacaagaacgacagcagcaagaagctgagcgtggagagagtgtaccagaagaagacccagctggagcacatcctgctgagacccgacacctacatcggcagcgtggagcccctgacccagttcatgtgggtgtacgacgaggacgtgggcatgaactgcagagaggtgaccttcgtgcccggcctgtacaagatcttcgacgagatcctggtgaacgccgccgacaacaagcagagagacaagaacatgacctgcatcaaggtgagcatcgaccccgagagcaacatcatcagcatctggaacaacggcaagggcatccccgtggtggagcacaaggtggagaaggtgtacgtgcccgccctgatcttcggccagctgctgaccagcagcaactacgacgacgacgagaagaaggtgaccggcggcagaaacggctacggcgccaagctgtgcaacatcttcagcaccaagttcaccgtggagaccgcctgcaaggagtacaagcacagcttcaagcagacctggatgaacaacatgatgaagaccagcgaggccaagatcaagcacttcgacggcgaggactacacctgcatcaccttccagcccgacctgagcaagttcaagatggagaagctggacaaggacatcgtggccctgatgaccagaagagcctacgacctggccggcagctgcagaggcgtgaaggtgatgttcaacggcaagaagctgcccgtgaacggcttcagaagctacgtggacctgtacgtgaaggacaagctggacgagaccggcgtggccctgaaggtgatccacgagctggccaacgagagatgggacgtgtgcctgaccctgagcgagaagggcttccagcagatcagcttcgtgaacagcatcgccaccaccaagggcggcagacacgtggactacgtggtggaccaggtggtgggcaagctgatcgaggtggtgaagaagaagaacaaggccggcgtgagcgtgaagcccttccaggtgaagaaccacatctgggtgttcatcaactgcctgatcgagaaccccaccttcgacagccagaccaaggagaacatgaccctgcagcccaagagcttcggcagcaagtgccagctgagcgagaagttcttcaaggccgccagcaactgcggcatcgtggagagcatcctgaactgggtgaagttcaaggcccagacccagctgaacaagaagtgcagcagcgtgaagtacagcaagatcaagggcatccccaagctggacgacgccaacgacgccggcggcaagcacagcctggagtgcaccctgatcctgaccgagggcgacagcgccaagagcctggccgtgagcggcctgggcgtgatcggcagagacagatacggcgtgttccccctgagaggcaagatcctgaacgtgagagaggccagccacaagcagatcatggagaacgccgagatcaacaacatcatcaagatcgtgggcctgcagtacaagaagagctacgacgacgccgagagcctgaagaccctgagatacggcaagatcatgatcatgaccgaccaggaccaggacggcagccacatcaagggcctgctgatcaacttcatccaccacaactggcccagcctgctgaagcacggcttcctggaggagttcatcacccccatcgtgaaggccagcaagaacaagcaggagctgagcttctacagcatccccgagttcgacgagtggaagaagcacatcgagaaccagaaggcctggaagatcaagtactacaagggcctgggcaccagcaccgccaaggaggccaaggagtacttcgccgacatggagagacacagaatcctgttcagatacgccggccccgaggacgacgccgccatcaccctggccttcagcaagaagaagatcgacgacagaaaggagtggctgaccaacttcatggaggacagaagacagagaagactgcacggcctgcccgagcagttcctgtacggcaccgccaccaagcacctgacctacaacgacttcatcaacaaggagctgatcctgttcagcaacagcgacaacgagagaagcatccccagcctggtggacggcttcaagcccggccagagaaaggtgctgttcacctgcttcaagagaaacgacaagagagaggtgaaggtggcccagctggccggcagcgtggccgagatgagcgcctaccaccacggcgagcaggccctgatgatgaccatcgtgaacctggcccagaacttcgtgggcagcaacaacatcaacctgctgcagcccatcggccagttcggcaccagactgcacggcggcaaggacgccgccagccccagatacatcttcaccatgctgagcaccctggccagactgctgttccccgccgtggacgacaacctgctgaagttcctgtacgacgacaaccagagagtggagcccgagtggtacatccccatcatccccatggtgctgatcaacggcgccgagggcatcggcaccggctgggcctgcaagctgcccaactacgacgccagagagatcgtgaacaacgtgagaagaatgctggacggcctggacccccaccccatgctgcccaactacaagaacttcaagggcaccatccaggagctgggccagaaccagtacgccgtgagcggcgagatcttcgtggtggacagaaacaccgtggagatcaccgagctgcccgtgagaacctggacccaggtgtacaaggagcaggtgctggagcccatgctgaacggcaccgacaagacccccgccctgatcagcgactacaaggagtaccacaccgacaccaccgtgaagttcgtggtgaagatgaccgaggagaagctggcccaggccgaggccgccggcctgcacaaggtgttcaagctgcagaccaccctgacctgcaacagcatggtgctgttcgaccacatgggctgcctgaagaagtacgagaccgtgcaggacatcctgaaggagttcttcgacctgagactgagctactacggcctgagaaaggagtggctggtgggcatgctgggcgccgagagcaccaagctgaacaaccaggccagattcatcctggagaagatccagggcaagatcaccatcgagaacagaagcaagaaggacctgatccagatgctggtgcagagaggctacgagagcgaccccgtgaaggcctggaaggaggcccaggagaaggccgccgaggaggacgagacccagaaccagcacgacgacagcagcagcgacagcggcacccccagcggccccgacttcaactacatcctgaacatgagcctgtggagcctgaccaaggagaaggtggaggagctgatcaagcagagagacgccaagggcagagaggtgaacgacctgaagagaaagagccccagcgacctgtggaaggaggacctggccgccttcgtggaggagctggacaaggtggagagccaggagagagaggacgtgctggccggcatgagcggcaaggccatcaagggcaaggtgggcaagcccaaggtgaagaagctgcagctggaggagaccatgcccagcccctacggcagaagaatcatccccgagatcaccgccatgaaggccgacgccagcaagaagctgctgaagaagaagaagggcgacctggacaccgccgccgtgaaggtggagttcgacgaggagttcagcggcgcccccgtggagggcgccggcgaggaggccctgacccccagcgtgcccatcaacaagggccccaagcccaagagagagaagaaggagcccggcaccagagtgagaaagacccccaccagcagcggcaagcccagcgccaagaaggtgaagaagagaaacccctggagcgacgacgagagcaagagcgagagcgacctggaggagaccgagcccgtggtgatccccagagacagcctgctgagaagagccgccgccgagagacccaagtacaccttcgacttcagcgaggaggaggacgacgacgccgacgacgacgacgacgacaacaacgacctggaggagctgaaggtgaaggccagccccatcaccaacgacggcgaggacgagttcgtgcccagcgacggcctggacaaggacgagtacaccttcagccccggcaagagcaaggccacccccgagaagagcctgcacgacaagaagagccaggacttcggcaacctgttcagcttccccagctacagccagaagagcgaggacgacagcgccaagttcgacagcaacgaggaggacagcgccagcgtgttcagccccagcttcggcctgaagcagaccgacaaggtgcccagcaagaccgtggccgccaagaagggcaagcccagcagcgacaccgtgcccaagcccaagagagcccccaagcagaagaaggtggtggaggccgtgaacagcgacagcgacagcgagttcggcatccccaagaagaccaccacccccaagggcaagggcagaggcgccaagaagagaaaggccagcggcagcgagaacgagggcgactacaaccccggcagaaagaccagcaagaccaccagcaagaagcccaagaagaccagcttcgaccaggacagcgacgtggacatcttccccagcgacttccccaccgagccccccagcctgcccagaaccggcagagccagaaaggaggtgaagtacttcgccgagagcgacgaggaggaggacgacgtggacttcgccatgttcaactag

SEQ ID NO: 13236 - DNA, 174 bp, synthetic construct
  misc_feature 1..174: note = Description of Artificial Sequence: Synthetic coding sequence
  source 1..174: mol_type = other DNA
accctgttcgaccagaacaacgccgccaagaaggaggagagcgagaccgccaacaagaacgacagcagcaagaagctgagcgtggagagagtgtaccagaagaagacccagctggagcacatcctgctgagacccgacacctacatcggcagcgtggagcccctgacccagtag

SEQ ID NO: 13237 - DNA, 1437 bp, synthetic construct
  misc_feature 1..1437: note = Description of Artificial Sequence: Synthetic coding sequence
  source 1..1437: mol_type = other DNA
atgagcctgtggagcctgaccaaggagaaggtggaggagctgatcaagcagagagacgccaagggcagagaggtgaacgacctgaagagaaagagccccagcgacctgtggaaggaggacctggccgccttcgtggaggagctggacaaggtggagagccaggagagagaggacgtgctggccggcatgagcggcaaggccatcaagggcaaggtgggcaagcccaaggtgaagaagctgcagctggaggagaccatgcccagcccctacggcagaagaatcatccccgagatcaccgccatgaaggccgacgccagcaagaagctgctgaagaagaagaagggcgacctggacaccgccgccgtgaaggtggagttcgacgaggagttcagcggcgcccccgtggagggcgccggcgaggaggccctgacccccagcgtgcccatcaacaagggccccaagcccaagagagagaagaaggagcccggcaccagagtgagaaagacccccaccagcagcggcaagcccagcgccaagaaggtgaagaagagaaacccctggagcgacgacgagagcaagagcgagagcgacctggaggagaccgagcccgtggtgatccccagagacagcctgctgagaagagccgccgccgagagacccaagtacaccttcgacttcagcgaggaggaggacgacgacgccgacgacgacgacgacgacaacaacgacctggaggagctgaaggtgaaggccagccccatcaccaacgacggcgaggacgagttcgtgcccagcgacggcctggacaaggacgagtacaccttcagccccggcaagagcaaggccacccccgagaagagcctgcacgacaagaagagccaggacttcggcaacctgttcagcttccccagctacagccagaagagcgaggacgacagcgccaagttcgacagcaacgaggaggacagcgccagcgtgttcagccccagcttcggcctgaagcagaccgacaaggtgcccagcaagaccgtggccgccaagaagggcaagcccagcagcgacaccgtgcccaagcccaagagagcccccaagcagaagaaggtggtggaggccgtgaacagcgacagcgacagcgagttcggcatccccaagaagaccaccacccccaagggcaagggcagaggcgccaagaagagaaaggccagcggcagcgagaacgagggcgactacaaccccggcagaaagaccagcaagaccaccagcaagaagcccaagaagaccagcttcgaccaggacagcgacgtggacatcttccccagcgacttccccaccgagccccccagcctgcccagaaccggcagagccagaaaggaggtgaagtacttcgccgagagcgacgaggaggaggacgacgtggacttcgccatgttcaactag

SEQ ID NO: 13238 - DNA, 1437 bp, synthetic construct; identical to SEQ ID NO: 13237
  misc_feature 1..1437: note = Description of Artificial Sequence: Synthetic coding sequence
  source 1..1437: mol_type = other DNA

SEQ ID NO: 13239 - DNA, 3006 bp, synthetic construct
  misc_feature 1..3006: note = Description of Artificial Sequence: Synthetic coding sequence
  source 1..3006: mol_type = other DNA
atgatcttccccgtggccagatacgccctgagatggctgagaagacccgaggacagagccttcagcagagccgccatggagatggccctgagaggcgtgagaaaggtgctgtgcgtggccgagaagaacgacgccgccaagggcatcgccgacctgctgagcaacggcagaatgagaagaagagagggcctgagcaagttcaacaagatctacgagttcgactaccacctgtacggccagaacgtgaccatggtgatgaccagcgtgagcggccacctgctggcccacgacttccagatgcagttcagaaagtggcagagctgcaaccccctggtgctgttcgaggccgagatcgagaagtactgccccgagaacttcgtggacatcaagaagaccctggagagagagaccagacagtgccaggccctggtgatctggaccgactgcgacagagagggcgagaacatcggcttcgagatcatccacgtgtgcaaggccgtgaagcccaacctgcaggtgctgagagccagattcagcgagatcaccccccacgccgtgagaaccgcctgcgagaacctgaccgagcccgaccagagagtgagcgacgccgtggacgtgagacaggagctggacctgagaatcggcgccgccttcaccagattccagaccctgagactgcagagaatcttccccgaggtgctggccgagcagctgatcagctacggcagctgccagttccccaccctgggcttcgtggtggagagattcaaggccatccaggccttcgtgcccgagatcttccacagaatcaaggtgacccacgaccacaaggacggcatcgtggagttcaactggaagagacacagactgttcaaccacaccgcctgcctggtgctgtaccagctgtgcgtggaggaccccatggccaccgtggtggaggtgagaagcaagcccaagagcaagtggagaccccaggccctggacaccgtggagctggagaagctggccagcagaaagctgagaatcaacgccaaggagaccatgagaatcgccgagaagctgtacacccagggctacatcagctaccccagaaccgagaccaacatcttccccagagacctgaacctgaccgtgctggtggagcagcagacccccgaccccagatggggcgccttcgcccagagcatcctggagagaggcggccccacccccagaaacggcaacaagagcgaccaggcccacccccccatccaccccaccaagtacaccaacaacctgcagggcgacgagcagagactgtacgagttcatcgtgagacacttcctggcctgctgcagccaggacgcccagggccaggagaccaccgtggagatcgacatcgcccaggagagattcgtggcccacggcctgatgatcctggccagaaactacctggacgtgtacccctacgaccactggagcgacaagatcctgcccgtgtacgagcagggcagccacttccagcccagcaccgtggagatggtggacggcgagaccagcccccccaagctgctgaccgaggccgacctgatcgccctgatggagaagcacggcatcggcaccgacgccacccacgccgagcacatcgagaccatcaaggccagaatgtacgtgggcctgacccccgacaagagattcctgcccggccacctgggcatgggcctggtggagggctacgacagcatgggctacgagatgagcaagcccgacctgagagccgagctggaggccgacctgaagctgatctgcgacggcaagaaggacaagttcgtggtgctgagacagcaggtgcagaagtacaagcaggtgttcatcgaggccgtggccaaggccaagaagctggacgaggccctggcccagtacttcggcaacggcaccgagctggcccagcaggaggacatctaccccgccatgcccgagcccatcagaaagtgcccccagtgcaacaaggacatggtgctgaagaccaagaagaacggcggcttctacctgagctgcatgggcttccccgagtgcagaagcgccgtgtggctgcccgacagcgtgctggaggccagcagagacagcagcgtgtgccccgtgtgccagccccaccccgtgtacagactgaagctgaagttcaagagaggcagcctgccccccaccatgcccctggagttcgtgtgctgcatcggcggctgcgacgacaccctgagagagatcctggacctgagattcagcggcggcccccccagagccagccagcccagcggcagactgcaggccaaccagagcctgaacagaatggacaacagccagcacccccagcccgccgacagcagacagaccggcagcagcaaggccctggcccagaccctgcccccccccaccgccgccggcgagagcaacagcgtgacctgcaactgcggccaggaggccgtgctgctgaccgtgagaaaggagggccccaacagaggcagacagttcttcaagtgcaacggcggcagctgcaacttcttcctgtgggccgacagccccaaccccggcgccggcggcccccccgccctggcctacagacccctgggcgccagcctgggctgcccccccggccccggcatccacctgggcggcttcggcaaccccggcgacggcagcggcagcggcaccagctgcctgtgcagccagcccagcgtgaccagaaccgtgcagaaggacggccccaacaagggcagacagttccacacctgcgccaagcccagagagcagcagtgcggcttcttccagtgggtggacgagaacaccgcccccggcaccagcggcgcccccagctggaccggcgacagaggcagaaccctggagagcgaggccagaagcaagagacccagagccagcagcagcgacatgggcagcaccgccaagaagcccagaaagtgcagcctgtgccaccagcccggccacaccagacccttctgcccccagaacagatag

SEQ ID NO: 13240 - DNA, 1170 bp, synthetic construct
  misc_feature 1..1170: note = Description of Artificial Sequence: Synthetic coding sequence
  source 1..1170: mol_type = other DNA
tgaagcagagccgccatggagatggccctgagaggcgtgagaaaggtgctgtgcgtggccgagaagaacgacgccgccaagggcatcgccgacctgctgagcaacggcagaatgagaagaagagagggcctgagcaagttcaacaagatctacgagttcgactaccacctgtacggccagaacgtgaccatggtgatgaccagcgtgagcggccacctgctggcccacgacttccagatgcagttcagaaagtggcagagctgcaaccccctggtgctgttcgaggccgagatcgagaagtactgccccgagaacttcgtggacatcaagaagaccctggagagagagaccagacagtgccaggccctggtgatctggaccgactgcgacagagagggcgagaacatcggcttcgagatcatccacgtgtgcaaggccgtgaagcccaacctgcaggtgctgagagccagattcagcgagatcaccccccacgccgtgagaaccgcctgcgagaacctgaccgagcccgaccagagagtgagcgacgccgtggacgtgagacaggagctggacctgagaatcggcgccgccttcaccagattccagaccctgagactgcagagaatcttccccgaggtgctggccgagcagctgatcagctacggcagctgccagttccccaccctgggcttcgtggtggagagattcaaggccatccaggccttcgtgcccgagatcttccacagaatcaaggtgacccacgaccacaaggacggcatcgtggagttcaactggaagagacacagactgttcaaccacaccgcctgcctggtgctgtaccagctgtgcgtggaggaccccatggccaccgtggtggaggtgagaagcaagcccaagagcaagtggagaccccaggccctggacaccgtggagctggagaagctggccagcagaaagctgagaatcaacgccaaggagaccatgagaatcgccgagaagctgtacacccagggctacatcagctaccccagaaccgagaccaacatcttccccagagacctgaacctgaccgtgctggtggagcagcagacccccgaccccagatggggcgccttcgcccagagcatcctggagagaggcggccccacccccagaaacggcaacaagtag

SEQ ID NO: 13241 - DNA, 1596 bp, synthetic construct
  misc_feature 1..1596: note = Description of Artificial Sequence: Synthetic coding sequence
  source 1..1596: mol_type = other DNA
atgatcctggccagaaactacctggacgtgtacccctacgaccactggagcgacaagatcctgcccgtgtacgagcagggcagccacttccagcccagcaccgtggagatggtggacggcgagaccagcccccccaagctgctgaccgaggccgacctgatcgccctgatggagaagcacggcatcggcaccgacgccacccacgccgagcacatcgagaccatcaaggccagaatgtacgtgggcctgacccccgacaagagattcctgcccggccacctgggcatgggcctggtggagggctacgacagcatgggctacgagatgagcaagcccgacctgagagccgagctggaggccgacctgaagctgatctgcgacggcaagaaggacaagttcgtggtgctgagacagcaggtgcagaagtacaagcaggtgttcatcgaggccgtggccaaggccaagaagctggacgaggccctggcccagtacttcggcaacggcaccgagctggcccagcaggaggacatctaccccgccatgcccgagcccatcagaaagtgcccccagtgcaacaaggacatggtgctgaagaccaagaagaacggcggcttctacctgagctgcatgggcttccccgagtgcagaagcgccgtgtggctgcccgacagcgtgctggaggccagcagagacagcagcgtgtgccccgtgtgccagccccaccccgtgtacagactgaagctgaagttcaagagaggcagcctgccccccaccatgcccctggagttcgtgtgctgcatcggcggctgcgacgacaccctgagagagatcctggacctgagattcagcggcggcccccccagagccagccagcccagcggcagactgcaggccaaccagagcctgaacagaatggacaacagccagcacccccagcccgccgacagcagacagaccggcagcagcaaggccctggcccagaccctgcccccccccaccgccgccggcgagagcaacagcgtgacctgcaactgcggccaggaggccgtgctgctgaccgtgagaaaggagggccccaacagaggcagacagttcttcaagtgcaacggcggcagctgcaacttcttcctgtgggccgacagccccaaccccggcgccggcggcccccccgccctggcctacagacccctgggcgccagcctgggctgcccccccggccccggcatccacctgggcggcttcggcaaccccggcgacggcagcggcagcggcaccagctgcctgtgcagccagcccagcgtgaccagaaccgtgcagaaggacggccccaacaagggcagacagttccacacctgcgccaagcccagagagcagcagtgcggcttcttccagtgggtggacgagaacaccgcccccggcaccagcggcgcccccagctggaccggcgacagaggcagaaccctggagagcgaggccagaagcaagagacccagagccagcagcagcgacatgggcagcaccgccaagaagcccagaaagtgcagcctgtgccaccagcccggccacaccagacccttctgcccccagaacagatag

SEQ ID NO: 13242 - DNA, 2721 bp, synthetic construct
  misc_feature 1..2721: note = Description of Artificial Sequence: Synthetic coding sequence
  source 1..2721: mol_type = other DNA
atgaacctgatcatcatctgcatggccagacagagctgcaaccccctggtgctgttcgaggccgagatcgagaagtactgccccgagaacttcgtggacatcaagaagaccctggagagagagaccagacagtgccaggccctggtgatctggaccgactgcgacagagagggcgagaacatcggcttcgagatcatccacgtgtgcaaggccgtgaagcccaacctgcaggtgctgagagccagattcagcgagatcaccccccacgccgtgagaaccgcctgcgagaacctgaccgagcccgaccagagagtgagcgacgccgtggacgtgagacaggagctggacctgagaatcggcgccgccttcaccagattccagaccctgagactgcagagaatcttccccgaggtgctggccgagcagctgatcagctacggcagctgccagttccccaccctgggcttcgtggtggagagattcaaggccatccaggccttcgtgcccgagatcttccacagaatcaaggtgacccacgaccacaaggacggcatcgtggagttcaactggaagagacacagactgttcaaccacaccgcctgcctggtgctgtaccagctgtgcgtggaggaccccatggccaccgtggtggaggtgagaagcaagcccaagagcaagtggagaccccaggccctggacaccgtggagctggagaagctggccagcagaaagctgagaatcaacgccaaggagaccatgagaatcgccgagaagctgtacacccagggctacatcagctaccccagaaccgagaccaacatcttccccagagacctgaacctgaccgtgctggtggagcagcagacccccgaccccagatggggcgccttcgcccagagcatcctggagagaggcggccccacccccagaaacggcaacaagagcgaccaggcccacccccccatccaccccaccaagtacaccaacaacctgcagggcgacgagcagagactgtacgagttcatcgtgagacacttcctggcctgctgcagccaggacgcccagggccaggagaccaccgtggagatcgacatcgcccaggagagattcgtggcccacggcctgatgatcctggccagaaactacctggacgtgtacccctacgaccactggagcgacaagatcctgcccgtgtacgagcagggcagccacttccagcccagcaccgtggagatggtggacggcgagaccagcccccccaagctgctgaccgaggccgacctgatcgccctgatggagaagcacggcatcggcaccgacgccacccacgccgagcacatcgagaccatcaaggccagaatgtacgtgggcctgacccccgacaagagattcctgcccggccacctgggcatgggcctggtggagggctacgacagcatgggctacgagatgagcaagcccgacctgagagccgagctggaggccgacctgaagctgatctgcgacggcaagaaggacaagttcgtggtgctgagacagcaggtgcagaagtacaagcaggtgttcatcgaggccgtggccaaggccaagaagctggacgaggccctggcccagtacttcggcaacggcaccgagctggcccagcaggaggacatctaccccgccatgcccgagcccatcagaaagtgcccccagtgcaacaaggacatggtgctgaagaccaagaagaacggcggcttctacctgagctgcatgggcttccccgagtgcagaagcgccgtgtggctgcccgacagcgtgctggaggccagcagagacagcagcgtgtgccccgtgtgccagccccaccccgtgtacagactgaagctgaagttcaagagaggcagcctgccccccaccatgcccctggagttcgtgtgctgcatcggcggctgcgacgacaccctgagagagatcctggacctgagattcagcggcggcccccccagagccagccagcccagcggcagactgcaggccaaccagagcctgaacagaatggacaacagccagcacccccagcccgccgacagcagacagaccggcagcagcaaggccctggcccagaccctgcccccccccaccgccgccggcgagagcaacagcgtgacctgcaactgcggccaggaggccgtgctgctgaccgtgagaaaggagggccccaacagaggcagacagttcttcaagtgcaacggcggcagctgcaacttcttcctgtgggccgacagccccaaccccggcgccggcggcccccccgccctggcctacagacccctgggcgccagcctgggctgcccccccggccccggcatccacctgggcggcttcggcaaccccggcgacggcagcggcagcggcaccagctgcctgtgcagccagcccagcgtgaccagaaccgtgcagaaggacggccccaacaagggcagacagttccacacctgcgccaagcccagagagcagcagtgcggcttcttccagtgggtggacgagaacaccgcccccggcaccagcggcgcccccagctggaccggcgacagaggcagaaccctggagagcgaggccagaagcaagagacccagagccagcagcagcgacatgggcagcaccgccaagaagcccagaaagtgcagcctgtgccaccagcccggccacaccagacccttctgcccccagaacagatag

SEQ ID NO: 13243 - DNA, 2589 bp, synthetic construct
  misc_feature 1..2589: note = Description of Artificial Sequence: Synthetic coding sequence
  source 1..2589: mol_type = other DNA
atgaagaccgtgctgatggtggccgagaagcccagcctggcccagagcatcgccaagatcctgagcagaggcagcctgagcagccacaagggcctgaacggcgcctgcagcgtgcacgagtacaccggcaccttcgccggccagcccgtgagattcaagatgaccagcgtgtgcggccacgtgatgaccctggacttcctgggcaagtacaacaagtgggacaaggtggaccccgccgagctgttcagccaggcccccaccgagaagaaggaggccaaccccaagctgaacatggtgaagttcctgcaggtggagggcagaggctgcgactacatcgtgctgtggctggactgcgacaaggagggcgagaacatctgcttcgaggtgctggacgccgtgctgcccgtgatgaacaaggcccacggcggcgagaagaccgtgttcagagccagattcagcagcatcaccgacaccgacatctgcaacgccatggcctgcctgggcgagcccgaccacaacgaggccctgagcgtggacgccagacaggagctggacctgagaatcggctgcgccttcaccagattccagaccaagtacttccagggcaagtacggcgacctggacagcagcctgatcagcttcggcccctgccagacccccaccctgggcttctgcgtggagagacacgacaagatccagagcttcaagcccgagacctactgggtgctgcaggccaaggtgaacaccgacaaggacagaagcctgctgctggactgggacagagtgagagtgttcgacagagagatcgcccagatgttcctgaacatgaccaagctggagaaggaggcccaggtggaggccaccagcagaaaggagaaggccaagcagagacccctggccctgaacaccgtggagatgctgagagtggccagcagcagcctgggcatgggcccccagcacgccatgcagaccgccgagagactgtacacccagggctacatcagctaccccagaaccgagaccacccactaccccgagaacttcgacctgaagggcagcctgagacagcaggccaaccacccctactgggccgacaccgtgaagagactgctggccgagggcatcaacagacccagaaagggccacgacgccggcgaccacccccccatcacccccatgaagagcgccaccgaggccgagctgggcggcgacgcctggagactgtacgagtacatcaccagacacttcatcgccaccgtgagccacgactgcaagtacctgcagagcaccatcagcttcagaatcggccccgagctgttcacctgcagcggcaagaccgtgctgagccccggcttcaccgaggtgatgccctggcagagcgtgcccctggaggagagcctgcccacctgccagagaggcgacgccttccccgtgggcgaggtgaagatgctggagaagcagaccaacccccccgactacctgaccgaggccgagctgatcaccctgatggagaagcacggcatcggcaccgacgccagcatccccgtgcacatcaacaacatctgccagagaaactacgtgaccgtggagagcggcagaagactgaagcccaccaacctgggcatcgtgctggtgcacggctactacaagatcgacgccgagctggtgctgcccaccatcagaagcgccgtggagaagcagctgaacctgatcgcccagggcaaggccgactacagacaggtgctgggccacaccctggacgtgttcaagagaaagttccactacttcgtggacagcatcgccggcatggacgagctgatggaggtgagcttcagccccctggccgccaccggcaagcccctgagcagatgcggcaagtgccacagattcatgaagtacatccaggccaagcccagcagactgcactgcagccactgcgacgagacctacaccctgccccagaacggcaccatcaagctgtacaaggagctgagatgccccctggacgacttcgagctggtgctgtggagcagcggcagcagaggcaagagctaccccctgtgcccctactgctacaaccacccccccttcagagacatgaagaagggcatgggctgcaacgagtgcacccaccccagctgccagcacagcctgagcatgctgggcatcggccagtgcgtggagtgcgagagcggcgtgctggtgctggaccccaccagcggccccaagtggaaggtggcctgcaacaagtgcaacgtggtggcccactgcttcgagaacgcccacagagtgagagtgagcgccgacacctgcagcgtgtgcgaggccgccctgctggacgtggacttcaacaaggccaagagccccctgcccggcgacgagacccagcacatgggctgcgtgttctgcgaccccgtgttccaggagctggtggagctgaagcacgccgccagctgccaccccatgcacagaggcggccccggcagaagacagggcagaggcagaggcagagccagaagaccccccggcaagcccaaccccagaagacccaaggacaagatgagcgccctggccgcctacttcgtgtag

SEQ ID NO: 13244 - DNA, 2589 bp, synthetic construct; identical to SEQ ID NO: 13243
  misc_feature 1..2589: note = Description of Artificial Sequence: Synthetic coding sequence
  source 1..2589: mol_type = other DNA

SEQ ID NO: 13245 - DNA, 849 bp, synthetic construct
  misc_feature 1..849: note = Description of Artificial Sequence: Synthetic coding sequence
  source 1..849: mol_type = other DNA
atgttcctgaacatgaccaagctggagaaggaggcccaggtggaggccaccagcagaaaggagaaggccaagcagagacccctggccctgaacaccgtggagatgctgagagtggccagcagcagcctgggcatgggcccccagcacgccatgcagaccgccgagagactgtacacccagggctacatcagctaccccagaaccgagaccacccactaccccgagaacttcgacctgaagggcagcctgagacagcaggccaaccacccctactgggccgacaccgtgaagagactgctggccgagggcatcaacagacccagaaagggccacgacgccggcgaccacccccccatcacccccatgaagagcgccaccgaggccgagctgggcggcgacgcctggagactgtacgagtacatcaccagacacttcatcgccaccgtgagccacgactgcaagtacctgcagagcaccatcagcttcagaatcggccccgagctgttcacctgcagcggcaagaccgtgctgagccccggcttcaccgaggtgatgccctggcagagcgtgcccctggaggagagcctgcccacctgccagagaggcgacgccttccccgtgggcgaggtgaagatgctggagaagcagaccaacccccccgactacctgaccgaggccgagctgatcaccctgatggagaagcacggcatcggcggctgcgcctgccccggccccagagccggcagcgtgagcagcacccaggccagcagcctgctgaccaagctgcccagacagccctgcgtgcccagccccgcccccctgcacggcctggtgagcggcaactggtag

SEQ ID NO: 13246 - DNA, 741 bp, synthetic construct
  misc_feature 1..741: note = Description of Artificial Sequence: Synthetic coding sequence
  source 1..741: mol_type = other DNA
atgaagaccgtgctgatggtggccgagaagcccagcctggcccagagcatcgccaagatcctgagcagaggcagcctgagcagccacaagggcctgaacggcgcctgcagcgtgcacgagtacaccggcaccttcgccggccagcccgtgagattcaagatgaccagcgtgtgcggccacgtgatgaccctggacttcctgggcaagtacaacaagtgggacaaggtggaccccgccgagctgttcagccaggcccccaccgagaagaaggaggccaaccccaagctgaacatggtgaagttcctgcaggtggagggcagaggctgcgactacatcgtgctgtggctggactgcgacaaggagggcgagaacatctgcttcgaggtgctggacgccgtgctgcccgtgatgaacaaggcccacggcggcgagaagaccgtgttcagagccagattcagcagcatcaccgacaccgacatctgcaacgccatggcctgcctgggcgagcccgaccacaacgaggccctgagcgtggacgccagacaggagctggacctgagaatcggctgcgccttcaccagattccagaccaagtacttccagggcaagtacggcgacctggacagcagcctgatcagcttcggcccctgccagacccccaccctgggcttctgcgtggagagacacgacaagatccagagcttcaagcccgagacctactgggtgctgcaggccaagtag

SEQ ID NO: 13247 - DNA, 366 bp, synthetic construct
  misc_feature 1..366: note = Description of Artificial Sequence: Synthetic coding sequence
  source 1..366: mol_type = other DNA
atgaagaccgtgctgatggtggccgagaagcccagcctggcccagagcatcgccaagatcctgagcagaggcagcctgagcagccacaagggcctgaacggcgcctgcagcgtgcacgagtacaccggcaccttcgccggccagcccgtgagattcaagatgaccagcgtgtgcggccacgtgatgaccctggacttcctgggcaagtacaacaagtgggacaaggtggaccccgccgagctgttcagccaggcccccaccgagaagaaggaggccaaccccaagctgaacatggtgaagttcctgcaggtggagggcagaggctgcgactacatcgtgctgtggctggactgcgacaaggagtag

SEQ ID NO: 13248 - DNA, 66 bp, synthetic construct
  misc_feature 1..66: note = Description of Artificial Sequence: Synthetic coding sequence
  source 1..66: mol_type = other DNA
atgaagaccgtgctgatggtggccgagaagcccagcctggcccagagcatcgccaagatcctgtag

SEQ ID NO: 13249 - DNA, 129 bp, synthetic construct
  misc_feature 1..129: note = Description of Artificial Sequence: Synthetic coding sequence
  source 1..129: mol_type = other DNA
atgaagaccgtgctgatggtggccgagaagcccagcctggcccagagcatcgccaagatcctgagcagaggcagcctgagcagccacaagggcctgaacggcgcctgcagcgtgcacgagtacacctag

SEQ ID NO: 13250 - DNA, 369 bp, synthetic construct
  misc_feature 1..369: note = Description of Artificial Sequence: Synthetic coding sequence
  source 1..369: mol_type = other DNA
atgaagaccgtgctgatggtggccgagaagcccagcctggcccagagcatcgccaagatcctgagcagaggcagcctgagcagccacaagggcctgaacggcgcctgcagcgtgcacgagtacaccggcaccttcgccggccagcccgtgagattcaagatgaccagcgtgtgcggccacgtgatgaccctggacttcctgggcaagtacaacaagtgggacaaggtggaccccgccgagctgttcagccaggcccccaccgagaagaaggaggccaaccccaagctgaacatggtgaagttcctgcaggtggagggcagaggctgcgactacatcgtgctgtggctggactgcgacaaggagggctag

SEQ ID NO: 13251 - DNA, 144 bp, synthetic construct
  misc_feature 1..144: note = Description of Artificial Sequence: Synthetic coding sequence
  source 1..144: mol_type = other DNA
atgaagaccgtgctgatggtggccgagaagcccagcctggcccagagcatcgccaagatcctgagcagaggcagcctgagcagccacaagggcctgaacggcgcctgcagcgtgcacgagtacaccggcaccttcgccggctag

SEQ ID NO: 13252 - DNA, 399 bp, synthetic construct
  misc_feature 1..399: note = Description of Artificial Sequence: Synthetic coding sequence
  source 1..399: mol_type = other DNA
atgaagaccgtgctgatggtggccgagaagcccagcctggcccagagcatcgccaagatcctgagcagaggcagcctgagcagccacaagggcctgaacggcgcctgcagcgtgcacgagtacaccggcaccttcgccggccagcccgtgagattcaagatgaccagcgtgtgcggccacgtgatgaccctggacttcctgggcaagtacaacaagtgggacaaggtggaccccgccgagctgttcagccaggcccccaccgagaagaaggaggccaaccccaagctgccccaggccagcgtgtgcacccaggccgcccccggcgtgagaccccacccctgcccccccgccgccgccagagtggccgacagagtggtgccctgcggccccgtgacctag

SEQ ID NO: 13253 - DNA, 183 bp, synthetic construct
  misc_feature 1..183: note = Description of Artificial Sequence: Synthetic coding sequence
  source 1..183: mol_type = other DNA
atgaagaccgtgctgatggtggccgagaagcccagcctggcccagagcatcgccaagatcctgagcagaggcagcctgagcagccacaagggcctgaacggcgcctgcagcgtgcacgagtacaccggcaccttcgccggccagcccgtgagattcaagatgaccagcgtgtgcggccactag

SEQ ID NO: 13254 - DNA, 186 bp, synthetic construct
  misc_feature 1..186: note = Description of Artificial Sequence: Synthetic coding sequence
  source 1..186: mol_type = other DNA
atgaagaccgtgctgatggtggccgagaagcccagcctggcccagagcatcgccaagatcctgagcagaggcagcctgagcagccacaagggcctgaacggcgcctgcagcgtgcacgagtacaccggcaccttcgccggccagcccgtgagattcaagatgaccagcgtgtgcggccacgtgtag

SEQ ID NO: 13255 - DNA, 1578 bp, synthetic construct
  misc_feature 1..1578: note = Description of Artificial Sequence: Synthetic coding sequence
  source 1..1578: mol_type = other DNA
tgactggacagcagcctgatcagcttcggcccctgccagacccccaccctgggcttctgcgtggagagacacgacaagatccagagcttcaagcccgagacctactgggtgctgcaggccaaggtgaacaccgacaaggacagaagcctgctgctggactgggacagagtgagagtgttcgacagagagatcgcccagatgttcctgaacatgaccaagctggagaaggaggcccaggtggaggccaccagcagaaaggagaaggccaagcagagacccctggccctgaacaccgtggagatgctgagagtggccagcagcagcctgggcatgggcccccagcacgccatgcagaccgccgagagactgtacacccagggctacatcagctaccccagaaccgagaccacccactaccccgagaacttcgacctgaagggcagcctgagacagcaggccaaccacccctactgggccgacaccgtgaagagactgctggccgagggcatcaacagacccagaaagggccacgacgccggcgaccacccccccatcacccccatgaagagcgccaccgaggccgagctgggcggcgacgcctggagactgtacgagtacatcaccagacacttcatcgccaccgtgagccacgactgcaagtacctgcagagcaccatcagcttcagaatcggccccgagctgttcacctgcagcggcaagaccgtgctgagccccggcttcaccgaggtgatgccctggcagagcgtgcccctggaggagagcctgcccacctgccagagaggcgacgccttccccgtgggcgaggtgaagatgctggagaagcagaccaacccccccgactacctgaccgaggccgagctgatcaccctgatggagaagcacggcatcggcaccgacgccagcatccccgtgcacatcaacaacatctgccagagaaactacgtgaccgtggagagcggcagaagactgaagcccaccaacctgggcatcgtgctggtgcacggctactacaagatcgacgccgagctggtgctgcccaccatcagaagcgccgtggagaagcagctgaacctgatcgcccagggcaaggccgactacagacaggtgctgggccacaccctggacgtgttcaagagaaagttccactacttcgtggacagcatcgccggcatggacgagctgatggaggtgagcttcagccccctggccgccaccggcaagcccctgagcagatgcggcaagtgccacagattcatgaagtacatccaggccaagcccagcagactgcactgcagccactgcgacgagacctacaccctgccccagaacggcaccatcaagctgtacaaggagctgagatgccccctggacgacttcgagctggtgctgtggagcagcggcagcagaggcaagagctaccccctgtgcccctactgctacaaccacccccccttcagagacatgaagaagggcgagtgcagccacagcctgctgagcaccggcagctgcagcctgttcagcgtgcccacccccgccctgcaccaggccggcctgtag

SEQ ID NO: 13256 - DNA, 951 bp, synthetic construct
  misc_feature 1..951: note = Description of Artificial Sequence: Synthetic coding sequence
  source 1..951: mol_type = other DNA
atgagcgccgaggtggagaccagcgagggcgtggacgagagcgagaagaagaacagcggcgccctggagaaggagaaccagatgagaatggccgacctgagcgagctgctgaaggagggcaccaaggaggcccacgacagagccgagaacacccagttcgtgaaggacttcctgaagggcaacatcaagaaggagctgttcaagctggccaccaccgccctgtacttcacctacagcgccctggaggaggagatggagagaaacaaggaccaccccgccttcgcccccctgtacttccccatggagctgcacagaaaggaggccctgaccaaggacatggagtacttcttcggcgagaactgggaggagcaggtgcagtgccccaaggccgcccagaagtacgtggagagaatccactacatcggccagaacgagcccgagctgctggtggcccacgcctacaccagatacatgggcgacctgagcggcggccaggtgctgaagaaggtggcccagagagccctgaagctgcccagcaccggcgagggcacccagttctacctgttcgagaacgtggacaacgcccagcagttcaagcagctgtacagagccagaatgaacgccctggacctgaacatgaagaccaaggagagaatcgtggaggaggccaacaaggccttcgagtacaacatgcagatcttcaacgagctggaccaggccggcagcaccctggccagagagaccctggaggacggcttccccgtgcacgacggcaagggcgacatgagaaagtgccccttctacgccgccgagcaggacaagggcgccctggagggcagcagctgccccttcagaaccgccatggccgtgctgagaaagcccagcctgcagttcatcctggccgccggcgtggccctggccgccggcctgctggcctggtactacatgtag

SEQ ID NO: 13257 - DNA, 1716 bp, synthetic construct
  misc_feature 1..1716: note = Description of Artificial Sequence: Synthetic coding sequence
  source 1..1716: mol_type = other DNA
atgaagtgccagcccagaagcggcgccagaagaatcgaggagagactgcactacctgatcaccacctacctgaagttcggcaacaacaacaactacatgaacatggccgaggccaacaacgccttcttcgccgccagcgagaccttccacacccccagcctgggcgacgaggagttcgagatcccccccatcacccccccccccgagagcgaccccgccctgggcatgcccgacgtgctgctgcccttccaggccctgagcgaccccctgcccagccagggcagcgagttcaccccccagttccccccccagagcctggacctgcccagcatcaccatcagcagaaacctggtggagcaggacggcgtgctgcacagcagcggcctgcacatggaccagagccacacccaggtgagccagtacagacaggaccccagcctgatcatgagaagcatcgtgcacatgaccgacgccgccagaagcggcgtgatgccccccgcccagctgaccaccatcaaccagagccagctgagcgcccagctgggcctgaacctgggcggcgccagcatgccccacaccagccccagcccccccgccagcaagagcgccacccccagccccagcagcagcatcaacgaggaggacgccgacgaggccaacagagccatcggcgagaagagagccgcccccgacagcggcaagaagcccaagacccccaagaagaagaagaagaaggaccccaacgagccccagaagcccgtgagcgcctacgccctgttcttcagagacacccaggccgccatcaagggccagaaccccaacgccaccttcggcgaggtgagcaagatcgtggccagcatgtgggacagcctgggcgaggagcagaagcaggtgtacaagagaaagaccgaggccgccaagaaggagtacctgaaggccctggccgcctacagagccagcctggtgagcaaggccgccgccgagagcgccgaggcccagaccatcagaagcgtgcagcagaccctggccagcaccaacctgaccagcagcctgctgctgaacacccccctgagccagcacggcaccgtgagcgccagcccccagaccctgcagcagagcctgcccagaagcatcgcccccaagcccctgaccatgagactgcccatgaaccagatcgtgaccagcgtgaccatcgccgccaacatgcccagcaacatcggcgcccccctgatcagcagcatgggcaccaccatggtgggcagcgcccccagcacccaggtgagccccagcgtgcagacccagcagcaccagatgcagctgcagcagcagcagcagcagcagcagcagcagatgcagcagatgcagcagcagcagctgcagcagcaccagatgcaccagcagatccagcagcagatgcagcagcagcacttccagcaccacatgcagcagcacctgcagcagcagcagcagcacctgcagcagcagatcaaccagcagcagctgcagcagcagctgcagcagagactgcagctgcagcagctgcagcacatgcagcaccagagccagcccagccccagacagcacagccccgtggccagccagatcaccagccccatccccgccatcggcagcccccagcccgccagccagcagcaccagagccagatccagagccagacccagacccaggtgctgagccaggtgagcatcttctag

SEQ ID NO: 13258 - DNA, 5817 bp, synthetic construct
  misc_feature 1..5817: note = Description of Artificial Sequence: Synthetic coding sequence
  source 1..5817: mol_type = other DNA
atgcagagcttcagagagcagagcagctaccacggcaaccagcagagctacccccaggaggtgcacggcagcagcagactggaggagttcagccccagacaggcccagatgttccagaacttcggcggcaccggcggcagcagcggcagcagcggcagcggcagcggcggcggcagaagaggcgccgccgccgccgccgccgccatggccagcgagaccagcggccaccagggctaccagggcttcagaaaggaggccggcgacttctactacatggccggcaacaaggaccccgtgaccaccggcaccccccagcccccccagagaagacccagcggccccgtgcagagctacggccccccccagggcagcagcttcggcaaccagtacggcagcgagggccacgtgggccagttccaggcccagcacagcggcctgggcggcgtgagccactaccagcaggactacaccggccccttcagccccggcagcgcccagtaccagcagcaggccagcagccagcagcagcagcagcaggtgcagcagctgagacagcagctgtaccagagccaccagcccctgccccaggccaccggccagcccgccagcagcagcagccacctgcagcccatgcagagacccagcaccctgcccagcagcgccgccggctaccagctgagagtgggccagttcggccagcactaccagagcagcgccagcagcagcagcagcagcagcttccccagcccccagagattcagccagagcggccagagctacgacggcagctacaacgtgaacgccggcagccagtacgagggccacaacgtgggcagcaacgcccaggcctacggcacccagagcaactacagctaccagccccagagcatgaagaacttcgagcaggccaagatcccccagggcacccagcagggccagcagcagcagcagccccagcagcagcagcaccccagccagcacgtgatgcagtacaccaacgccgccaccaagctgcccctgcagagccaggtgggccagtacaaccagcccgaggtgcccgtgagaagccccatgcagttccaccagaacttcagccccatcagcaaccccagccccgccgccagcgtggtgcagagccccagctgcagcagcacccccagccccctgatgcagaccggcgagaacctgcagtgcggccagggcagcgtgcccatgggcagcagaaacagaatcctgcagctgatgccccagctgagccccacccccagcatgatgcccagccccaacagccacgccgccggcttcaagggcttcggcctggagggcgtgcccgagaagagactgaccgaccccggcctgagcagcctgagcgccctgagcacccaggtggccaacctgcccaacaccgtgcagcacatgctgctgagcgacgccctgaccccccagaagaagaccagcaagagacccagcagcagcaagaaggccgacagctgcaccaacagcgagggcagcagccagcccgaggagcagctgaagagccccatggccgagagcctggacggcggctgcagcagcagcagcgaggaccagggcgagagagtgagacagctgagcggccagagcaccagcagcgacaccacctacaagggcggcgccagcgagaaggccggcagcagccccgcccagggcgcccagaacgagccccccagactgaacgccagccccgccgccagagaggaggccaccagccccggcgccaaggacatgcccctgagcagcgacggcaaccccaaggtgaacgagaagaccgtgggcgtgatcgtgagcagagaggccatgaccggcagagtggagaagcccggcggccaggacaagggcagccaggaggacgaccccgccgccacccagagaccccccagcaacggcggcgccaaggagaccagccacgccagcctgccccagcccgagccccccggcggcggcggcagcaagggcaacaagaacggcgacaacaacagcaaccacaacggcgagggcaacggccagagcggccacagcgccgccggccccggcttcaccagcagaaccgagcccagcaagagccccggcagcctgagatacagctacaaggacagcttcggcagcgccgtgcccagaaacgtgagcggcttcccccagtaccccaccggccaggagaagggcgacttcaccggccacggcgagagaaagggcagaaacgagaagttccccagcctgctgcaggaggtgctgcagggctaccaccaccaccccgacagaagatacagcagaagcacccaggagcaccagggcatggccggcagcctggagggcaccaccagacccaacgtgctggtgagccagaccaacgagctggccagcagaggcctgctgaacaagagcatcggcagcctgctggagaacccccactggggcccctgggagagaaagagcagcagcaccgcccccgagatgaagcagatcaacctgaccgactaccccatccccagaaagttcgagatcgagccccagagcagcgcccacgagcccggcggcagcctgagcgagagaagaagcgtgatctgcgacatcagccccctgagacagatcgtgagagaccccggcgcccacagcctgggccacatgagcgccgacaccagaatcggcagaaacgacagactgaaccccaccctgagccagagcgtgatcctgcccggcggcctggtgagcatggagaccaagctgaagagccagagcggccagatcaaggaggaggacttcgagcagagcaagagccaggccagcttcaacaacaagaagagcggcgaccactgccacccccccagcatcaagcacgagagctacagaggcaacgccagccccggcgccgccacccacgacagcctgagcgactacggcccccaggacagcagacccacccccatgagaagagtgcccggcagagtgggcggcagagagggcatgagaggcagaagccccagccagtaccacgacttcgccgagaagctgaagatgagccccggcagaagcagaggccccggcggcgacccccaccacatgaacccccacatgaccttcagcgagagagccaacagaagcagcctgcacacccccttcagccccaacagcgagaccctggccagcgcctaccacgccaacaccagagcccacgcctacggcgaccccaacgccggcctgaacagccagctgcactacaagagacagatgtaccagcagcagcccgaggagtacaaggactggagcagcggcagcgcccagggcgtgatcgccgccgcccagcacagacaggagggccccagaaagagccccagacagcagcagttcctggacagagtgagaagccccctgaagaacgacaaggacggcatgatgtacggcccccccgtgggcacctaccacgaccccagcgcccaggaggccggcagatgcctgatgagcagcgacggcctgcccaacaagggcatggagctgaagcacggcagccagaagctgcaggagagctgctgggacctgagcagacagaccagccccgccaagagcagcggcccccccggcatgagcagccagaagagatacggccccccccacgagaccgacggccacggcctggccgaggccacccagagcagcaagcccggcagcgtgatgctgagactgcccggccaggaggaccacagcagccagaaccccctgatcatgagaagaagagtgagaagcttcatcagccccatccccagcaagagacagagccaggacgtgaagaacagcagcaccgaggacaagggcagactgctgcacagcagcaaggagggcgccgacaaggccttcaacagctacgcccacctgagccacagccaggacatcaagagcatccccaagagagacagcagcaaggacctgcccagccccgacagcagaaactgccccgccgtgaccctgaccagccccgccaagaccaagatcctgccccccagaaagggcagaggcctgaagctggaggccatcgtgcagaagatcaccagccccaacatcagaagaagcgccagcagcaacagcgccgaggccggcggcgacaccgtgaccctggacgacatcctgagcctgaagagcggcccccccgagggcggcagcgtggccgtgcaggacgccgacatcgagaagagaaagggcgaggtggccagcgacctggtgagccccgccaaccaggagctgcacgtggagaagcccctgcccagaagcagcgaggagtggagaggcagcgtggacgacaaggtgaagaccgagacccacgccgagaccgtgaccgccggcaaggagccccccggcgccatgaccagcaccaccagccagaagcccggcagcaaccagggcagacccgacggcagcctgggcggcaccgcccccctgatcttccccgacagcaagaacgtgccccccgtgggcatcctggcccccgaggccaaccccaaggccgaggagaaggagaacgacaccgtgaccatcagccccaagcaggagggcttcccccccaagggctacttccccagcggcaagaagaagggcagacccatcggcagcgtgaacaagcagaagaagcagcagcagcccccccccccccccccccagcccccccagatccccgagggcagcgccgacggcgagcccaagcccaagaagcagagacagagaagagagagaagaaagcccggcgcccagcccagaaagagaaagaccaagcaggccgtgcccatcgtggagccccaggagcccgagatcaagctgaagtacgccacccagcccctggacaagaccgacgccaagaacaagagcttctacccctacatccacgtggtgaacaagtgcgagctgggcgccgtgtgcaccatcatcaacgccgaggaggaggagcagaccaagctggtgagaggcagaaagggccagagaagcctgacccccccccccagcagcaccgagagcaaggccctgcccgccagcagcttcatgctgcagggccccgtggtgaccgagagcagcgtgatgggccacctggtgtgctgcctgtgcggcaagtgggccagctacagaaacatgggcgacctgttcggccccttctacccccaggactacgccgccaccctgcccaagaaccccccccccaagagagccaccgagatgcagagcaaggtgaaggtgagacacaagagcgccagcaacggcagcaagaccgacaccgaggaggaggaggagcagcagcagcagcagaaggagcagagaagcctggccgcccaccccagattcaagagaagacacagaagcgaggactgcggcggcggccccagaagcctgagcagaggcctgccctgcaagaaggccgccaccgagggcagcagcgagaagaccgtgctggacagcaagcccagcgtgcccaccaccagcgagggcggccccgagctggagctgcagatccccgagctgcccctggacagcaacgagttctgggtgcacgagggctgcatcctgtgggccaacggcatctacctggtgtgcggcagactgtacggcctgcaggaggccctggagatcgccagagagatgaagtgcagccactgccaggaggccggcgccaccctgggctgctacaacaagggctgcagcttcagataccactacccctgcgccatcgacgccgactgcctgctgcacgaggagaacttcagcgtgagatgccccaagcacaaggtgagactgtggagatag

SEQ ID NO: 13259 - DNA, 5883 bp, synthetic construct
  misc_feature 1..5883: note = Description of Artificial Sequence: Synthetic coding sequence
  source 1..5883: mol_type = other DNA
atgcagagcttcagagagcagagcagctaccacggcaaccagcagagctacccccaggaggtgcacggcagcagcagactggaggagttcagccccagacaggcccagatgttccagaacttcggcggcaccggcggcagcagcggcagcagcggcagcggcagcggcggcggcagaagaggcgccgccgccgccgccgccgccatggccagcgagaccagcggccaccagggctaccagggcttcagaaaggaggccggcgacttctactacatggccggcaacaaggaccccgtgaccaccggcaccccccagcccccccagagaagacccagcggccccgtgcagagctacggccccccccagggcagcagcttcggcaaccagtacggcagcgagggccacgtgggccagttccaggcccagcacagcggcctgggcggcgtgagccactaccagcaggactacaccggccccttcagccccggcagcgcccagtaccagcagcaggccagcagccagcagcagcagcagcaggtgcagcagctgagacagcagctgtaccagagccaccagcccctgccccaggccaccggccagcccgccagcagcagcagccacctgcagcccatgcagagacccagcaccctgcccagcagcgccgccggctaccagctgagagtgggccagttcggccagcactaccagagcagcgccagcagcagcagcagcagcagcttccccagcccccagagattcagccagagcggccagagctacgacggcagctacaacgtgaacgccggcagccagtacgagggccacaacgtgggcagcaacgcccaggcctacggcacccagagcaactacagctaccagccccagagcatgaagaacttcgagcaggccaagatcccccagggcacccagcagggccagcagcagcagcagccccagcagcagcagcaccccagccagcacgtgatgcagtacaccaacgccgccaccaagctgcccctgcagagccaggtgggccagtacaaccagcccgaggtgcccgtgagaagccccatgcagttccaccagaacttcagccccatcagcaaccccagccccgccgccagcgtggtgcagagccccagctgcagcagcacccccagccccctgatgcagaccggcgagaacctgcagtgcggccagggcagcgtgcccatgggcagcagaaacagaatcctgcagctgatgccccagctgagccccacccccagcatgatgcccagccccaacagccacgccgccggcttcaagggcttcggcctggagggcgtgcccgagaagagactgaccgaccccggcctgagcagcctgagcgccctgagcacccaggtggccaacctgcccaacaccgtgcagcacatgctgctgagcgacgccctgaccccccagaagaagaccagcaagagacccagcagcagcaagaaggccgacagctgcaccaacagcgagggcagcagccagcccgaggagcagctgaagagccccatggccgagagcctggacggcggctgcagcagcagcagcgaggaccagggcgagagagtgagacagctgagcggccagagcaccagcagcgacaccacctacaagggcggcgccagcgagaaggccggcagcagccccgcccagggcgcccagaacgagccccccagactgaacgccagccccgccgccagagaggaggccaccagccccggcgccaaggacatgcccctgagcagcgacggcaaccccaaggtgaacgagaagaccgtgggcgtgatcgtgagcagagaggccatgaccggcagagtggagaagcccggcggccaggacaagggcagccaggaggacgaccccgccgccacccagagaccccccagcaacggcggcgccaaggagaccagccacgccagcctgccccagcccgagccccccggcggcggcggcagcaagggcaacaagaacggcgacaacaacagcaaccacaacggcgagggcaacggccagagcggccacagcgccgccggccccggcttcaccagcagaaccgagcccagcaagagccccggcagcctgagatacagctacaaggacagcttcggcagcgccgtgcccagaaacgtgagcggcttcccccagtaccccaccggccaggagaagggcgacttcaccggccacggcgagagaaagggcagaaacgagaagttccccagcctgctgcaggaggtgctgcagggctaccaccaccaccccgacagaagatacagcagaagcacccaggagcaccagggcatggccggcagcctggagggcaccaccagacccaacgtgctggtgagccagaccaacgagctggccagcagaggcctgctgaacaagagcatcggcagcctgctggagaacccccactggggcccctgggagagaaagagcagcagcaccgcccccgagatgaagcagatcaacctgaccgactaccccatccccagaaagttcgagatcgagccccagagcagcgcccacgagcccggcggcagcctgagcgagagaagaagcgtgatctgcgacatcagccccctgagacagatcgtgagagaccccggcgcccacagcctgggccacatgagcgccgacaccagaatcggcagaaacgacagactgaaccccaccctgagccagagcgtgatcctgcccggcggcctggtgagcatggagaccaagctgaagagccagagcggccagatcaaggaggaggacttcgagcagagcaagagccaggccagcttcaacaacaagaagagcggcgaccactgccacccccccagcatcaagcacgagagctacagaggcaacgccagccccggcgccgccacccacgacagcctgagcgactacggcccccaggacagcagacccacccccatgagaagagtgcccggcagagtgggcggcagagagggcatgagaggcagaagccccagccagtaccacgacttcgccgagaagctgaagatgagccccggcagaagcagaggccccggcggcgacccccaccacatgaacccccacatgaccttcagcgagagagccaacagaagcagcctgcacacccccttcagccccaacagcgagaccctggccagcgcctaccacgccaacaccagagcccacgcctacggcgaccccaacgccggcctgaacagccagctgcactacaagagacagatgtaccagcagcagcccgaggagtacaaggactggagcagcggcagcgcccagggcgtgatcgccgccgcccagcacagacaggagggccccagaaagagccccagacagcagcagttcctggacagagtgagaagccccctgaagaacgacaaggacggcatgatgtacggcccccccgtgggcacctaccacgaccccagcgcccaggaggccggcagatgcctgatgagcagcgacggcctgcccaacaagggcatggagctgaagcacggcagccagaagctgcaggagagctgctgggacctgagcagacagaccagccccgccaagagcagcggcccccccggcatgagcagccagaagagatacggccccccccacgagaccgacggccacggcctggccgaggccacccagagcagcaagcccggcagcgtgatgctgagactgcccggccaggaggaccacagcagccagaaccccctgatcatgagaagaagagtgagaagcttcatcagccccatccccagcaagagacagagccaggacgtgaagaacagcagcaccgaggacaagggcagactgctgcacagcagcaaggagggcgccgacaaggccttcaacagctacgcccacctgagccacagccaggacatcaagagcatccccaagagagacagcagcaaggacctgcccagccccgacagcagaaactgccccgccgtgaccctgaccagccccgccaagaccaagatcctgccccccagaaagggcagaggcctgaagctggaggccatcgtgcagaagatcaccagccccaacatcagaagaagcgccagcagcaacagcgccgaggccggcggcgacaccgtgaccctggacgacatcctgagcctgaagagcggcccccccgagggcggcagcgtggccgtgcaggacgccgacatcgagaagagaaagggcgaggtggccagcgacctggtgagccccgccaaccaggagctgcacgtggagaagcccctgcccagaagcagcgaggagtggagaggcagcgtggacgacaaggtgaagaccgagacccacgccgagaccgtgaccgccggcaaggagccccccggcgccatgaccagcaccaccagccagaagcccggcagcaaccagggcagacccgacggcagcctgggcggcaccgcccccctgatcttccccgacagcaagaacgtgccccccgtgggcatcctggcccccgaggccaaccccaaggccgaggagaaggagaacgacaccgtgaccatcagccccaagcaggagggcttcccccccaagggctacttccccagcggcaagaagaagggcagacccatcggcagcgtgaacaagcagaagaagcagcagcagcccccccccccccccccccagcccccccagatccccgagggcagcgccgacggcgagcccaagcccaagaagcagagacagagaagagagagaagaaagcccggcgcccagcccagaaagagaaagaccaagcaggccgtgcccatcgtggagccccaggagcccgagatcaagctgaagtacgccacccagcccctggacaagaccgacgccaagaacaagagcttctacccctacatccacgtggtgaacaagtgcgagctgggcgccgtgtgcaccatcatcaacgccgaggaggaggagcagaccaagctggtgagaggcagaaagggccagagaagcctgacccccccccccagcagcaccgagagcaaggccctgcccgccagcagcttcatgctgcagggccccgtggtgaccgagagcagcgtgatgggccacctggtgtgctgcctgtgcggcaagtgggccagctacagaaacatgggcgacctgttcggccccttctacccccaggactacgccgccaccctgcccaagaaccccccccccaagagagccaccgagatgcagagcaaggtgaaggtgagacacaagagcgccagcaacggcagcaagaccgacaccgaggaggaggaggagcagcagcagcagcagaaggagcagagaagcctggccgcccaccccagattcaagagaagacacagaagcgaggactgcggcggcggccccagaagcctgagcagaggcctgccctgcaagaaggccgccaccgagggcagcagcgagaagaccgtgctggacagcaagcccagcgtgcccaccaccagcgagggcggccccgagctggagctgcagatccccgagctgcccctggacagcaacgagttctgggtgcacgagggctgcatcctgtgggccaacggcatctacctggtgtgcggcagactgtacggcctgcaggaggccctggagatcgccagagagatgaagtgcagccactgccaggaggccggcgccaccctgggctgctacaacaagggctgcagcttcagataccactacccctgcgccatcgacgccgactgcctgctgcacgaggagaacttcagcgtgagatgccccaagcacaagccccccctgccctgccccctgccccccctgcagaacaagaccgccaagggcagcctgagcaccgagcagagcgagagaggctag

SEQ ID NO: 13260 - DNA, 540 bp, synthetic construct
  misc_feature 1..540: note = Description of Artificial Sequence: Synthetic coding sequence
  source 1..540: mol_type = other DNA
atgagcaccggcagcctgagcgacgtggaggacctgcaggaggtggagatgctggagtgcgacggcctgaagatggacagcaacaaggagttcgtgaccagcaacgagagcaccgaggagagcagcaactgcgagaacggcagcccccagaagggcagaggcggcctgggcaagagaagaaaggcccccaccaagaagagccccctgagcggcgtgagccaggagggcaagcaggtgcagagaaacgccgccaacgccagagagagagccagaatgagagtgctgagcaaggccttcagcagactgaagaccaccctgccctgggtgccccccgacaccaagctgagcaagctggacaccctgagactggccagcagctacatcgcccacctgagacagatcctggccaacgacaagtacgagaacggctacatccaccccgtgaacctgacctggcccttcatggtggccggcaagcccgagagcgacctgaaggaggtggtgaccgccagcagactgtgcggcaccaccgccagctag

SEQ ID NO: 13261 - DNA, 540 bp, synthetic construct; identical to SEQ ID NO: 13260
  misc_feature 1..540: note = Description of Artificial Sequence: Synthetic coding sequence
  source 1..540: mol_type = other DNA

SEQ ID NO: 13262 - DNA, 1965 bp, synthetic construct
  misc_feature 1..1965: note = Description of Artificial Sequence: Synthetic coding sequence
  source 1..1965: mol_type = other DNA
atgaaccagccccagagaatggcccccgtgggcaccgacaaggagctgagcgacctgctggacttcagcatgatgttccccctgcccgtgaccaacggcaagggcagacccgccagcctggccggcgcccagttcggcggcagcggcctggaggacagacccagcagcggcagctggggcagcggcgaccagagcagcagcagcttcgaccccagcagaaccttcagcgagggcacccacttcaccgagagccacagcagcctgagcagcagcaccttcctgggccccggcctgggcggcaagagcggcgagagaggcgcctacgccagcttcggcagagacgccggcgtgggcggcctgacccaggccggcttcctgagcggcgagctggccctgaacagccccggccccctgagccccagcggcatgaagggcaccagccagtactaccccagctacagcggcagcagcagaagaagagccgccgacggcagcctggacacccagcccaagaaggtgagaaaggtgccccccggcctgcccagcagcgtgtacccccccagcagcggcgaggactacggcagagacgccaccgcctaccccagcgccaagacccccagcagcacctaccccgcccccttctacgtggccgacggcagcctgcaccccagcgccgagctgtggagcccccccggccaggccggcttcggccccatgctgggcggcggcagcagccccctgcccctgccccccggcagcggccccgtgggcagcagcggcagcagcagcaccttcggcggcctgcaccagcacgagagaatgggctaccagctgcacggcgccgaggtgaacggcggcctgcccagcgccagcagcttcagcagcgcccccggcgccacctacggcggcgtgagcagccacaccccccccgtgagcggcgccgacagcctgctgggcagcagaggcaccaccgccggcagcagcggcgacgccctgggcaaggccctggccagcatctacagccccgaccacagcagcaacaacttcagcagcagccccagcacccccgtgggcagcccccagggcctggccggcaccagccagtggcccagagccggcgcccccggcgccctgagccccagctacgacggcggcctgcacggcctgcagagcaagatcgaggaccacctggacgaggccatccacgtgctgagaagccacgccgtgggcaccgccggcgacatgcacaccctgctgcccggccacggcgccctggccagcggcttcaccggccccatgagcctgggcggcagacacgccggcctggtgggcggcagccaccccgaggacggcctggccggcagcaccagcctgatgcacaaccacgccgccctgcccagccagcccggcaccctgcccgacctgagcagaccccccgacagctacagcggcctgggcagagccggcgccaccgccgccgccagcgagatcaagagagaggagaaggaggacgaggagaacaccagcgccgccgaccacagcgaggaggagaagaaggagctgaaggcccccagagccagaaccagccccgacgaggacgaggacgacctgctgccccccgagcagaaggccgagagagagaaggagagaagagtggccaacaacgccagagagagactgagagtgagagacatcaacgaggccttcaaggagctgggcagaatgtgccagctgcacctgaacagcgagaagccccagaccaagctgctgatcctgcaccaggccgtgagcgtgatcctgaacctggagcagcaggtgagagagagaaacctgaaccccaaggccgcctgcctgaagagaagagaggaggagaaggtgagcggcgtggtgggcgacccccagatggtgctgagcgccccccaccccggcctgagcgaggcccacaaccccgccggccacatgtag

SEQ ID NO: 13263 - DNA, 1956 bp, synthetic construct
  misc_feature 1..1956: note = Description of Artificial Sequence: Synthetic coding sequence
  source 1..1956: mol_type = other DNA
atgaaccagccccagagaatggcccccgtgggcaccgacaaggagctgagcgacctgctggacttcagcatgatgttccccctgcccgtgaccaacggcaagggcagacccgccagcctggccggcgcccagttcggcggcagcggcctggaggacagacccagcagcggcagctggggcagcggcgaccagagcagcagcagcttcgaccccagcagaaccttcagcgagggcacccacttcaccgagagccacagcagcctgagcagcagcaccttcctgggccccggcctgggcggcaagagcggcgagagaggcgcctacgccagcttcggcagagacgccggcgtgggcggcctgacccaggccggcttcctgagcggcgagctggccctgaacagccccggccccctgagccccagcggcatgaagggcaccagccagtactaccccagctacagcggcagcagcagaagaagagccgccgacggcagcctggacacccagcccaagaaggtgagaaaggtgccccccggcctgcccagcagcgtgtacccccccagcagcggcgaggactacggcagagacgccaccgcctaccccagcgccaagacccccagcagcacctaccccgcccccttctacgtggccgacggcagcctgcaccccagcgccgagctgtggagcccccccggccaggccggcttcggccccatgctgggcggcggcagcagccccctgcccctgccccccggcagcggccccgtgggcagcagcggcagcagcagcaccttcggcggcctgcaccagcacgagagaatgggctaccagctgcacggcgccgaggtgaacggcggcctgcccagcgccagcagcttcagcagcgcccccggcgccacctacggcggcgtgagcagccacaccccccccgtgagcggcgccgacagcctgctgggcagcagaggcaccaccgccggcagcagcggcgacgccctgggcaaggccctggccagcatctacagccccgaccacagcagcaacaacttcagcagcagccccagcacccccgtgggcagcccccagggcctggccggcaccagccagtggcccagagccggcgcccccggcgccctgagccccagctacgacggcggcctgcacggcctgcagagcaagatcgaggaccacctggacgaggccatccacgtgctgagaagccacgccgtgggcaccgccggcgacatgcacaccctgctgcccggccacggcgccctggccagcggcttcaccggccccatgagcctgggcggcagacacgccggcctggtgggcggcagccaccccgaggacggcctggccggcagcaccagcctgatgcacaaccacgccgccctgcccagccagcccggcaccctgcccgacctgagcagaccccccgacagctacagcggcctgggcagagccggcgccaccgccgccgccagcgagatcaagagagaggagaaggaggacgaggagaacaccagcgccgccgaccacagcgaggaggagaagaaggagctgaaggcccccagagccagaaccagcagcaccgacgaggtgctgagcctggaggagaaggacctgagagacagagagagaagaatggccaacaacgccagagagagagtgagagtgagagacatcaacgaggccttcagagagctgggcagaatgtgccagatgcacctgaagagcgacaaggcccagaccaagctgctgatcctgcagcaggccgtgcaggtgatcctgggcctggagcagcaggtgagagagagaaacctgaaccccaaggccgcctgcctgaagagaagagaggaggagaaggtgagcggcgtggtgggcgacccccagatggtgctgagcgccccccaccccggcctgagcgaggcccacaaccccgccggccacatgtag

SEQ ID NO: 13264 - DNA, 1977 bp, synthetic construct
  misc_feature 1..1977: note = Description of Artificial Sequence: Synthetic coding sequence
  source 1..1977: mol_type = other DNA
atgaaccagccccagagaatggcccccgtgggcaccgacaaggagctgagcgacctgctggacttcagcatgatgttccccctgcccgtgaccaacggcaagggcagacccgccagcctggccggcgcccagttcggcggcagcggcaagagcggcgagagaggcgcctacgccagcttcggcagagacgccggcgtgggcggcctgacccaggccggcttcctgagcggcgagctggccctgaacagccccggccccctgagccccagcggcatgaagggcaccagccagtactaccccagctacagcggcagcagcagaagaagagccgccgacggcagcctggacacccagcccaagaaggtgagaaaggtgccccccggcctgcccagcagcgtgtacccccccagcagcggcgaggactacggcagagacgccaccgcctaccccagcgccaagacccccagcagcacctaccccgcccccttctacgtggccgacggcagcctgcaccccagcgccgagctgtggagcccccccggccaggccggcttcggccccatgctgggcggcggcagcagccccctgcccctgccccccggcagcggccccgtgggcagcagcggcagcagcagcaccttcggcggcctgcaccagcacgagagaatgggctaccagctgcacggcgccgaggtgaacggcggcctgcccagcgccagcagcttcagcagcgcccccggcgccacctacggcggcgtgagcagccacaccccccccgtgagcggcgccgacagcctgctgggcagcagaggcaccaccgccggcagcagcggcgacgccctgggcaaggccctggccagcatctacagccccgaccacagcagcaacaacttcagcagcagccccagcacccccgtgggcagcccccagggcctggccggcaccagccagtggcccagagccggcgcccccggcgccctgagccccagctacgacggcggcctgcacggcctgcagagcaagatcgaggaccacctggacgaggccatccacgtgctgagaagccacgccgtgggcaccgccggcgacatgcacaccctgctgcccggccacggcgccctggccagcggcttcaccggccccatgagcctgggcggcagacacgccggcctggtgggcggcagccaccccgaggacggcctggccggcagcaccagcctgatgcacaaccacgccgccctgcccagccagcccggcaccctgcccgacctgagcagaccccccgacagctacagcggcctgggcagagccggcgccaccgccgccgccagcgagatcaagagagaggagaaggaggacgaggagaacaccagcgccgccgaccacagcgaggaggagaagaaggagctgaaggcccccagagccagaaccagatgccagcccacccccagacacagcccccccagcccccaccaggacgcccacgtgcacagaccccacgcccacagaacccacaccggcagacccagcgccggccccaccctgttcccccagccccactgcctgcccctggcccccagcagaagacccccccacagccccgacgaggacgaggacgacctgctgccccccgagcagaaggccgagagagagaaggagagaagagtggccaacaacgccagagagagactgagagtgagagacatcaacgaggccttcaaggagctgggcagaatgtgccagctgcacctgaacagcgagaagccccagaccaagctgctgatcctgcaccaggccgtgagcgtgatcctgaacctggagcagcaggtgagagagagaaacctgaaccccaaggccgcctgcctgaagagaagagaggaggagaaggtgagcggcgtggtgggcgacccccagatggtgctgagcgccccccaccccggcctgagcgaggcccacaaccccgccggccacatgtag

SEQ ID NO: 13265 - DNA, 1956 bp, synthetic construct; identical to SEQ ID NO: 13263
  misc_feature 1..1956: note = Description of Artificial Sequence: Synthetic coding sequence
  source 1..1956: mol_type = other DNA

SEQ ID NO: 13266 - DNA, 474 bp, synthetic construct
  misc_feature 1..474: note = Description of Artificial Sequence: Synthetic coding sequence
  source 1..474: mol_type = other DNA
atgggctaccagctgcacggcgccgaggtgaacggcggcctgcccagcgccagcagcttcagcagcgcccccggcgccacctacggcggcgtgagcagccacaccccccccgtgagcggcgccgacagcctgctgggcagcagaggcaccaccgccggcagcagcggcgacgccctgggcaaggccctggccagcatctacagccccgaccacagcagcaacaacttcagcagcagccccagcacccccgtgggcagcccccagggcctggccggcaccagccagtggcccagagccggcgcccccggcgccctgagccccagctacgacggcggcctgcacggcctggtgggcggcagccaccccgaggacggcctggccggcagcaccagcctgatgcacaaccacgccgccctgcccagccagcccggcaccctgcccgacctgagcagaccccccgacagctacagctag

SEQ ID NO: 13267 - DNA, 2016 bp, synthetic construct
  misc_feature 1..2016: note = Description of Artificial Sequence: Synthetic coding sequence
  source 1..2016: mol_type = other DNA
atgcaccaccagcagagaatggccgccctgggcaccgacaaggagctgagcgacctgctggacttcagcgccatgttcagcccccccgtgagcagcggcaagaacggccccaccagcctggccagcggccacttcaccggcagcaacgtggaggacagaagcagcagcggcagctggggcaacggcggccaccccagccccagcagaaactacggcgacggcaccccctacgaccacatgaccagcagagacctgggcagccacgacaacctgagcccccccttcgtgaacagcagaatccagagcaagaccgagagaggcagctacagcagctacggcagagagagcaacctgcagggctgccaccagcagagcctgctgggcggcgacatggacatgggcaaccccggcaccctgagccccaccaagcccggcagccagtactaccagtacagcagcaacaaccccagaagaagacccctgcacagcagcgccatggaggtgcagaccaagaaggtgagaaaggtgccccccggcctgcccagcagcgtgtacgcccccagcgccagcaccgccgactacaacagagacagccccggctaccccagcagcaagcccgccaccagcaccttccccagcagcttcttcatgcaggacggccaccacagcagcgacccctggagcagcagcagcggcatgaaccagcccggctacgccggcatgctgggcaacagcagccacatcccccagagcagcagctactgcagcctgcacccccacgagagactgagctaccccagccacagcagcgccgacatcaacagcagcctgccccccatgagcaccttccacagaagcggcaccaaccactacagcaccagcagctgcaccccccccgccaacggcaccgacagcatcatggccaacagaggcagcggcgccgccggcagcagccagaccggcgacgccctgggcaaggccctggccagcatctacagccccgaccacaccaacaacagcttcagcagcaaccccagcacccccgtgggcagcccccccagcctgagcgccggcaccgccgtgtggagcagaaacggcggccaggccagcagcagccccaactacgagggccccctgcacagcctgcagagcagaatcgaggacagactggagagactggacgacgccatccacgtgctgagaaaccacgccgtgggccccagcaccgccatgcccggcggccacggcgacatgcacggcatcatcggccccagccacaacggcgccatgggcggcctgggcagcggctacggcaccggcctgctgagcgccaacagacacagcctgatggtgggcacccacagagaggacggcgtggccctgagaggcagccacagcctgctgcccaaccaggtgcccgtgccccagctgcccgtgcagagcgccaccagccccgacctgaaccccccccaggacccctacagaggcatgccccccggcctgcagggccagagcgtgagcagcggcagcagcgagatcaagagcgacgacgagggcgacgagaacctgcaggacaccaagagcagcgaggacaagaagctggacgacgacaagaaggacatcaagagcatcaccagaagcagaagcagcaacaacgacgacgaggacctgacccccgagcagaaggccgagagagagaaggagagaagaatggccaacaacgccagagagagactgagagtgagagacatcaacgaggccttcaaggagctgggcagaatggtgcagctgcacctgaagagcgacaagccccagaccaagctgctgatcctgcaccaggccgtggccgtgatcctgagcctggagcagcaggtgagagagagaaacctgaaccccaaggccgcctgcctgaagagaagagaggaggagaaggtgagcagcgagcccccccccctgagcctggccggcccccaccccggcatgggcgacgccagcaaccacatgggccagatgtag

SEQ ID NO: 13268 - DNA, 2004 bp, synthetic construct
  misc_feature 1..2004: note = Description of Artificial Sequence: Synthetic coding sequence
  source 1..2004: mol_type = other DNA
atgcaccaccagcagagaatggccgccctgggcaccgacaaggagctgagcgacctgctggacttcagcgccatgttcagcccccccgtgagcagcggcaagaacggccccaccagcctggccagcggccacttcaccggcagcaacgtggaggacagaagcagcagcggcagctggggcaacggcggccaccccagccccagcagaaactacggcgacggcaccccctacgaccacatgaccagcagagacctgggcagccacgacaacctgagcccccccttcgtgaacagcagaatccagagcaagaccgagagaggcagctacagcagctacggcagagagagcaacctgcagggctgccaccagcagagcctgctgggcggcgacatggacatgggcaaccccggcaccctgagccccaccaagcccggcagccagtactaccagtacagcagcaacaaccccagaagaagacccctgcacagcagcgccatggaggtgcagaccaagaaggtgagaaaggtgccccccggcctgcccagcagcgtgtacgcccccagcgccagcaccgccgactacaacagagacagccccggctaccccagcagcaagcccgccaccagcaccttccccagcagcttcttcatgcaggacggccaccacagcagcgacccctggagcagcagcagcggcatgaaccagcccggctacgccggcatgctgggcaacagcagccacatcccccagagcagcagctactgcagcctgcacccccacgagagactgagctaccccagccacagcagcgccgacatcaacagcagcctgccccccatgagcaccttccacagaagcggcaccaaccactacagcaccagcagctgcaccccccccgccaacggcaccgacagcatcatggccaacagaggcagcggcgccgccggcagcagccagaccggcgacgccctgggcaaggccctggccagcatctacagccccgaccacaccaacaacagcttcagcagcaaccccagcacccccgtgggcagcccccccagcctgagcgccggcaccgccgtgtggagcagaaacggcggccaggccagcagcagccccaactacgagggccccctgcacagcctgcagagcagaatcgaggacagactggagagactggacgacgccatccacgtgctgagaaaccacgccgtgggccccagcaccgccatgcccggcggccacggcgacatgcacggcatcatcggccccagccacaacggcgccatgggcggcctgggcagcggctacggcaccggcctgctgagcgccaacagacacagcctgatggtgggcacccacagagaggacggcgtggccctgagaggcagccacagcctgctgcccaaccaggtgcccgtgccccagctgcccgtgcagagcgccaccagccccgacctgaaccccccccaggacccctacagaggcatgccccccggcctgcagggccagagcgtgagcagcggcagcagcgagatcaagagcgacgacgagggcgacgagaacctgcaggacaccaagagcagcgaggacaagaagctggacgacgacaagaaggacatcaagagcatcaccagcaacaacgacgacgaggacctgacccccgagcagaaggccgagagagagaaggagagaagaatggccaacaacgccagagagagactgagagtgagagacatcaacgaggccttcaaggagctgggcagaatggtgcagctgcacctgaagagcgacaagccccagaccaagctgctgatcctgcaccaggccgtggccgtgatcctgagcctggagcagcaggtgagagagagaaacctgaaccccaaggccgcctgcctgaagagaagagaggaggagaaggtgagcagcgagcccccccccctgagcctggccggcccccaccccggcatgggcgacgccagcaaccacatgggccagatgtag

SEQ ID NO: 13269 - DNA, 2322 bp, synthetic construct
  misc_feature 1..2322: note = Description of Artificial Sequence: Synthetic coding sequence
  source 1..2322: mol_type = other DNA
atgttcagcaagagactggagaagatcgcccaggtgcccctgctgttccccttcatcttcatcatcctgaccaactacagcaagatggagggcgccgtggagagccagcccagcttcttcaagaccagccaggacatcgtgacctgcacctgggtggagaactgctacagcagcttcagcagaagacccctggagcagatgttctgcaagcaccagagcaagaacatcatcagctggaccggcatggtggcccacacctgcaaccccagcaccctgggcggccagggcctgtgcgacttcgccaagatgcaccaccagcagagaatggccgccctgggcaccgacaaggagctgagcgacctgctggacttcagcgccatgttcagcccccccgtgagcagcggcaagaacggccccaccagcctggccagcggccacttcaccggcagcaacgtggaggacagaagcagcagcggcagctggggcaacggcggccaccccagccccagcagaaactacggcgacggcaccccctacgaccacatgaccagcagagacctgggcagccacgacaacctgagcccccccttcgtgaacagcagaatccagagcaagaccgagagaggcagctacagcagctacggcagagagagcaacctgcagggctgccaccagcagagcctgctgggcggcgacatggacatgggcaaccccggcaccctgagccccaccaagcccggcagccagtactaccagtacagcagcaacaaccccagaagaagacccctgcacagcagcgccatggaggtgcagaccaagaaggtgagaaaggtgccccccggcctgcccagcagcgtgtacgcccccagcgccagcaccgccgactacaacagagacagccccggctaccccagcagcaagcccgccaccagcaccttccccagcagcttcttcatgcaggacggccaccacagcagcgacccctggagcagcagcagcggcatgaaccagcccggctacgccggcatgctgggcaacagcagccacatcccccagagcagcagctactgcagcctgcacccccacgagagactgagctaccccagccacagcagcgccgacatcaacagcagcctgccccccatgagcaccttccacagaagcggcaccaaccactacagcaccagcagctgcaccccccccgccaacggcaccgacagcatcatggccaacagaggcagcggcgccgccggcagcagccagaccggcgacgccctgggcaaggccctggccagcatctacagccccgaccacaccaacaacagcttcagcagcaaccccagcacccccgtgggcagcccccccagcctgagcgccggcaccgccgtgtggagcagaaacggcggccaggccagcagcagccccaactacgagggccccctgcacagcctgcagagcagaatcgaggacagactggagagactggacgacgccatccacgtgctgagaaaccacgccgtgggccccagcaccgccatgcccggcggccacggcgacatgcacggcatcatcggccccagccacaacggcgccatgggcggcctgggcagcggctacggcaccggcctgctgagcgccaacagacacagcctgatggtgggcacccacagagaggacggcgtggccctgagaggcagccacagcctgctgcccaaccaggtgcccgtgccccagctgcccgtgcagagcgccaccagccccgacctgaaccccccccaggacccctacagaggcatgccccccggcctgcagggccagagcgtgagcagcggcagcagcgagatcaagagcgacgacgagggcgacgagaacctgcaggacaccaagagcagcgaggacaagaagctggacgacgacaagaaggacatcaagagcatcaccagaagcagaagcagcaacaacgacgacgaggacctgacccccgagcagaaggccgagagagagaaggagagaagaatggccaacaacgccagagagagactgagagtgagagacatcaacgaggccttcaaggagctgggcagaatggtgcagctgcacctgaagagcgacaagccccagaccaagctgctgatcctgcaccaggccgtggccgtgatcctgagcctggagcagcaggtgagagagagaaacctgaaccccaaggccgcctgcctgaagagaagagaggaggagaaggtgagcagcgagcccccccccctgagcctggccggcccccaccccggcatgggcgacgccagcaaccacatgggccagatgtag

SEQ ID NO: 13270 - DNA, 1536 bp, synthetic construct
  misc_feature 1..1536: note = Description of Artificial Sequence: Synthetic coding sequence
  source 1..1536: mol_type = other DNA
atgtactgcgcctacaccatccccggcatgggcggcaacagcctgatgtactactacaacggcaaggccgtgtacgcccccagcgccagcaccgccgactacaacagagacagccccggctaccccagcagcaagcccgccaccagcaccttccccagcagcttcttcatgcaggacggccaccacagcagcgacccctggagcagcagcagcggcatgaaccagcccggctacgccggcatgctgggcaacagcagccacatcccccagagcagcagctactgcagcctgcacccccacgagagactgagctaccccagccacagcagcgccgacatcaacagcagcctgccccccatgagcaccttccacagaagcggcaccaaccactacagcaccagcagctgcaccccccccgccaacggcaccgacagcatcatggccaacagaggcagcggcgccgccggcagcagccagaccggcgacgccctgggcaaggccctggccagcatctacagccccgaccacaccaacaacagcttcagcagcaaccccagcacccccgtgggcagcccccccagcctgagcgccggcaccgccgtgtggagcagaaacggcggccaggccagcagcagccccaactacgagggccccctgcacagcctgcagagcagaatcgaggacagactggagagactggacgacgccatccacgtgctgagaaaccacgccgtgggccccagcaccgccatgcccggcggccacggcgacatgcacggcatcatcggccccagccacaacggcgccatgggcggcctgggcagcggctacggcaccggcctgctgagcgccaacagacacagcctgatggtgggcacccacagagaggacggcgtggccctgagaggcagccacagcctgctgcccaaccaggtgcccgtgccccagctgcccgtgcagagcgccaccagccccgacctgaaccccccccaggacccctacagaggcatgccccccggcctgcagggccagagcgtgagcagcggcagcagcgagatcaagagcgacgacgagggcgacgagaacctgcaggacaccaagagcagcgaggacaagaagctggacgacgacaagaaggacatcaagagcatcaccagaagcagaagcagcaacaacgacgacgaggacctgacccccgagcagaaggccgagagagagaaggagagaagaatggccaacaacgccagagagagactgagagtgagagacatcaacgaggccttcaaggagctgggcagaatggtgcagctgcacctgaagagcgacaagccccagaccaagctgctgatcctgcaccaggccgtggccgtgatcctgagcctggagcagcaggtgagagagagaaacctgaaccccaaggccgcctgcctgaagagaagagaggaggagaaggtgagcagcgagcccccccccctgagcctggccggcccccaccccggcatgggcgacgccagcaaccacatgggccagatgtag

SEQ ID NO: 13271 - DNA, 1944 bp, synthetic construct
  misc_feature 1..1944: note = Description of Artificial Sequence: Synthetic coding sequence
  source 1..1944: mol_type = other DNA
atgttcagcccccccgtgagcagcggcaagaacggccccaccagcctggccagcggccacttcaccggcagcaacgtggaggacagaagcagcagcggcagctggggcaacggcggccaccccagccccagcagaaactacggcgacggcaccccctacgaccacatgaccagcagagacctgggcagccacgacaacctgagcccccccttcgtgaacagcagaatccagagcaagaccgagagaggcagctacagcagctacggcagagagagcaacctgcagggctgccaccagcagagcctgctgggcggcgacatggacatgggcaaccccggcaccctgagccccaccaagcccggcagccagtactaccagtacagcagcaacaaccccagaagaagacccctgcacagcagcgccatggaggtgcagaccaagaaggtgagaaaggtgccccccggcctgcccagcagcgtgtacgcccccagcgccagcaccgccgactacaacagagacagccccggctaccccagcagcaagcccgccaccagcaccttccccagcagcttcttcatgcaggacggccaccacagcagcgacccctggagcagcagcagcggcatgaaccagcccggctacgccggcatgctgggcaacagcagccacatcccccagagcagcagctactgcagcctgcacccccacgagagactgagctaccccagccacagcagcgccgacatcaacagcagcctgccccccatgagcaccttccacagaagcggcaccaaccactacagcaccagcagctgcaccccccccgccaacggcaccgacagcatcatggccaacagaggcagcggcgccgccggcagcagccagaccggcgacgccctgggcaaggccctggccagcatctacagccccgaccacaccaacaacagcttcagcagcaaccccagcacccccgtgggcagcccccccagcctgagcgccggcaccgccgtgtggagcagaaacggcggccaggccagcagcagccccaactacgagggccccctgcacagcctgcagagcagaatcgaggacagactggagagactggacgacgccatccacgtgctgagaaaccacgccgtgggccccagcaccgccatgcccggcggccacggcgacatgcacggcatcatcggccccagccacaacggcgccatgggcggcctgggcagcggctacggcaccggcctgctgagcgccaacagacacagcctgatggtgggcacccacagagaggacggcgtggccctgagaggcagccacagcctgctgcccaaccaggtgcccgtgccccagctgcccgtgcagagcgccaccagccccgacctgaaccccccccaggacccctacagaggcatgccccccggcctgcagggccagagcgtgagcagcggcagcagcgagatcaagagcgacgacgagggcgacgagaacctgcaggacaccaagagcagcgaggacaagaagctggacgacgacaagaaggacatcaagagcatcaccagaagcagaagcagcaacaacgacgacgaggacctgacccccgagcagaaggccgagagagagaaggagagaagaatggccaacaacgccagagagagactgagagtgagagacatcaacgaggccttcaaggagctgggcagaatggtgcagctgcacctgaagagcgacaagccccagaccaagctgctgatcctgcaccaggccgtggccgtgatcctgagcctggagcagcaggtgagagagagaaacctgaaccccaaggccgcctgcctgaagagaagagaggaggagaaggtgagcagcgagcccccccccctgagcctggccggcccccaccccggcatgggcgacgccagcaaccacatgggccagatgtag

SEQ ID NO: 13272 - DNA, 1614 bp, synthetic construct
  misc_feature 1..1614: note = Description of Artificial Sequence: Synthetic coding sequence
  source 1..1614: mol_type = other DNA
atggacatgggcaaccccggcaccctgagccccaccaagcccggcagccagtactaccagtacagcagcaacaaccccagaagaagacccctgcacagcagcgccatggaggtgcagaccaagaaggtgagaaaggtgccccccggcctgcccagcagcgtgtacgcccccagcgccagcaccgccgactacaacagagacagccccggctaccccagcagcaagcccgccaccagcaccttccccagcagcttcttcatgcaggacggccaccacagcagcgacccctggagcagcagcagcggcatgaaccagcccggctacgccggcatgctgggcaacagcagccacatcccccagagcagcagctactgcagcctgcacccccacgagagactgagctaccccagccacagcagcgccgacatcaacagcagcctgccccccatgagcaccttccacagaagcggcaccaaccactacagcaccagcagctgcaccccccccgccaacggcaccgacagcatcatggccaacagaggcagcggcgccgccggcagcagccagaccggcgacgccctgggcaaggccctggccagcatctacagccccgaccacaccaacaacagcttcagcagcaaccccagcacccccgtgggcagcccccccagcctgagcgccggcaccgccgtgtggagcagaaacggcggccaggccagcagcagccccaactacgagggccccctgcacagcctgcagagcagaatcgaggacagactggagagactggacgacgccatccacgtgctgagaaaccacgccgtgggccccagcaccgccatgcccggcggccacggcgacatgcacggcatcatcggccccagccacaacggcgccatgggcggcctgggcagcggctacggcaccggcctgctgagcgccaacagacacagcctgatggtgggcacccacagagaggacggcgtggccctgagaggcagccacagcctgctgcccaaccaggtgcccgtgccccagctgcccgtgcagagcgccaccagccccgacctgaaccccccccaggacccctacagaggcatgccccccggcctgcagggccagagcgtgagcagcggcagcagcgagatcaagagcgacgacgagggcgacgagaacctgcaggacaccaagagcagcgaggacaagaagctggacgacgacaagaaggacatcaagagcatcaccagcaacaacgacgacgaggacctgacccccgagcagaaggccgagagagagaaggagagaagaatggccaacaacgccagagagagactgagagtgagagacatcaacgaggccttcaaggagctgggcagaatggtgcagctgcacctgaagagcgacaagccccagaccaagctgctgatcctgcaccaggccgtggccgtgatcctgagcctggagcagcaggtgagagagagaaacctgaaccccaaggccgcctgcctgaagagaagagaggaggagaaggtgagcagcgagcccccccccctgagcctggccggcccccaccccggcatgggcgacgccagcaaccacatgggccagatgtag

SEQ ID NO: 13273 - DNA, 1932 bp, synthetic construct
  misc_feature 1..1932: note = Description of Artificial Sequence: Synthetic coding sequence
  source 1..1932: mol_type = other DNA
atgttcagcccccccgtgagcagcggcaagaacggccccaccagcctggccagcggccacttcaccggcagcaacgtggaggacagaagcagcagcggcagctggggcaacggcggccaccccagccccagcagaaactacggcgacggcaccccctacgaccacatgaccagcagagacctgggcagccacgacaacctgagcccccccttcgtgaacagcagaatccagagcaagaccgagagaggcagctacagcagctacggcagagagagcaacctgcagggctgccaccagcagagcctgctgggcggcgacatggacatgggcaaccccggcaccctgagccccaccaagcccggcagccagtactaccagtacagcagcaacaaccccagaagaagacccctgcacagcagcgccatggaggtgcagaccaagaaggtgagaaaggtgccccccggcctgcccagcagcgtgtacgcccccagcgccagcaccgccgactacaacagagacagccccggctaccccagcagcaagcccgccaccagcaccttccccagcagcttcttcatgcaggacggccaccacagcagcgacccctggagcagcagcagcggcatgaaccagcccggctacgccggcatgctgggcaacagcagccacatcccccagagcagcagctactgcagcctgcacccccacgagagactgagctaccccagccacagcagcgccgacatcaacagcagcctgccccccatgagcaccttccacagaagcggcaccaaccactacagcaccagcagctgcaccccccccgccaacggcaccgacagcatcatggccaacagaggcagcggcgccgccggcagcagccagaccggcgacgccctgggcaaggccctggccagcatctacagccccgaccacaccaacaacagcttcagcagcaaccccagcacccccgtgggcagcccccccagcctgagcgccggcaccgccgtgtggagcagaaacggcggccaggccagcagcagccccaactacgagggccccctgcacagcctgcagagcagaatcgaggacagactggagagactggacgacgccatccacgtgctgagaaaccacgccgtgggccccagcaccgccatgcccggcggccacggcgacatgcacggcatcatcggccccagccacaacggcgccatgggcggcctgggcagcggctacggcaccggcctgctgagcgccaacagacacagcctgatggtgggcacccacagagaggacggcgtggccctgagaggcagccacagcctgctgcccaaccaggtgcccgtgccccagctgcccgtgcagagcgccaccagccccgacctgaaccccccccaggacccctacagaggcatgccccccggcctgcagggccagagcgtgagcagcggcagcagcgagatcaagagcgacgacgagggcgacgagaacctgcaggacaccaagagcagcgaggacaagaagctggacgacgacaagaaggacatcaagagcatcaccagcaacaacgacgacgaggacctgacccccgagcagaaggccgagagagagaaggagagaagaatggccaacaacgccagagagagactgagagtgagagacatcaacgaggccttcaaggagctgggcagaatggtgcagctgcacctgaagagcgacaagccccagaccaagctgctgatcctgcaccaggccgtggccgtgatcctgagcctggagcagcaggtgagagagagaaacctgaaccccaaggccgcctgcctgaagagaagagaggaggagaaggtgagcagcgagcccccccccctgagcctggccggcccccaccccggcatgggcgacgccagcaaccacatgggccagatgtag

SEQ ID NO: 13274 - DNA, 1878 bp, synthetic construct
  misc_feature 1..1878: note = Description of Artificial Sequence: Synthetic coding sequence
  source 1..1878: mol_type = other DNA
atggaggaggacagcagagacgtggaggacagaagcagcagcggcagctggggcaacggcggccaccccagccccagcagaaactacggcgacggcaccccctacgaccacatgaccagcagagacctgggcagccacgacaacctgagcccccccttcgtgaacagcagaatccagagcaagaccgagagaggcagctacagcagctacggcagagagagcaacctgcagggctgccaccagcagagcctgctgggcggcgacatggacatgggcaaccccggcaccctgagccccaccaagcccggcagccagtactaccagtacagcagcaacaaccccagaagaagacccctgcacagcagcgccatggaggtgcagaccaagaaggtgagaaaggtgccccccggcctgcccagcagcgtgtacgcccccagcgccagcaccgccgactacaacagagacagccccggctaccccagcagcaagcccgccaccagcaccttccccagcagcttcttcatgcaggacggccaccacagcagcgacccctggagcagcagcagcggcatgaaccagcccggctacgccggcatgctgggcaacagcagccacatcccccagagcagcagctactgcagcctgcacccccacgagagactgagctaccccagccacagcagcgccgacatcaacagcagcctgccccccatgagcaccttccacagaagcggcaccaaccactacagcaccagcagctgcaccccccccgccaacggcaccgacagcatcatggccaacagaggcagcggcgccgccggcagcagccagaccggcgacgccctgggcaaggccctggccagcatctacagccccgaccacaccaacaacagcttcagcagcaaccccagcacccccgtgggcagcccccccagcctgagcgccggcaccgccgtgtggagcagaaacggcggccaggccagcagcagccccaactacgagggccccctgcacagcctgcagagcagaatcgaggacagactggagagactggacgacgccatccacgtgctgagaaaccacgccgtgggccccagcaccgccatgcccggcggccacggcgacatgcacggcatcatcggccccagccacaacggcgccatgggcggcctgggcagcggctacggcaccggcctgctgagcgccaacagacacagcctgatggtgggcacccacagagaggacggcgtggccctgagaggcagccacagcctgctgcccaaccaggtgcccgtgccccagctgcccgtgcagagcgccaccagccccgacctgaaccccccccaggacccctacagaggcatgccccccggcctgcagggccagagcgtgagcagcggcagcagcgagatcaagagcgacgacgagggcgacgagaacctgcaggacaccaagagcagcgaggacaagaagctggacgacgacaagaaggacatcaagagcatcaccagcaacaacgacgacgaggacctgacccccgagcagaaggccgagagagagaaggagagaagaatggccaacaacgccagagagagactgagagtgagagacatcaacgaggccttcaaggagctgggcagaatggtgcagctgcacctgaagagcgacaagccccagaccaagctgctgatcctgcaccaggccgtggccgtgatcctgagcctggagcagcaggtgagagagagaaacctgaaccccaaggccgcctgcctgaagagaagagaggaggagaaggtgagcagcgagcccccccccctgagcctggccggcccccaccccggcatgggcgacgccagcaaccacatgggccagatgtag

SEQ ID NO: 13275 - DNA, 1803 bp, synthetic construct
  misc_feature 1..1803: note = Description of Artificial Sequence: Synthetic coding sequence
  source 1..1803: mol_type = other DNA
atgaaggacatcttcttccagttcatcatcgccagagtgagaaagtgctacagcctgagctgcctgcacaccctgcccgtggtgcccaccctgagaaagaccgagagaggcagctacagcagctacggcagagagagcaacctgcagggctgccaccagagcctgctgggcggcgacatggacatgggcaaccccggcaccctgagccccaccaagcccggcagccagtactaccagtacagcagcaacaaccccagaagaagacccctgcacagcagcgccatggaggtgcagaccaagaaggtgagaaaggtgccccccggcctgcccagcagcgtgtacgcccccagcgccagcaccgccgactacaacagagacagccccggctaccccagcagcaagcccgccaccagcaccttccccagcagcttcttcatgcaggacggccaccacagcagcgacccctggagcagcagcagcggcatgaaccagcccggctacgccggcatgctgggcaacagcagccacatcccccagagcagcagctactgcagcctgcacccccacgagagactgagctaccccagccacagcagcgccgacatcaacagcagcctgccccccatgagcaccttccacagaagcggcaccaaccactacagcaccagcagctgcaccccccccgccaacggcaccgacagcatcatggccaacagaggcagcggcgccgccggcagcagccagaccggcgacgccctgggcaaggccctggccagcatctacagccccgaccacaccaacaacagcttcagcagcaaccccagcacccccgtgggcagcccccccagcctgagcgccggcaccgccgtgtggagcagaaacggcggccaggccagcagcagccccaactacgagggccccctgcacagcctgcagagcagaatcgaggacagactggagagactggacgacgccatccacgtgctgagaaaccacgccgtgggccccagcaccgccatgcccggcggccacggcgacatgcacggcatcatcggccccagccacaacggcgccatgggcggcctgggcagcggctacggcaccggcctgctgagcgccaacagacacagcctgatggtgggcacccacagagaggacggcgtggccctgagaggcagccacagcctgctgcccaaccaggtgcccgtgccccagctgcccgtgcagagcgccaccagccccgacctgaaccccccccaggacccctacagaggcatgccccccggcctgcagggccagagcgtgagcagcggcagcagcgagatcaagagcgacgacgagggcgacgagaacctgcaggacaccaagagcagcgaggacaagaagctggacgacgacaagaaggacatcaagagcatcaccagaagcagaagcagcaacaacgacgacgaggacctgacccccgagcagaaggccgagagagagaaggagagaagaatggccaacaacgccagagagagactgagagtgagagacatcaacgaggccttcaaggagctgggcagaatggtgcagctgcacctgaagagcgacaagccccagaccaagctgctgatcctgcaccaggccgtggccgtgatcctgagcctggagcagcaggtgagagagagaaacctgaaccccaaggccgcctgcctgaagagaagagaggaggagaaggtgagcagcgagcccccccccctgagcctggccggcccccaccccggcatgggcgacgccagcaaccacatgggccagatgtag

SEQ ID NO: 13276 - DNA, 1233 bp, synthetic construct
  misc_feature 1..1233: note = Description of Artificial Sequence: Synthetic coding sequence
  source 1..1233: mol_type = other DNA
atggccaaggacgccggcctgatcgaggccaacggcgagctgaaggtgttcatcgaccagaacctgagccccggcaagggcgtggtgagcctggtggccgtgcaccccagcaccgtgaaccccctgggcaagcagctgctgcccaagaccttcggccagagcaacgtgaacatcgcccagcaggtggtgatcggcaccccccagagacccgccgccagcaacaccctggtggtgggcagcccccacacccccagcacccacttcgccagccagaaccagcccagcgacagcagcccctggagcgccggcaagagaaacagaaagggcgagaagaacggcaagggcctgagacacttcagcatgaaggtgtgcgagaaggtgcagagaaagggcaccaccagctacaacgaggtggccgacgagctggtggccgagttcagcgccgccgacaaccacatcctgcccaacgagagcgcctacgaccagaagaacatcagaagaagagtgtacgacgccctgaacgtgctgatggccatgaacatcatcagcaaggagaagaaggagatcaagtggatcggcctgcccaccaacagcgcccaggagtgccagaacctggaggtggagagacagagaagactggagagaatcaagcagaagcagagccagctgcaggagctgatcctgcagcagatcgccttcaagaacctggtgcagagaaacagacacgccgagcagcaggccagcagaccccccccccccaacagcgtgatccacctgcccttcatcatcgtgaacaccagcaagaagaccgtgatcgactgcagcatcagcaacgacaagttcgagtacctgttcaacttcgacaacaccttcgagatccacgacgacatcgaggtgctgaagagaatgggcatggcctgcggcctggagagcggcagctgcagcgccgaggacctgaagatggccagaagcctggtgcccaaggccctggagccctacgtgaccgagatggcccagggcaccgtgggcggcgtgttcatcaccaccgccggcagcaccagcaacggcaccagattcagcgccagcgacctgaccaacggcgccgacggcatgctggccaccagcagcaacggcagccagtacagcggcagcagagtggagacccccgtgagctacgtgggcgaggacgacgaggaggacgacgacttcaacgagaacgacgaggacgactag

SEQ ID NO: 13277 - DNA, 711 bp, synthetic construct
  misc_feature 1..711: note = Description of Artificial Sequence: Synthetic coding sequence
  source 1..711: mol_type = other DNA
atggccaaggacgccggcctgatcgaggccaacggcgagctgaaggtgttcatcgaccagaacctgagccccggcaagggcgtggtgagcctggtggccgtgcaccccagcaccgtgaaccccctgggcaagcagctgctgcccaagaccttcggccagagcaacgtgaacatcgcccagcaggtggtgatcggcaccccccagagacccgccgccagcaacaccctggtggtgggcagcccccacacccccagcacccacttcgccagccagaaccagcccagcgacagcagcccctggagcgccggcaagagaaacagaaagggcgagaagaacggcaagggcctgagacacttcagcatgaaggtgtgcgagaaggtgcagagaaagggcaccaccagctacaacgaggtggccgacgagctggtggccgagttcagcgccgccgacaaccacatcctgcccaacgagagcgcctacgaccagaagaacatcagaagaagagtgtacgacgccctgaacgtgctgatggccatgaacatcatcagcaaggagaagaaggagatcaagtggatcggcctgcccaccaacagcgcccaggagtgccagaacctggaggtggagagacagagaagactggagagaatcaagcagaagcagagccagctgcaggagctgatcctgcagcagatcgccttcaagaacctgtag

SEQ ID NO: 13278 - DNA, 480 bp, synthetic construct
  misc_feature 1..480: note = Description of Artificial Sequence: Synthetic coding sequence
  source 1..480: mol_type = other DNA
atggccaaggacgccggcctgatcgaggccaacggcgagctgaaggtgttcatcgaccagaacctgagccccggcaagggcgtggtgagcctggtggccgtgcaccccagcaccgtgaaccccctgggcaagcagctgctgcccaagaccttcggccagagcaacgtgaacatcgcccagcaggtggtgatcggcaccccccagagacccgccgccagcaacaccctggtggtgggcagcccccacacccccagcacccacttcgccagccagaaccagcccagcgacagcagcccctggagcgccggcaagagaaacagaaagggcgagaagaacggcaagggcctgagacacttcagcatgaaggtgtgcgagaaggtgcagagaaagggcaccaccagctacaacgaggtggccgacgagctggtggccgagttcagcgccgccgacaaccacatcctgcccaacgagagcgtgtag

SEQ ID NO: 13279 - DNA, 936 bp, synthetic construct
  misc_feature 1..936: note = Description of Artificial Sequence: Synthetic coding sequence
  source 1..936: mol_type = other DNA
atgagcaccctgcccagcaagtggaagagaaacagaaagggcgagaagaacggcaagggcctgagacacttcagcatgaaggtgtgcgagaaggtgcagagaaagggcaccaccagctacaacgaggtggccgacgagctggtggccgagttcagcgccgccgacaaccacatcctgcccaacgagagcgcctacgaccagaagaacatcagaagaagagtgtacgacgccctgaacgtgctgatggccatgaacatcatcagcaaggagaagaaggagatcaagtggatcggcctgcccaccaacagcgcccaggagtgccagaacctggaggtggagagacagagaagactggagagaatcaagcagaagcagagccagctgcaggagctgatcctgcagcagatcgccttcaagaacctggtgcagagaaacagacacgccgagcagcaggccagcagaccccccccccccaacagcgtgatccacctgcccttcatcatcgtgaacaccagcaagaagaccgtgatcgactgcagcatcagcaacgacaagttcgagtacctgttcaacttcgacaacaccttcgagatccacgacgacatcgaggtgctgaagagaatgggcatggcctgcggcctggagagcggcagctgcagcgccgaggacctgaagatggccagaagcctggtgcccaaggccctggagccctacgtgaccgagatggcccagggcaccgtgggcggcgtgttcatcaccaccgccggcagcaccagcaacggcaccagcgacctgaccaacggcgccgacggcatgctggccaccagcagcaacggcagccagtacagcggcagcagagtggagacccccgtgagctacgtgggcgaggacgacgaggaggacgacgacttcaacgagaacgacgaggacgactag

SEQ ID NO: 13280 - DNA, 1146 bp, synthetic construct
  misc_feature 1..1146: note = Description of Artificial Sequence: Synthetic coding sequence
  source 1..1146: mol_type = other DNA
atgagcaccctgcccagcaagtggaagagaaacagaaagggcgagaagaacggcaagggcctgagacacttcagcatgaaggtgtgcgagaaggtgcagagaaagggcaccaccagctacaacgaggtggccgacgagctggtggccgagttcagcgccgccgacaaccacatcctgcccaacgagagcgcctacgaccagaagaacatcagaagaagagtgtacgacgccctgaacgtgctgatggccatgaacatcatcagcaaggagaagaaggagatcaagtggatcggcctgcccaccaacagcgcccaggagtgccagaacctggaggtggagagacagagaagactggagagaatcaagcagaagcagagccagctgcaggagctgatcctgcagcagatcgccttcaagaacctggtgcagagaaacagacacgccgagcagcaggccagcagaccccccccccccaacagcgtgatccacctgcccttcatcatcgtgaacaccagcaagaagaccgtgatcgactgcagcatcagcaacgacaagttcgagtacctgttcaacttcgacaacaccttcgagatccacgacgacatcgaggtgctgaagagaatgggcatggcctgcggcctggagagcggcagctgcagcgccgaggacctgaagatggccagaagcctggtgcccaaggccctggagccctacgtgaccgagaagaccggcctgtgcgactgcaccgccggctgccccgccccctggagaagcgtggagaacaccggccaggccaaggacatcagaaagctgctgcagcccagcgtgctgtggaactgcgccagcttctgctggctgcccgtgagactggtgctgttcctgttccacgaccacagcctgatcttcttccccttcagcgagatggcccagggcaccgtgggcggcgtgttcatcaccaccgccggcagcaccagcaacggcaccagattcagcgccagcgacctgaccaacggcgccgacggcatgctggccaccagcagcaacggcagccagtacagcggcagcagagtggagacccccgtgagctacgtgggcgaggacgacgaggaggacgacgacttcaacgagaacgacgaggacgactag

SEQ ID NO: 13281 - DNA, 1161 bp, synthetic construct
  misc_feature 1..1161: note = Description of Artificial Sequence: Synthetic coding sequence
  source 1..1161: mol_type = other DNA
atgatcatcagcaccccccagagactgaccagcagcggcagcgtgctgatcggcagcccctacacccccgcccccgccatggtgacccagacccacatcgccgaggccaccggctgggtgcccggcgacagaaagagagccagaaagttcatcgacagcgacttcagcgagagcaagagaagcaagaagggcgacaagaacggcaagggcctgagacacttcagcatgaaggtgtgcgagaaggtgcagagaaagggcaccaccagctacaacgaggtggccgacgagctggtgagcgagttcaccaacagcaacaaccacctggccgccgacagccaggcctacgaccagaagaacatcagaagaagagtgtacgacgccctgaacgtgctgatggccatgaacatcatcagcaaggagaagaaggagatcaagtggatcggcctgcccaccaacagcgcccaggagtgccagaacctggagatcgagaagcagagaagaatcgagagaatcaagcagaagagagcccagctgcaggagctgctgctgcagcagatcgccttcaagaacctggtgcagagaaacagacagaacgagcagcagaaccagggcccccccgccctgaacagcaccatccagctgcccttcatcatcatcaacaccagcagaaagaccgtgatcgactgcagcatcagcagcgacaagttcgagtacctgttcaacttcgacaacaccttcgagatccacgacgacatcgaggtgctgaagagaatgggcatgagcttcggcctggagagcggcaagtgcagcctggaggacctgaagctggccaagagcctggtgcccaaggccctggagggctacatcaccgacatcagcaccggccccagctggctgaaccagggcctgctgctgaacagcacccagagcgtgagcaacctggacctgaccaccggcgccaccctgccccagagcagcgtgaaccagggcctgtgcctggacgccgaggtggccctggccaccggccagttcctggcccccaacagccaccagagcagcagcgccgccagccactgcagcgagagcagaggcgagaccccctgcagcttcaacgacgaggacgaggaggacgacgaggaggacagcagcagccccgagtag

SEQ ID NO: 13282 - DNA, 1113 bp, synthetic construct
  misc_feature 1..1113: note = Description of Artificial Sequence: Synthetic coding sequence
  source 1..1113: mol_type = other DNA
atgatcatcagcaccccccagagactgaccagcagcggcagcgtgctgatcggcagcccctacacccccgcccccgccatggtgacccagacccacatcgccgaggccaccggctgggtgcccggcaagagaagcaagaagggcgacaagaacggcaagggcctgagacacttcagcatgaaggtgtgcgagaaggtgcagagaaagggcaccaccagctacaacgaggtggccgacgagctggtgagcgagttcaccaacagcaacaaccacctggccgccgacagccaggcctacgaccagaagaacatcagaagaagagtgtacgacgccctgaacgtgctgatggccatgaacatcatcagcaaggagaagaaggagatcaagtggatcggcctgcccaccaacagcgcccaggagtgccagaacctggagatcgagaagcagagaagaatcgagagaatcaagcagaagagagcccagctgcaggagctgctgctgcagcagatcgccttcaagaacctggtgcagagaaacagacagaacgagcagcagaaccagggcccccccgccctgaacagcaccatccagctgcccttcatcatcatcaacaccagcagaaagaccgtgatcgactgcagcatcagcagcgacaagttcgagtacctgttcaacttcgacaacaccttcgagatccacgacgacatcgaggtgctgaagagaatgggcatgagcttcggcctggagagcggcaagtgcagcctggaggacctgaagctggccaagagcctggtgcccaaggccctggagggctacatcaccgacatcagcaccggccccagctggctgaaccagggcctgctgctgaacagcacccagagcgtgagcaacctggacctgaccaccggcgccaccctgccccagagcagcgtgaaccagggcctgtgcctggacgccgaggtggccctggccaccggccagttcctggcccccaacagccaccagagcagcagcgccgccagccactgcagcgagagcagaggcgagaccccctgcagcttcaacgacgaggacgaggaggacgacgaggaggacagcagcagccccgagtag

SEQ ID NO: 13283 - DNA, 1257 bp, synthetic construct
  misc_feature 1..1257: note = Description of Artificial Sequence: Synthetic coding sequence
  source 1..1257: mol_type = other DNA
atgcagcccgagggcatcatcttcgaggccgagaacaagcccagccccggcaccgagagcgccggcaccttcatcctggacctgagcgccaccagcagaaccatcatcagcaccccccagagactgaccagcagcggcagcgtgctgatcggcagcccctacacccccgcccccgccatggtgacccagacccacatcgccgaggccaccggctgggtgcccggcgacagaaagagagccagaaagttcatcgacagcgacttcagcgagagcaagagaagcaagaagggcgacaagaacggcaagggcctgagacacttcagcatgaaggtgtgcgagaaggtgcagagaaagggcaccaccagctacaacgaggtggccgacgagctggtgagcgagttcaccaacagcaacaaccacctggccgccgacagcgcctacgaccagaagaacatcagaagaagagtgtacgacgccctgaacgtgctgatggccatgaacatcatcagcaaggagaagaaggagatcaagtggatcggcctgcccaccaacagcgcccaggagtgccagaacctggagatcgagaagcagagaagaatcgagagaatcaagcagaagagagcccagctgcaggagctgctgctgcagcagatcgccttcaagaacctggtgcagagaaacagacagaacgagcagcagaaccagggcccccccgccctgaacagcaccatccagctgcccttcatcatcatcaacaccagcagaaagaccgtgatcgactgcagcatcagcagcgacaagttcgagtacctgttcaacttcgacaacaccttcgagatccacgacgacatcgaggtgctgaagagaatgggcatgagcttcggcctggagagcggcaagtgcagcctggaggacctgaagctggccaagagcctggtgcccaaggccctggagggctacatcaccgacatcagcaccggccccagctggctgaaccagggcctgctgctgaacagcacccagagcgtgagcaacctggacctgaccaccggcgccaccctgccccagagcagcgtgaaccagggcctgtgcctggacgccgaggtggccctggccaccggccagttcctggcccccaacagccaccagagcagcagcgccgccagccactgcagcgagagcagaggcgagaccccctgcagcttcaacgacgaggacgaggaggacgacgaggaggacagcagcagccccgagtag

SEQ ID NO: 13284 - DNA, 1161 bp, synthetic construct; identical to SEQ ID NO: 13281
  misc_feature 1..1161: note = Description of Artificial Sequence: Synthetic coding sequence
  source 1..1161: mol_type = other DNA

SEQ ID NO: 13285 - DNA, 261 bp, synthetic construct
  misc_feature 1..261: note = Description of Artificial Sequence: Synthetic coding sequence
  source 1..261: mol_type = other DNA
atgaccgccaagaacgtgggcctgaccagcaccaacgccgaggtgagaggcttcatcgaccagaacctgagccccaccaagggcaacatcagcttcgtggccttccccgtgagcaacaccaacagccccaccaagatcctgcccaagaccctgggccccatcaacgtgaacgtgggcccccagatgatcatcagcaccccccagagactgaccagcagcggcagcgtgctgatcggcagcccctacacccccgccccctag

SEQ ID NO: 13286 - DNA, 141 bp, synthetic construct
  misc_feature 1..141: note = Description of Artificial Sequence: Synthetic coding sequence
  source 1..141: mol_type = other DNA
atgatcatcagcaccccccagagactgaccagcagcggcagcgtgctgatcggcagcccctacacccccgcccccgccatggtgacccagacccacatcgccgaggccaccggctgggtgcccggcgacagaaagagatag

SEQ ID NO: 13287 - DNA, 1158 bp, synthetic construct
  misc_feature 1..1158: note = Description of Artificial Sequence: Synthetic coding sequence
  source 1..1158: mol_type = other DNA
atgatcatcagcaccccccagagactgaccagcagcggcagcgtgctgatcggcagcccctacacccccgcccccgccatggtgacccagacccacatcgccgaggccaccggctgggtgcccggcgacagaaagagagccagaaagttcatcgacagcgacttcagcgagagcaagagaagcaagaagggcgacaagaacggcaagggcctgagacacttcagcatgaaggtgtgcgagaaggtgcagagaaagggcaccaccagctacaacgaggtggccgacgagctggtgagcgagttcaccaacagcaacaaccacctggccgccgacagcgcctacgaccagaagaacatcagaagaagagtgtacgacgccctgaacgtgctgatggccatgaacatcatcagcaaggagaagaaggagatcaagtggatcggcctgcccaccaacagcgcccaggagtgccagaacctggagatcgagaagcagagaagaatcgagagaatcaagcagaagagagcccagctgcaggagctgctgctgcagcagatcgccttcaagaacctggtgcagagaaacagacagaacgagcagcagaaccagggcccccccgccctgaacagcaccatccagctgcccttcatcatcatcaacaccagcagaaagaccgtgatcgactgcagcatcagcagcgacaagttcgagtacctgttcaacttcgacaacaccttcgagatccacgacgacatcgaggtgctgaagagaatgggcatgagcttcggcctggagagcggcaagtgcagcctggaggacctgaagctggccaagagcctggtgcccaaggccctggagggctacatcaccgacatcagcaccggccccagctggctgaaccagggcctgctgctgaacagcacccagagcgtgagcaacctggacctgaccaccggcgccaccctgccccagagcagcgtgaaccagggcctgtgcctggacgccgaggtggccctggccaccggccagttcctggcccccaacagccaccagagcagcagcgccgccagccactgcagcgagagcagaggcgagaccccctgcagcttcaacgacgaggacgaggaggacgacgaggaggacagcagcagccccgagtag

SEQ ID NO: 13288 - DNA, 270 bp, synthetic construct
  misc_feature 1..270: note = Description of Artificial Sequence: Synthetic coding sequence
  source 1..270: mol_type = other DNA
atgatcatcagcaccccccagagactgaccagcagcggcagcgtgctgatcggcagcccctacacccccgcccccgccatggtgacccagacccacatcgccgaggccaccggctgggtgcccggcgacagaaagagagccagaaagttcatcgacagcgacttcagcgagagcaagagaagcaagaagggcgacaagaacggcaagggcctgagacacttcagcatgaaggtgtgcgagaaggtgcagagaaagggcaccaccagctag

SEQ ID NO: 13289 - DNA, 1341 bp, synthetic construct
  misc_feature 1..1341: note = Description of Artificial Sequence: Synthetic coding sequence
  source 1..1341: mol_type = other DNA
atgaccgccaagaacgtgggcctgaccagcaccaacgccgaggtgagaggcttcatcgaccagaacctgagccccaccaagggcaacatcagcttcgtggccttccccgtgagcaacaccaacagccccaccaagatcctgcccaagaccctgggccccatcaacgtgaacgtgggcccccagatgatcatcagcaccccccagagactgaccagcagcggcagcgtgctgatcggcagcccctacacccccgcccccgccatggtgacccagacccacatcgccgaggccaccggctgggtgcccggcgacagaaagagagccagaaagttcatcgacagcgacttcagcgagagcaagagaagcaagaagggcgacaagaacggcaagggcctgagacacttcagcatgaaggtgtgcgagaaggtgcagagaaagggcaccaccagctacaacgaggtggccgacgagctggtgagcgagttcaccaacagcaacaaccacctggccgccgacagcgcctacgaccagaagaacatcagaagaagagtgtacgacgccctgaacgtgctgatggccatgaacatcatcagcaaggagaagaaggagatcaagtggatcggcctgcccaccaacagcgcccaggagtgccagaacctggagatcgagaagcagagaagaatcgagagaatcaagcagaagagagcccagctgcaggagctgctgctgcagcagatcgccttcaagaacctggtgcagagaaacagacagaacgagcagcagaaccagggcccccccgccctgaacagcaccatccagctgcccttcatcatcatcaacaccagcagaaagaccgtgatcgactgcagcatcagcagcgacaagttcgagtacctgttcaacttcgacaacaccttcgagatccacgacgacatcgaggtgctgaagagaatgggcatgagcttcggcctggagagcggcaagtgcagcctggaggacctgaagctggccaagagcctggtgcccaaggccctggagggctacatcaccgacatcagcaccggccccagctggctgaaccagggcctgctgctgaacagcacccagagcgtgagcaacctggacctgaccaccggcgccaccctgccccagagcagcgtgaaccagggcctgtgcctggacgccgaggtggccctggccaccggccagttcctggcccccaacagccaccagagcagcagcgccgccagccactgcagcgagagcagaggcgagaccccctgcagcttcaacgacgaggacgaggaggacgacgaggaggacagcagcagccccgagtag

SEQ ID NO: 13290 - DNA, 84 bp, synthetic construct
  misc_feature 1..84: note = Description of Artificial Sequence: Synthetic coding sequence
  source 1..84: mol_type = other DNA
atgatcatcagcaccccccagagactgaccagcagcggcagcgtgctgatcggcagcccctacacccccgcccccgccatgtag

SEQ ID NO: 13291 - DNA, 1050 bp, synthetic construct
  misc_feature 1..1050: note = Description of Artificial Sequence: Synthetic coding sequence
  source 1..1050: mol_type = other DNA
atgctggaccccaagtgcgacagaaagagagccagaaagttcatcgacagcgacttcagcgagagcaagagaagcaagaagggcgacaagaacggcaagggcctgagacacttcagcatgaaggtgtgcgagaaggtgcagagaaagggcaccaccagctacaacgaggtggccgacgagctggtgagcgagttcaccaacagcaacaaccacctggccgccgacagcgcctacgaccagaagaacatcagaagaagagtgtacgacgccctgaacgtgctgatggccatgaacatcatcagcaaggagaagaaggagatcaagtggatcggcctgcccaccaacagcgcccaggagtgccagaacctggagatcgagaagcagagaagaatcgagagaatcaagcagaagagagcccagctgcaggagctgctgctgcagcagatcgccttcaagaacctggtgcagagaaacagacagaacgagcagcagaaccagggcccccccgccctgaacagcaccatccagctgcccttcatcatcatcaacaccagcagaaagaccgtgatcgactgcagcatcagcagcgacaagttcgagtacctgttcaacttcgacaacaccttcgagatccacgacgacatcgaggtgctgaagagaatgggcatgagcttcggcctggagagcggcaagtgcagcctggaggacctgaagctggccaagagcctggtgcccaaggccctggagggctacatcaccgacatcagcaccggccccagctggctgaaccagggcctgctgctgaacagcacccagagcgtgagcaacctggacctgaccaccggcgccaccctgccccagagcagcgtgaaccagggcctgtgcctggacgccgaggtggccctggccaccggccagttcctggcccccaacagccaccagagcagcagcgccgccagccactgcagcgagagcagaggcgagaccccctgcagcttcaacgacgaggacgaggaggacgacgaggaggacagcagcagccccgagtag

SEQ ID NO: 13292 - DNA, 663 bp, synthetic construct
  misc_feature 1..663: note = Description of Artificial Sequence: Synthetic coding sequence
  source 1..663: mol_type = other DNA
atgatcatcagcaccccccagagactgaccagcagcggcagcgtgctgatcggcagcccctacacccccgcccccgccatggtgacccagacccacatcgccgaggccaccggctgggtgcccggcgacagaaagagagccagaaagttcatcgacagcgacttcagcgagagcaagagaagcaagaagggcgacaagaacggcaagggcctgagacacttcagcatgaaggtgtgcgagaaggtgcagagaaagggcaccaccagctacaacgaggtggccgacgagctggtgagcgagttcaccaacagcaacaaccacctggccgccgacagcgcctacgaccagaagaacatcagaagaagagtgtacgacgccctgaacgtgctgatggccatgaacatcatcagcaaggagaagaaggagatcaagtggatcggcctgcccaccaacagcgcccaggagtgccagaacctggagatcgagaagcagagaagaatcgagagaatcaagcagaagagagcccagctgcaggagctgctgctgcagcagatcgccttcaagaacctggtgcagagaaacagacagaacgagcagcagaaccagggcccccccgccctgaacagcaccatccagctgcccttcatcatcatcaacacctag

SEQ ID NO: 13293 - DNA, 1161 bp, synthetic construct; identical to SEQ ID NO: 13281
  misc_feature 1..1161: note = Description of Artificial Sequence: Synthetic coding sequence
  source 1..1161: mol_type = other DNA

SEQ ID NO: 13294 - DNA, 933 bp, synthetic construct
  misc_feature 1..933: note = Description of Artificial Sequence: Synthetic coding sequence
  source 1..933: mol_type = other DNA
atgaaggtgtgcgagaaggtgcagagaaagggcaccaccagctacaacgaggtggccgacgagctggtgagcgagttcaccaacagcaacaaccacctggccgccgacagcgcctacgaccagaagaacatcagaagaagagtgtacgacgccctgaacgtgctgatggccatgaacatcatcagcaaggagaagaaggagatcaagtggatcggcctgcccaccaacagcgcccaggagtgccagaacctggagatcgagaagcagagaagaatcgagagaatcaagcagaagagagcccagctgcaggagctgctgctgcagcagatcgccttcaagaacctggtgcagagaaacagacagaacgagcagcagaaccagggcccccccgccctgaacagcaccatccagctgcccttcatcatcatcaacaccagcagaaagaccgtgatcgactgcagcatcagcagcgacaagttcgagtacctgttcaacttcgacaacaccttcgagatccacgacgacatcgaggtgctgaagagaatgggcatgagcttcggcctggagagcggcaagtgcagcctggaggacctgaagctggccaagagcctggtgcccaaggccctggagggctacatcaccgacatcagcaccggccccagctggctgaaccagggcctgctgctgaacagcacccagagcgtgagcaacctggacctgaccaccggcgccaccctgccccagagcagcgtgaaccagggcctgtgcctggacgccgaggtggccctggccaccggccagttcctggcccccaacagccaccagagcagcagcgccgccagccactgcagcgagagcagaggcgagaccccctgcagcttcaacgacgaggacgaggaggacgacgaggaggacagcagcagccccgagtag

SEQ ID NO: 13295 - DNA, 1335 bp, synthetic construct
  misc_feature 1..1335: note = Description of Artificial Sequence: Synthetic coding sequence
  source 1..1335: mol_type = other DNA
atgcccagaagcggcgcccccaaggagagacccgccgagcccctgacccccccccccagctacggccaccagccccagaccggcagcggcgagagcagcggcgccagcggcgacaaggaccacctgtacagcaccgtgtgcaagcccagaagccccaagcccgccgcccccgccgccccccccttcagcagcagcagcggcgtgctgggcaccggcctgtgcgagctggacagactgctgcaggagctgaacgccacccagttcaacatcaccgacgagatcatgagccagttccccagcagcaaggtggccagcggcgagcagaaggaggaccagagcgaggacaagaagagacccagcctgcccagcagccccagccccggcctgcccaaggccagcgccaccagcgccaccctggagctggacagactgatggccagcctgagcgacttcagagtgcagaaccacctgcccgccagcggccccacccagccccccgtggtgagcagcaccaacgagggcagccccagcccccccgagcccaccggcaagggcagcctggacaccatgctgggcctgctgcagagcgacctgagcagaagaggcgtgcccacccaggccaagggcctgtgcggcagctgcaacaagcccatcgccggccaggtggtgaccgccctgggcagagcctggcaccccgagcacttcgtgtgcggcggctgcagcaccgccctgggcggcagcagcttcttcgagaaggacggcgcccccttctgccccgagtgctacttcgagagattcagccccagatgcggcttctgcaaccagcccatcagacacaagatggtgaccgccctgggcacccactggcaccccgagcacttctgctgcgtgagctgcggcgagcccttcggcgacgagggcttccacgagagagagggcagaccctactgcagaagagacttcctgcagctgttcgcccccagatgccagggctgccagggccccatcctggacaactacatcagcgccctgagcgccctgtggcaccccgactgcttcgtgtgcagagagtgcttcgcccccttcagcggcggcagcttcttcgagcacgagggcagacccctgtgcgagaaccacttccacgccagaagaggcagcctgtgcgccacctgcggcctgcccgtgaccggcagatgcgtgagcgccctgggcagaagattccaccccgaccacttcacctgcaccttctgcctgagacccctgaccaagggcagcttccaggagagagccggcaagccctactgccagccctgcttcctgaagctgttcggctag

SEQ ID NO: 13296 - DNA, 1335 bp, synthetic construct; identical to SEQ ID NO: 13295
  misc_feature 1..1335: note = Description of Artificial Sequence: Synthetic coding sequence
  source 1..1335: mol_type = other DNA

SEQ ID NO: 13297 - DNA, 1386 bp, synthetic construct
  misc_feature 1..1386: note = Description of Artificial Sequence: Synthetic coding sequence
  source 1..1386: mol_type = other DNA
atggaggacctggacgccctgctgagcgacctggagaccaccaccagccacatgcccagaagcggcgcccccaaggagagacccgccgagcccctgacccccccccccagctacggccaccagccccagaccggcagcggcgagagcagcggcgccagcggcgacaaggaccacctgtacagcaccgtgtgcaagcccagaagccccaagcccgccgcccccgccgccccccccttcagcagcagcagcggcgtgctgggcaccggcctgtgcgagctggacagactgctgcaggagctgaacgccacccagttcaacatcaccgacgagatcatgagccagttccccagcagcaaggtggccagcggcgagcagaaggaggaccagagcgaggacaagaagagacccagcctgcccagcagccccagccccggcctgcccaaggccagcgccaccagcgccaccctggagctggacagactgatggccagcctgagcgacttcagagtgcagaaccacctgcccgccagcggccccacccagccccccgtggtgagcagcaccaacgagggcagccccagcccccccgagcccaccggcaagggcagcctggacaccatgctgggcctgctgcagagcgacctgagcagaagaggcgtgcccacccaggccaagggcctgtgcggcagctgcaacaagcccatcgccggccaggtggtgaccgccctgggcagagcctggcaccccgagcacttcgtgtgcggcggctgcagcaccgccctgggcggcagcagcttcttcgagaaggacggcgcccccttctgccccgagtgctacttcgagagattcagccccagatgcggcttctgcaaccagcccatcagacacaagatggtgaccgccctgggcacccactggcaccccgagcacttctgctgcgtgagctgcggcgagcccttcggcgacgagggcttccacgagagagagggcagaccctactgcagaagagacttcctgcagctgttcgcccccagatgccagggctgccagggccccatcctggacaactacatcagcgccctgagcgccctgtggcaccccgactgcttcgtgtgcagagagtgcttcgcccccttcagcggcggcagcttcttcgagcacgagggcagacccctgtgcgagaaccacttccacgccagaagaggcagcctgtgcgccacctgcggcctgcccgtgaccggcagatgcgtgagcgccctgggcagaagattccaccccgaccacttcacctgcaccttctgcctgagacccctgaccaagggcagcttccaggagagagccggcaagccctactgccagccctgcttcctgaagctgttcggctag

SEQ ID NO: 13298 - DNA, 783 bp, synthetic construct
  misc_feature 1..783: note = Description of Artificial Sequence: Synthetic coding sequence
  source 1..783: mol_type = other DNA
atggtgtggcccgccctgtgggagctgtacagagagctgggcctgttccagggccccgccctgggcctgagaaaccacctgggcagaaagctgagaagaagaaagaagaagaaggccaagagaaccaccaactggaagatcatcaccgacagacccggcttccacgacgagagcgccatctaccccgtgggctactgcagcaccagaatctacgccagcatgaagtgccccgaccagaagtgcctgtacacctgccagatcaaggacggcggcgtgcagccccagttcgagatcgtgcccgaggacgacccccagaacgccatcgtgagcagcagcgccgacgcctgccacgccgagctgctgagaaccatcagcaccaccatgggcaagctgatgcccaacctgctgcccgccggcgccgacttcttcggcttcagccaccccgccatccacaacctgatccagagctgccccggcgccagaaagtgcatcaactaccagtgggtgaagttcgacgtgtgcaagcccggcgacggccagctgcccgagggcctgcccgagaacgacgccgccatgagcttcgaggccttccagagacagatcttcgacgaggaccagaacgaccccctgctgcccggcagcctggacctgcccgagctgcagcccgccgccttcgtgagcagctaccagcccatgtacctgacccacgagcccctggtggacacccacctgcagcacctgaagagccccagccagggcagccccatccagagcagcgactag

SEQ ID NO: 13299 - DNA, 1236 bp, synthetic construct
  misc_feature 1..1236: note = Description of Artificial Sequence: Synthetic coding sequence
  source 1..1236: mol_type = other DNA
atgagcctgctggacggcctggccagcagccccagagcccccctgcagagcagcaaggccagaatgaagaagctgcccaagaagagccagaacgagaagtacagactgaagtacctgagactgagaaaggccgccaaggccaccgtgttcgagaacgccgccatctgcgacgagatcgccagactggaggagaagttcctgaaggccaaggaggagagaagatacctgctgaagaagctgctgcagctgcaggccctgaccgagggcgaggtgcaggccgccgcccccagccacagcagcagcctgcccctgacctacggcgtggccagcagcgtgggcaccatccagggcgccggccccatcagcggccccagcaccggcgccgaggagcccttcggcaagaagaccaagaaggagaagaaggagaagggcaaggagaacaacaagctggaggtgctgaagaagacctgcaagaagaagaagatggccggcggcgccagaaagctggtgcagcccatcgccctggaccccagcggcagacccgtgttccccatcggcctgggcggcctgaccgtgtacagcctgggcgagatcatcaccgacagacccggcttccacgacgagagcgccatctaccccgtgggctactgcagcaccagaatctacgccagcatgaagtgccccgaccagaagtgcctgtacacctgccagatcaaggacggcggcgtgcagccccagttcgagatcgtgcccgaggacgacccccagaacgccatcgtgagcagcagcgccgacgcctgccacgccgagctgctgagaaccatcagcaccaccatgggcaagctgatgcccaacctgctgcccgccggcgccgacttcttcggcttcagccaccccgccatccacaacctgatccagagctgccccggcgccagaaagtgcatcaactaccagtgggtgaagttcgacgtgtgcaagcccggcgacggccagctgcccgagggcctgcccgagaacgacgccgccatgagcttcgaggccttccagagacagatcttcgacgaggaccagaacgaccccctgctgcccggcagcctggacctgcccgagctgcagcccgccgccttcgtgagcagctaccagcccatgtacctgacccacgagcccctggtggacacccacctgcagcacctgaagagccccagccagggcagccccatccagagcagcgactag

SEQ ID NO: 13300 - DNA, 1281 bp, synthetic construct
  misc_feature 1..1281: note = Description of Artificial Sequence: Synthetic coding sequence
  source 1..1281: mol_type = other DNA
atggaggccgccgtggccgcccccagacccagactgctgctgctggtgctggccgccgccgccgccgccgccgccgccctgctgcccggcgccaccgccctgcagtgcttctgccacctgtgcaccaaggacaacttcacctgcgtgaccgacggcctgtgcttcgtgagcgtgaccgagaccaccgacaaggtgatccacaacagcatgtgcatcgccgagatcgacctgatccccagagacagacccttcgtgtgcgcccccagcagcaagaccggcagcgtgaccaccacctactgctgcaaccaggaccactgcaacaagatcgagctgcccaccaccggcctgcccctgctggtgcagagaaccatcgccagaaccatcgtgctgcaggagagcatcggcaagggcagattcggcgaggtgtggagaggcaagtggagaggcgaggaggtggccgtgaagatcttcagcagcagagaggagagaagctggttcagagaggccgagatctaccagaccgtgatgctgagacacgagaacatcctgggcttcatcgccgccgacaacaaggacaacggcacctggacccagctgtggctggtgagcgactaccacgagcacggcagcctgttcgactacctgaacagatacaccgtgaccgtggagggcatgatcaagctggccctgagcaccgccagcggcctggcccacctgcacatggagatcgtgggcacccagggcaagcccgccatcgcccacagagacctgaagagcaagaacatcctggtgaagaagaacggcacctgctgcatcgccgacctgggcctggccgtgagacacgacagcgccaccgacaccatcgacatcgcccccaaccacagagtgggcaccaagagatacatggcccccgaggtgctggacgacagcatcaacatgaagcacttcgagagcttcaagagagccgacatctacgccatgggcctggtgttctgggagatcgccagaagatgcagcatcggcggcatccacgaggactaccagctgccctactacgacctggtgcccagcgaccccagcgtggaggagatgagaaaggtggtgtgcgagcagaagctgagacccaacatccccaacagatggcagagctgcgaggccctgagagtgatggccaagatcatgagagagtgctggtacgccaacggcgccgccagactgaccgccctgagaatcaagaagaccctgagccagctgagccagcaggagggcatcaagatgtag

SEQ ID NO: 13301 - DNA, 1512 bp, synthetic construct
  misc_feature 1..1512: note = Description of Artificial Sequence: Synthetic coding sequence
  source 1..1512: mol_type = other DNA
atggaggccgccgtggccgcccccagacccagactgctgctgctggtgctggccgccgccgccgccgccgccgccgccctgctgcccggcgccaccgccctgcagtgcttctgccacctgtgcaccaaggacaacttcacctgcgtgaccgacggcctgtgcttcgtgagcgtgaccgagaccaccgacaaggtgatccacaacagcatgtgcatcgccgagatcgacctgatccccagagacagacccttcgtgtgcgcccccagcagcaagaccggcagcgtgaccaccacctactgctgcaaccaggaccactgcaacaagatcgagctgcccaccaccgtgaagagcagccccggcctgggccccgtggagctggccgccgtgatcgccggccccgtgtgcttcgtgtgcatcagcctgatgctgatggtgtacatctgccacaacagaaccgtgatccaccacagagtgcccaacgaggaggaccccagcctggacagacccttcatcagcgagggcaccaccctgaaggacctgatctacgacatgaccaccagcggcagcggcagcggcctgcccctgctggtgcagagaaccatcgccagaaccatcgtgctgcaggagagcatcggcaagggcagattcggcgaggtgtggagaggcaagtggagaggcgaggaggtggccgtgaagatcttcagcagcagagaggagagaagctggttcagagaggccgagatctaccagaccgtgatgctgagacacgagaacatcctgggcttcatcgccgccgacaacaaggacaacggcacctggacccagctgtggctggtgagcgactaccacgagcacggcagcctgttcgactacctgaacagatacaccgtgaccgtggagggcatgatcaagctggccctgagcaccgccagcggcctggcccacctgcacatggagatcgtgggcacccagggcaagcccgccatcgcccacagagacctgaagagcaagaacatcctggtgaagaagaacggcacctgctgcatcgccgacctgggcctggccgtgagacacgacagcgccaccgacaccatcgacatcgcccccaaccacagagtgggcaccaagagatacatggcccccgaggtgctggacgacagcatcaacatgaagcacttcgagagcttcaagagagccgacatctacgccatgggcctggtgttctgggagatcgccagaagatgcagcatcggcggcatccacgaggactaccagctgccctactacgacctggtgcccagcgaccccagcgtggaggagatgagaaaggtggtgtgcgagcagaagctgagacccaacatccccaacagatggcagagctgcgaggccctgagagtgatggccaagatcatgagagagtgctggtacgccaacggcgccgccagactgaccgccctgagaatcaagaagaccctgagccagctgagccagcaggagggcatcaagatgtag

SEQ ID NO: 13302 - DNA, 1398 bp, synthetic construct
  misc_feature 1..1398: note = Description of Artificial Sequence: Synthetic coding sequence
  source 1..1398: mol_type = other DNA
atggaggccgccgtggccgcccccagacccagactgctgctgctggtgctggccgccgccgccgccgccgccgccgccctgctgcccggcgccaccgccctgcagtgcttctgccacctgtgcaccaaggacaacttcacctgcgtgaccgacggcctgtgcttcgtgagcgtgaccgagaccaccgacaaggtgatccacaacagcatgtgcatcgccgagatcgacctgatccccagagacagacccttcgtgtgcgcccccagcagcaagaccggcagcgtgaccaccacctactgctgcaaccaggaccactgcaacaagatcgagctgcccaccaccgtgaagagcagccccggcctgggccccgtggagctggccgccgtgatcgccggccccgtgtgcttcgtgtgcatcagcctgatgctgatggtgtacatctgccacaacagaaccgtgatccaccacagagtgcccaacgaggaggaccccagcctggacagacccttcatcagcgagggcaccaccctgaaggacctgatctacgacatgaccaccagcggcagcggcagcggcctgcccctgctggtgcagagaaccatcgccagaaccatcgtgctgcaggagagcatcggcaagggcagattcggcgaggtgtggagaggcaagtggagaggcgaggaggtggccgtgaagatcttcagcagcagagaggagagaagctggttcagagaggccgagatctaccagaccgtgatgctgagacacgagaacatcctgggcttcatcgccgccgacaacaaggacaacggcacctggacccagctgtggctggtgagcgactaccacgagcacggcagcctgttcgactacctgaacagatacaccgtgaccgtggagggcatgatcaagctggccctgagcaccgccagcggcctggcccacctgcacatggagatcgtgggcacccagggcaagcccgccatcgcccccaaccacagagtgggcaccaagagatacatggcccccgaggtgctggacgacagcatcaacatgaagcacttcgagagcttcaagagagccgacatctacgccatgggcctggtgttctgggagatcgccagaagatgcagcatcggcggcatccacgaggactaccagctgccctactacgacctggtgcccagcgaccccagcgtggaggagatgagaaaggtggtgtgcgagcagaagctgagacccaacatccccaacagatggcagagctgcgaggccctgagagtgatggccaagatcatgagagagtgctggtacgccaacggcgccgccagactgaccgccctgagaatcaagaagaccctgagccagctgagccagcaggagggcatcaagatgtag

SEQ ID NO: 13303 - DNA, 216 bp, synthetic construct
  misc_feature 1..216: note = Description of Artificial Sequence: Synthetic coding sequence
  source 1..216: mol_type = other DNA
atggaggccgccgtggccgcccccagacccagactgctgctggccagcaccagcctgcagtgcttctgccacctgtgcaccaaggacaacttcacctgcgtgaccgacggcctgtgcttcgtgagcgtgaccgagaccaccgacaaggtgatccacaacagcatgtgcatcgccgagatcgacctgatccccagagacagacccttcgtgtgctag

SEQ ID NO: 13304 - DNA, 1305 bp, synthetic construct
  misc_feature 1..1305: note = Description of Artificial Sequence: Synthetic coding sequence
  source 1..1305: mol_type = other DNA
atgtgcatcgccgagatcgacctgatccccagagacagacccttcgtgtgcgcccccagcagcaagaccggcagcgtgaccaccacctactgctgcaaccaggaccactgcaacaagatcgagctgcccaccaccgtgaagagcagccccggcctgggccccgtggagctggccgccgtgatcgccggccccgtgtgcttcgtgtgcatcagcctgatgctgatggtgtacatctgccacaacagaaccgtgatccaccacagagtgcccaacgaggaggaccccagcctggacagacccttcatcagcgagggcaccaccctgaaggacctgatctacgacatgaccaccagcggcagcggcagcggcctgcccctgctggtgcagagaaccatcgccagaaccatcgtgctgcaggagagcatcggcaagggcagattcggcgaggtgtggagaggcaagtggagaggcgaggaggtggccgtgaagatcttcagcagcagagaggagagaagctggttcagagaggccgagatctaccagaccgtgatgctgagacacgagaacatcctgggcttcatcgccgccgacaacaaggacaacggcacctggacccagctgtggctggtgagcgactaccacgagcacggcagcctgttcgactacctgaacagatacaccgtgaccgtggagggcatgatcaagctggccctgagcaccgccagcggcctggcccacctgcacatggagatcgtgggcacccagggcaagcccgccatcgcccacagagacctgaagagcaagaacatcctggtgaagaagaacggcacctgctgcatcgccgacctgggcctggccgtgagacacgacagcgccaccgacaccatcgacatcgcccccaaccacagagtgggcaccaagagatacatggcccccgaggtgctggacgacagcatcaacatgaagcacttcgagagcttcaagagagccgacatctacgccatgggcctggtgttctgggagatcgccagaagatgcagcatcggcggcatccacgaggactaccagctgccctactacgacctggtgcccagcgaccccagcgtggaggagatgagaaaggtggtgtgcgagcagaagctgagacccaacatccccaacagatggcagagctgcgaggccctgagagtgatggccaagatcatgagagagtgctggtacgccaacggcgccgccagactgaccgccctgagaatcaagaagaccctgagccagctgagccagcaggagggcatcaagatgtag

SEQ ID NO: 13305 - DNA, 411 bp, synthetic construct
  misc_feature 1..411: note = Description of Artificial Sequence: Synthetic coding sequence
  source 1..411: mol_type = other DNA
atgaaggacagcaacagatgctgctgcggccagttcaccaaccagcacatcccccccctgcccagcgccacccccagcaagaacgaggaggagagcaagcaggtggagacccagcccgagaagtggagcgtggccaagcacacccagagctaccccaccgacagctacggcgtgctggagttccagggcggcggctacagcaacaaggccatggtgagaaaggccttcagacacggcgccaccagaatcaccgccttcatcggcggccagagccccagccccaagctgcagatccccggcctgctgcacggctgcggcagcatcttcctggacatcagcctgaagaaccaggagatctacctgtgcacctggctgctggccatgagactgggcaactggacccccctgtag

SEQ ID NO: 13306 - DNA, 4878 bp, synthetic construct
  misc_feature 1..4878: note = Description of Artificial Sequence: Synthetic coding sequence
  source 1..4878: mol_type = other DNA
atgggccagaagagctggatcgagaagaccttctgcaagagagagtgcatcttcgtgatccccagcatgaaggacagcaacagatgctgctgcggccagttcaccaaccagcacatcccccccctgcccagcgccacccccagcaagaacgaggaggagagcaagcaggtggagacccagcccgagaagtggagcgtggccaagcacacccagagctaccccaccgacagctacggcgtgctggagttccagggcggcggctacagcaacaaggccatgtacatcagagtgagctacgacaccaagcccgacagcctgctgcacctgatggtgaaggactggcagctggagctgcccaagctgctgatcagcgtgcacggcggcctgcagaacttcgagatgcagcccaagctgaagcaggtgttcggcaagggcctgatcaaggccgccatgaccaccggcgcctggatcttcaccggcggcgtgagcaccggcgtgatcagccacgtgggcgacgccctgaaggaccacagcagcaagagcagaggcagagtgtgcgccatcggcatcgccccctggggcatcgtggagaacaaggaggacctggtgggcaaggacgtgaccagagtgtaccagaccatgagcaaccccctgagcaagctgagcgtgctgaacaacagccacacccacttcatcctggccgacaacggcaccctgggcaagtacggcgccgaggtgaagctgagaagactgctggagaagcacatcagcctgcagaagatcaacaccagactgggccagggcgtgcccctggtgggcctggtggtggagggcggccccaacgtggtgagcatcgtgctggagtacctgcaggaggagccccccatccccgtggtgatctgcgacggcagcggcagagccagcgacatcctgagcttcgcccacaagtactgcgaggagggcggcatcatcaacgagagcctgagagagcagctgctggtgaccatccagaagaccttcaactacaacaaggcccagagccaccagctgttcgccatcatcatggagtgcatgaagaagaaggagctggtgaccgtgttcagaatgggcagcgagggccagcaggacatcgagatggccatcctgaccgccctgctgaagggcaccaacgtgagcgcccccgaccagctgagcctggccctggcctggaacagagtggacatcgccagaagccagatcttcgtgttcggcccccactggccccccctgggcagcctggccccccccaccgacagcaaggccaccgagaaggagaagaagccccccatggccaccaccaagggcggcagaggcaagggcaagggcaagaagaagggcaaggtgaaggaggaggtggaggaggagaccgaccccagaaagatcgagctgctgaactgggtgaacgccctggagcaggccatgctggacgccctggtgctggacagagtggacttcgtgaagctgctgatcgagaacggcgtgaacatgcagcacttcctgaccatccccagactggaggagctgtacaacaccagactgggcccccccaacaccctgcacctgctggtgagagacgtgaagaagagcaacctgccccccgactaccacatcagcctgatcgacatcggcctggtgctggagtacctgatgggcggcgcctacagatgcaactacaccagaaagaacttcagaaccctgtacaacaacctgttcggccccaagagacccaaggccctgaagctgctgggcatggaggacgacgagccccccgccaagggcaagaagaagaagaagaagaagaaggaggaggagatcgacatcgacgtggacgaccccgccgtgagcagattccagtaccccttccacgagctgatggtgtgggccgtgctgatgaagagacagaagatggccgtgttcctgtggcagagaggcgaggagagcatggccaaggccctggtggcctgcaagctgtacaaggccatggcccacgagagcagcgagagcgacctggtggacgacatcagccaggacctggacaacaacagcaaggacttcggccagctggccctggagctgctggaccagagctacaagcacgacgagcagatcgccatgaagctgctgacctacgagctgaagaactggagcaacagcacctgcctgaagctggccgtggccgccaagcacagagacttcatcgcccacacctgcagccagatgctgctgaccgacatgtggatgggcagactgagaatgagaaagaaccccggcctgaaggtgatcatgggcatcctgctgccccccaccatcctgttcctggagttcagaacctacgacgacttcagctaccagaccagcaaggagaacgaggacggcaaggagaaggaggaggagaacaccgacgccaacgccgacgccggcagcagaaagggcgacgaggagaacgagcacaagaagcagagaagcatccccatcggcaccaagatctgcgagttctacaacgcccccatcgtgaagttctggttctacaccatcagctacctgggctacctgctgctgttcaactacgtgatcctggtgagaatggacggctggcccagcctgcaggagtggatcgtgatcagctacatcgtgagcctggccctggagaagatcagagagatcctgatgagcgagcccggcaagctgagccagaagatcaaggtgtggctgcaggagtactggaacatcaccgacctggtggccatcagcaccttcatgatcggcgccatcctgagactgcagaaccagccctacatgggctacggcagagtgatctactgcgtggacatcatcttctggtacatcagagtgctggacatcttcggcgtgaacaagtacctgggcccctacgtgatgatgatcggcaagatgatgatcgacatgctgtacttcgtggtgatcatgctggtggtgctgatgagcttcggcgtggccagacaggccatcctgcaccccgaggagaagcccagctggaagctggccagaaacatcttctacatgccctactggatgatctacggcgaggtgttcgccgaccagatcgacctgtacgccatggagatcaaccccccctgcggcgagaacctgtacgacgaggagggcaagagactgcccccctgcatccccggcgcctggctgacccccgccctgatggcctgctacctgctggtggccaacatcctgctggtgaacctgctgatcgccgtgttcaacaacaccttcttcgaggtgaagagcatcagcaaccaggtgtggaagttccagagataccagctgatcatgaccttccacgacagacccgtgctgcccccccccatgatcatcctgagccacatctacatcatcatcatgagactgagcggcagatgcagaaagaagagagagggcgaccaggaggagagagacagaggcctgaagctgttcctgagcgacgaggagctgaagagactgcacgagttcgaggagcagtgcgtgcaggagcacttcagagagaaggaggacgagcagcagagcagcagcgacgagagaatcagagtgaccagcgagagagtggagaacatgagcatgagactggaggagatcaacgagagagagaccttcatgaagaccagcctgcagaccgtggacctgagactggcccagctggaggagctgagcaacagaatggtgaacgccctggagaacctggccggcatcgacagaagcgacctgatccaggccagaagcagagccagcagcgagtgcgaggccacctacctgctgagacagagcagcatcaacagcgccgacggctacagcctgtacagataccacttcaacggcgaggagctgctgttcgaggacaccagcctgagcaccagccccggcaccggcgtgagaaagaagacctgcagcttcagaatcaaggaggagaaggacgtgaagacccacctggtgcccgagtgccagaacagcctgcacctgagcctgggcaccagcaccagcgccacccccgacggcagccacctggccgtggacgacctgaagaacgccgaggagagcaagctgggccccgacatcggcatcagcaaggaggacgacgagagacagaccgacagcaagaaggaggagaccatcagccccagcctgaacaagaccgacgtgatccacggccaggacaagagcgacgtgcagaacacccagctgaccgtggagaccaccaacatcgagggcaccatcagctaccccctggaggagaccaagatcaccagatacttccccgacgagaccatcaacgcctgcaagaccatgaagagcagaagcttcgtgtacagcagaggcagaaagctggtgggcggcgtgaaccaggacgtggagtacagcagcatcaccgaccagcagctgaccaccgagtggcagtgccaggtgcagaagatcaccagaagccacagcaccgacatcccctacatcgtgagcgaggccgccgtgcaggccgagcacaaggagcagttcgccgacatgcaggacgagcaccacgtggccgaggccatccccagaatccccagactgagcctgaccatcaccgacagaaacggcatggagaacctgctgagcgtgaagcccgaccagaccctgggcttccccagcctgagaagcaagagcctgcacggccaccccagaaacgtgaagagcatccagggcaagctggacagaagcggccacgccagcagcgtgagcagcctggtgatcgtgagcggcatgaccgccgaggagaagaaggtgaagaaggagaaggccagcaccgagaccgagtgctag

SEQ ID NO: 13307 - DNA, 4812 bp, synthetic construct
  misc_feature 1..4812: note = Description of Artificial Sequence: Synthetic coding sequence
  source 1..4812: mol_type = other DNA
atcaagaccagcaagagatgctgctgcggccagttcaccaaccagcacatcccccccctgcccagcgccacccccagcaagaacgaggaggagagcaagcaggtggagacccagcccgagaagtggagcgtggccaagcacacccagagctaccccaccgacagctacggcgtgctggagttccagggcggcggctacagcaacaaggccatgtacatcagagtgagctacgacaccaagcccgacagcctgctgcacctgatggtgaaggactggcagctggagctgcccaagctgctgatcagcgtgcacggcggcctgcagaacttcgagatgcagcccaagctgaagcaggtgttcggcaagggcctgatcaaggccgccatgaccaccggcgcctggatcttcaccggcggcgtgagcaccggcgtgatcagccacgtgggcgacgccctgaaggaccacagcagcaagagcagaggcagagtgtgcgccatcggcatcgccccctggggcatcgtggagaacaaggaggacctggtgggcaaggacgtgaccagagtgtaccagaccatgagcaaccccctgagcaagctgagcgtgctgaacaacagccacacccacttcatcctggccgacaacggcaccctgggcaagtacggcgccgaggtgaagctgagaagactgctggagaagcacatcagcctgcagaagatcaacaccagactgggccagggcgtgcccctggtgggcctggtggtggagggcggccccaacgtggtgagcatcgtgctggagtacctgcaggaggagccccccatccccgtggtgatctgcgacggcagcggcagagccagcgacatcctgagcttcgcccacaagtactgcgaggagggcggcatcatcaacgagagcctgagagagcagctgctggtgaccatccagaagaccttcaactacaacaaggcccagagccaccagctgttcgccatcatcatggagtgcatgaagaagaaggagctggtgaccgtgttcagaatgggcagcgagggccagcaggacatcgagatggccatcctgaccgccctgctgaagggcaccaacgtgagcgcccccgaccagctgagcctggccctggcctggaacagagtggacatcgccagaagccagatcttcgtgttcggcccccactggccccccctgggcagcctggccccccccaccgacagcaaggccaccgagaaggagaagaagccccccatggccaccaccaagggcggcagaggcaagggcaagggcaagaagaagggcaaggtgaaggaggaggtggaggaggagaccgaccccagaaagatcgagctgctgaactgggtgaacgccctggagcaggccatgctggacgccctggtgctggacagagtggacttcgtgaagctgctgatcgagaacggcgtgaacatgcagcacttcctgaccatccccagactggaggagctgtacaacaccagactgggcccccccaacaccctgcacctgctggtgagagacgtgaagaagagcaacctgccccccgactaccacatcagcctgatcgacatcggcctggtgctggagtacctgatgggcggcgcctacagatgcaactacaccagaaagaacttcagaaccctgtacaacaacctgttcggccccaagagacccaaggccctgaagctgctgggcatggaggacgacgagccccccgccaagggcaagaagaagaagaagaagaagaaggaggaggagatcgacatcgacgtggacgaccccgccgtgagcagattccagtaccccttccacgagctgatggtgtgggccgtgctgatgaagagacagaagatggccgtgttcctgtggcagagaggcgaggagagcatggccaaggccctggtggcctgcaagctgtacaaggccatggcccacgagagcagcgagagcgacctggtggacgacatcagccaggacctggacaacaacagcaaggacttcggccagctggccctggagctgctggaccagagctacaagcacgacgagcagatcgccatgaagctgctgacctacgagctgaagaactggagcaacagcacctgcctgaagctggccgtggccgccaagcacagagacttcatcgcccacacctgcagccagatgctgctgaccgacatgtggatgggcagactgagaatgagaaagaaccccggcctgaaggtgatcatgggcatcctgctgccccccaccatcctgttcctggagttcagaacctacgacgacttcagctaccagaccagcaaggagaacgaggacggcaaggagaaggaggaggagaacaccgacgccaacgccgacgccggcagcagaaagggcgacgaggagaacgagcacaagaagcagagaagcatccccatcggcaccaagatctgcgagttctacaacgcccccatcgtgaagttctggttctacaccatcagctacctgggctacctgctgctgttcaactacgtgatcctggtgagaatggacggctggcccagcctgcaggagtggatcgtgatcagctacatcgtgagcctggccctggagaagatcagagagatcctgatgagcgagcccggcaagctgagccagaagatcaaggtgtggctgcaggagtactggaacatcaccgacctggtggccatcagcaccttcatgatcggcgccatcctgagactgcagaaccagccctacatgggctacggcagagtgatctactgcgtggacatcatcttctggtacatcagagtgctggacatcttcggcgtgaacaagtacctgggcccctacgtgatgatgatcggcaagatgatgatcgacatgctgtacttcgtggtgatcatgctggtggtgctgatgagcttcggcgtggccagacaggccatcctgcaccccgaggagaagcccagctggaagctggccagaaacatcttctacatgccctactggatgatctacggcgaggtgttcgccgaccagatcgacctgtacgccatggagatcaaccccccctgcggcgagaacctgtacgacgaggagggcaagagactgcccccctgcatccccggcgcctggctgacccccgccctgatggcctgctacctgctggtggccaacatcctgctggtgaacctgctgatcgccgtgttcaacaacaccttcttcgaggtgaagagcatcagcaaccaggtgtggaagttccagagataccagctgatcatgaccttccacgacagacccgtgctgcccccccccatgatcatcctgagccacatctacatcatcatcatgagactgagcggcagatgcagaaagaagagagagggcgaccaggaggagagagacagaggcctgaagctgttcctgagcgacgaggagctgaagagactgcacgagttcgaggagcagtgcgtgcaggagcacttcagagagaaggaggacgagcagcagagcagcagcgacgagagaatcagagtgaccagcgagagagtggagaacatgagcatgagactggaggagatcaacgagagagagaccttcatgaagaccagcctgcagaccgtggacctgagactggcccagctggaggagctgagcaacagaatggtgaacgccctggagaacctggccggcatcgacagaagcgacctgatccaggccagaagcagagccagcagcgagtgcgaggccacctacctgctgagacagagcagcatcaacagcgccgacggctacagcctgtacagataccacttcaacggcgaggagctgctgttcgaggacaccagcctgagcaccagccccggcaccggcgtgagaaagaagacctgcagcttcagaatcaaggaggagaaggacgtgaagacccacctggtgcccgagtgccagaacagcctgcacctgagcctgggcaccagcaccagcgccacccccgacggcagccacctggccgtggacgacctgaagaacgccgaggagagcaagctgggccccgacatcggcatcagcaaggaggacgacgagagacagaccgacagcaagaaggaggagaccatcagccccagcctgaacaagaccgacgtgatccacggccaggacaagagcgacgtgcagaacacccagctgaccgtggagaccaccaacatcgagggcaccatcagctaccccctggaggagaccaagatcaccagatacttccccgacgagaccatcaacgcctgcaagaccatgaagagcagaagcttcgtgtacagcagaggcagaaagctggtgggcggcgtgaaccaggacgtggagtacagcagcatcaccgaccagcagctgaccaccgagtggcagtgccaggtgcagaagatcaccagaagccacagcaccgacatcccctacatcgtgagcgaggccgccgtgcaggccgagcacaaggagcagttcgccgacatgcaggacgagcaccacgtggccgaggccatccccagaatccccagactgagcctgaccatcaccgacagaaacggcatggagaacctgctgagcgtgaagcccgaccagaccctgggcttccccagcctgagaagcaagagcctgcacggccaccccagaaacgtgaagagcatccagggcaagctggacagaagcggccacgccagcagcgtgagcagcctggtgatcgtgagcggcatgaccgccgaggagaagaaggtgaagaaggagaaggccagcaccgagaccgagtgctag

SEQ ID NO: 13308 - DNA, 4812 bp, synthetic construct
  misc_feature 1..4812: note = Description of Artificial Sequence: Synthetic coding sequence
  source 1..4812: mol_type = other DNA
atgaaggacagcaacagatgctgctgcggccagttcaccaaccagcacatcccccccctgcccagcgccacccccagcaagaacgaggaggagagcaagcaggtggagacccagcccgagaagtggagcgtggccaagcacacccagagctaccccaccgacagctacggcgtgctggagttccagggcggcggctacagcaacaaggccatgtacatcagagtgagctacgacaccaagcccgacagcctgctgcacctgatggtgaaggactggcagctggagctgcccaagctgctgatcagcgtgcacggcggcctgcagaacttcgagatgcagcccaagctgaagcaggtgttcggcaagggcctgatcaaggccgccatgaccaccggcgcctggatcttcaccggcggcgtgagcaccggcgtgatcagccacgtgggcgacgccctgaaggaccacagcagcaagagcagaggcagagtgtgcgccatcggcatcgccccctggggcatcgtggagaacaaggaggacctggtgggcaaggacgtgaccagagtgtaccagaccatgagcaaccccctgagcaagctgagcgtgctgaacaacagccacacccacttcatcctggccgacaacggcaccctgggcaagtacggcgccgaggtgaagctgagaagactgctggagaagcacatcagcctgcagaagatcaacaccagactgggccagggcgtgcccctggtgggcctggtggtggagggcggccccaacgtggtgagcatcgtgctggagtacctgcaggaggagccccccatccccgtggtgatctgcgacggcagcggcagagccagcgacatcctgagcttcgcccacaagtactgcgaggagggcggcatcatcaacgagagcctgagagagcagctgctggtgaccatccagaagaccttcaactacaacaaggcccagagccaccagctgttcgccatcatcatggagtgcatgaagaagaaggagctggtgaccgtgttcagaatgggcagcgagggccagcaggacatcgagatggccatcctgaccgccctgctgaagggcaccaacgtgagcgcccccgaccagctgagcctggccctggcctggaacagagtggacatcgccagaagccagatcttcgtgttcggcccccactggccccccctgggcagcctggccccccccaccgacagcaaggccaccgagaaggagaagaagccccccatggccaccaccaagggcggcagaggcaagggcaagggcaagaagaagggcaaggtgaaggaggaggtggaggaggagaccgaccccagaaagatcgagctgctgaactgggtgaacgccctggagcaggccatgctggacgccctggtgctggacagagtggacttcgtgaagctgctgatcgagaacggcgtgaacatgcagcacttcctgaccatccccagactggaggagctgtacaacaccagactgggcccccccaacaccctgcacctgctggtgagagacgtgaagaagagcaacctgccccccgactaccacatcagcctgatcgacatcggcctggtgctggagtacctgatgggcggcgcctacagatgcaactacaccagaaagaacttcagaaccctgtacaacaacctgttcggccccaagagacccaaggccctgaagctgctgggcatggaggacgacgagccccccgccaagggcaagaagaagaagaagaagaagaaggaggaggagatcgacatcgacgtggacgaccccgccgtgagcagattccagtaccccttccacgagctgatggtgtgggccgtgctgatgaagagacagaagatggccgtgttcctgtggcagagaggcgaggagagcatggccaaggccctggtggcctgcaagctgtacaaggccatggcccacgagagcagcgagagcgacctggtggacgacatcagccaggacctggacaacaacagcaaggacttcggccagctggccctggagctgctggaccagagctacaagcacgacgagcagatcgccatgaagctgctgacctacgagctgaagaactggagcaacagcacctgcctgaagctggccgtggccgccaagcacagagacttcatcgcccacacctgcagccagatgctgctgaccgacatgtggatgggcagactgagaatgagaaagaaccccggcctgaaggtgatcatgggcatcctgctgccccccaccatcctgttcctggagttcagaacctacgacgacttcagctaccagaccagcaaggagaacgaggacggcaaggagaaggaggaggagaacaccgacgccaacgccgacgccggcagcagaaagggcgacgaggagaacgagcacaagaagcagagaagcatccccatcggcaccaagatctgcgagttctacaacgcccccatcgtgaagttctggttctacaccatcagctacctgggctacctgctgctgttcaactacgtgatcctggtgagaatggacggctggcccagcctgcaggagtggatcgtgatcagctacatcgtgagcctggccctggagaagatcagagagatcctgatgagcgagcccggcaagctgagccagaagatcaaggtgtggctgcaggagtactggaacatcaccgacctggtggccatcagcaccttcatgatcggcgccatcctgagactgcagaaccagccctacatgggctacggcagagtgatctactgcgtggacatcatcttctggtacatcagagtgctggacatcttcggcgtgaacaagtacctgggcccctacgtgatgatgatcggcaagatgatgatcgacatgctgtacttcgtggtgatcatgctggtggtgctgatgagcttcggcgtggccagacaggccatcctgcaccccgaggagaagcccagctggaagctggccagaaacatcttctacatgccctactggatgatctacggcgaggtgttcgccgaccagatcgacctgtacgccatggagatcaaccccccctgcggcgagaacctgtacgacgaggagggcaagagactgcccccctgcatccccggcgcctggctgacccccgccctgatggcctgctacctgctggtggccaacatcctgctggtgaacctgctgatcgccgtgttcaacaacaccttcttcgaggtgaagagcatcagcaaccaggtgtggaagttccagagataccagctgatcatgaccttccacgacagacccgtgctgcccccccccatgatcatcctgagccacatctacatcatcatcatgagactgagcggcagatgcagaaagaagagagagggcgaccaggaggagagagacagaggcctgaagctgttcctgagcgacgaggagctgaagagactgcacgagttcgaggagcagtgcgtgcaggagcacttcagagagaaggaggacgagcagcagagcagcagcgacgagagaatcagagtgaccagcgagagagtggagaacatgagcatgagactggaggagatcaacgagagagagaccttcatgaagaccagcctgcagaccgtggacctgagactggcccagctggaggagctgagcaacagaatggtgaacgccctggagaacctggccggcatcgacagaagcgacctgatccaggccagaagcagagccagcagcgagtgcgaggccacctacctgctgagacagagcagcatcaacagcgccgacggctacagcctgtacagataccacttcaacggcgaggagctgctgttcgaggacaccagcctgagcaccagccccggcaccggcgtgagaaagaagacctgcagcttcagaatcaaggaggagaaggacgtgaagacccacctggtgcccgagtgccagaacagcctgcacctgagcctgggcaccagcaccagcgccacccccgacggcagccacctggccgtggacgacctgaagaacgccgaggagagcaagctgggccccgacatcggcatcagcaaggaggacgacgagagacagaccgacagcaagaaggaggagaccatcagccccagcctgaacaagaccgacgtgatccacggccaggacaagagcgacgtgcagaacacccagctgaccgtggagaccaccaacatcgagggcaccatcagctaccccctggaggagaccaagatcaccagatacttccccgacgagaccatcaacgcctgcaagaccatgaagagcagaagcttcgtgtacagcagaggcagaaagctggtgggcggcgtgaaccaggacgtggagtacagcagcatcaccgaccagcagctgaccaccgagtggcagtgccaggtgcagaagatcaccagaagccacagcaccgacatcccctacatcgtgagcgaggccgccgtgcaggccgagcacaaggagcagttcgccgacatgcaggacgagcaccacgtggccgaggccatccccagaatccccagactgagcctgaccatcaccgacagaaacggcatggagaacctgctgagcgtgaagcccgaccagaccctgggcttccccagcctgagaagcaagagcctgcacggccaccccagaaacgtgaagagcatccagggcaagctggacagaagcggccacgccagcagcgtgagcagcctggtgatcgtgagcggcatgaccgccgaggagaagaaggtgaagaaggagaaggccagcaccgagaccgagtgctag

SEQ ID NO: 13309 - DNA, 4929 bp, synthetic construct
  misc_feature 1..4929: note = Description of Artificial Sequence: Synthetic coding sequence
  source 1..4929: mol_type = other DNA
atgagcagcttcaagagaggcagcctgaagagcagcaccagcggcagccagaagggccagaagagctggatcgagaagaccttctgcaagagagagtgcatcttcgtgatccccagcatgaaggacagcaacagatgctgctgcggccagttcaccaaccagcacatcccccccctgcccagcgccacccccagcaagaacgaggaggagagcaagcaggtggagacccagcccgagaagtggagcgtggccaagcacacccagagctaccccaccgacagctacggcgtgctggagttccagggcggcggctacagcaacaaggccatgtacatcagagtgagctacgacaccaagcccgacagcctgctgcacctgatggtgaaggactggcagctggagctgcccaagctgctgatcagcgtgcacggcggcctgcagaacttcgagatgcagcccaagctgaagcaggtgttcggcaagggcctgatcaaggccgccatgaccaccggcgcctggatcttcaccggcggcgtgagcaccggcgtgatcagccacgtgggcgacgccctgaaggaccacagcagcaagagcagaggcagagtgtgcgccatcggcatcgccccctggggcatcgtggagaacaaggaggacctggtgggcaaggacgtgaccagagtgtaccagaccatgagcaaccccctgagcaagctgagcgtgctgaacaacagccacacccacttcatcctggccgacaacggcaccctgggcaagtacggcgccgaggtgaagctgagaagactgctggagaagcacatcagcctgcagaagatcaacaccagactgggccagggcgtgcccctggtgggcctggtggtggagggcggccccaacgtggtgagcatcgtgctggagtacctgcaggaggagccccccatccccgtggtgatctgcgacggcagcggcagagccagcgacatcctgagcttcgcccacaagtactgcgaggagggcggcatcatcaacgagagcctgagagagcagctgctggtgaccatccagaagaccttcaactacaacaaggcccagagccaccagctgttcgccatcatcatggagtgcatgaagaagaaggagctggtgaccgtgttcagaatgggcagcgagggccagcaggacatcgagatggccatcctgaccgccctgctgaagggcaccaacgtgagcgcccccgaccagctgagcctggccctggcctggaacagagtggacatcgccagaagccagatcttcgtgttcggcccccactggccccccctgggcagcctggccccccccaccgacagcaaggccaccgagaaggagaagaagccccccatggccaccaccaagggcggcagaggcaagggcaagggcaagaagaagggcaaggtgaaggaggaggtggaggaggagaccgaccccagaaagatcgagctgctgaactgggtgaacgccctggagcaggccatgctggacgccctggtgctggacagagtggacttcgtgaagctgctgatcgagaacggcgtgaacatgcagcacttcctgaccatccccagactggaggagctgtacaacaccagactgggcccccccaacaccctgcacctgctggtgagagacgtgaagaagagcaacctgccccccgactaccacatcagcctgatcgacatcggcctggtgctggagtacctgatgggcggcgcctacagatgcaactacaccagaaagaacttcagaaccctgtacaacaacctgttcggccccaagagacccaaggccctgaagctgctgggcatggaggacgacgagccccccgccaagggcaagaagaagaagaagaagaagaaggaggaggagatcgacatcgacgtggacgaccccgccgtgagcagattccagtaccccttccacgagctgatggtgtgggccgtgctgatgaagagacagaagatggccgtgttcctgtggcagagaggcgaggagagcatggccaaggccctggtggcctgcaagctgtacaaggccatggcccacgagagcagcgagagcgacctggtggacgacatcagccaggacctggacaacaacagcaaggacttcggccagctggccctggagctgctggaccagagctacaagcacgacgagcagatcgccatgaagctgctgacctacgagctgaagaactggagcaacagcacctgcctgaagctggccgtggccgccaagcacagagacttcatcgcccacacctgcagccagatgctgctgaccgacatgtggatgggcagactgagaatgagaaagaaccccggcctgaaggtgatcatgggcatcctgctgccccccaccatcctgttcctggagttcagaacctacgacgacttcagctaccagaccagcaaggagaacgaggacggcaaggagaaggaggaggagaacaccgacgccaacgccgacgccggcagcagaaagggcgacgaggagaacgagcacaagaagcagagaagcatccccatcggcaccaagatctgcgagttctacaacgcccccatcgtgaagttctggttctacaccatcagctacctgggctacctgctgctgttcaactacgtgatcctggtgagaatggacggctggcccagcctgcaggagtggatcgtgatcagctacatcgtgagcctggccctggagaagatcagagagatcctgatgagcgagcccggcaagctgagccagaagatcaaggtgtggctgcaggagtactggaacatcaccgacctggtggccatcagcaccttcatgatcggcgccatcctgagactgcagaaccagccctacatgggctacggcagagtgatctactgcgtggacatcatcttctggtacatcagagtgctggacatcttcggcgtgaacaagtacctgggcccctacgtgatgatgatcggcaagatgatgatcgacatgctgtacttcgtggtgatcatgctggtggtgctgatgagcttcggcgtggccagacaggccatcctgcaccccgaggagaagcccagctggaagctggccagaaacatcttctacatgccctactggatgatctacggcgaggtgttcgccgaccagatcgacctgtacgccatggagatcaaccccccctgcggcgagaacctgtacgacgaggagggcaagagactgcccccctgcatccccggcgcctggctgacccccgccctgatggcctgctacctgctggtggccaacatcctgctggtgaacctgctgatcgccgtgttcaacaacaccttcttcgaggtgaagagcatcagcaaccaggtgtggaagttccagagataccagctgatcatgaccttccacgacagacccgtgctgcccccccccatgatcatcctgagccacatctacatcatcatcatgagactgagcggcagatgcagaaagaagagagagggcgaccaggaggagagagacagaggcctgaagctgttcctgagcgacgaggagctgaagagactgcacgagttcgaggagcagtgcgtgcaggagcacttcagagagaaggaggacgagcagcagagcagcagcgacgagagaatcagagtgaccagcgagagagtggagaacatgagcatgagactggaggagatcaacgagagagagaccttcatgaagaccagcctgcagaccgtggacctgagactggcccagctggaggagctgagcaacagaatggtgaacgccctggagaacctggccggcatcgacagaagcgacctgatccaggccagaagcagagccagcagcgagtgcgaggccacctacctgctgagacagagcagcatcaacagcgccgacggctacagcctgtacagataccacttcaacggcgaggagctgctgttcgaggacaccagcctgagcaccagccccggcaccggcgtgagaaagaagacctgcagcttcagaatcaaggaggagaaggacgtgaagacccacctggtgcccgagtgccagaacagcctgcacctgagcctgggcaccagcaccagcgccacccccgacggcagccacctggccgtggacgacctgaagaacgccgaggagagcaagctgggccccgacatcggcatcagcaaggaggacgacgagagacagaccgacagcaagaaggaggagaccatcagccccagcctgaacaagaccgacgtgatccacggccaggacaagagcgacgtgcagaacacccagctgaccgtggagaccaccaacatcgagggcaccatcagctaccccctggaggagaccaagatcaccagatacttccccgacgagaccatcaacgcctgcaagaccatgaagagcagaagcttcgtgtacagcagaggcagaaagctggtgggcggcgtgaaccaggacgtggagtacagcagcatcaccgaccagcagctgaccaccgagtggcagtgccaggtgcagaagatcaccagaagccacagcaccgacatcccctacatcgtgagcgaggccgccgtgcaggccgagcacaaggagcagttcgccgacatgcaggacgagcaccacgtggccgaggccatccccagaatccccagactgagcctgaccatcaccgacagaaacggcatggagaacctgctgagcgtgaagcccgaccagaccctgggcttccccagcctgagaagcaagagcctgcacggccaccccagaaacgtgaagagcatccagggcaagctggacagaagcggccacgccagcagcgtgagcagcctggtgatcgtgagcggcatgaccgccgaggagaagaaggtgaagaaggagaaggccagcaccgagaccgagtgctag

SEQ ID NO: 13310 - DNA, 4173 bp, synthetic construct
  misc_feature 1..4173: note = Description of Artificial Sequence: Synthetic coding sequence
  source 1..4173: mol_type = other DNA
atgaaggacagcaacagatgctgctgcggccagttcaccaaccagcacatcccccccctgcccagcgccacccccagcaagaacgaggaggagagcaagcaggtggagacccagcccgagaagtggagcgtggccaagcacacccagagctaccccaccgacagctacggcgtgctggagttccagggcggcggctacagcaacaaggccatgtacatcagagtgagctacgacaccaagcccgacagcctgctgcacctgatggtgaaggactggcagctggagctgcccaagctgctgatcagcgtgcacggcggcctgcagaacttcgagatgcagcccaagctgaagcaggtgttcggcaagggcctgatcaaggccgccatgaccaccggcgcctggatcttcaccggcggcgtgagcaccggcgtgatcagccacgtgggcgacgccctgaaggaccacagcagcaagagcagaggcagagtgtgcgccatcggcatcgccccctggggcatcgtggagaacaaggaggacctggtgggcaaggacgtgaccagagtgtaccagaccatgagcaaccccctgagcaagctgagcgtgctgaacaacagccacacccacttcatcctggccgacaacggcaccctgggcaagtacggcgccgaggtgaagctgagaagactgctggagaagcacatcagcctgcagaagatcaacaccagactgggccagggcgtgcccctggtgggcctggtggtggagggcggccccaacgtggtgagcatcgtgctggagtacctgcaggaggagccccccatccccgtggtgatctgcgacggcagcggcagagccagcgacatcctgagcttcgcccacaagtactgcgaggagggcggcatcatcaacgagagcctgagagagcagctgctggtgaccatccagaagaccttcaactacaacaaggcccagagccaccagctgttcgccatcatcatggagtgcatgaagaagaaggagctggtgaccgtgttcagaatgggcagcgagggccagcaggacatcgagatggccatcctgaccgccctgctgaagggcaccaacgtgagcgcccccgaccagctgagcctggccctggcctggaacagagtggacatcgccagaagccagatcttcgtgttcggcccccactggccccccctgggcagcctggccccccccaccgacagcaaggccaccgagaaggagaagaagccccccatggccaccaccaagggcggcagaggcaagggcaagggcaagaagaagggcaaggtgaaggaggaggtggaggaggagaccgaccccagaaagatcgagctgctgaactgggtgaacgccctggagcaggccatgctggacgccctggtgctggacagagtggacttcgtgaagctgctgatcgagaacggcgtgaacatgcagcacttcctgaccatccccagactggaggagctgtacaacaccagactgggcccccccaacaccctgcacctgctggtgagagacgtgaagaagagcaacctgccccccgactaccacatcagcctgatcgacatcggcctggtgctggagtacctgatgggcggcgcctacagatgcaactacaccagaaagaacttcagaaccctgtacaacaacctgttcggccccaagagacccaaggccctgaagctgctgggcatggaggacgacgagccccccgccaagggcaagaagaagaagaagaagaagaaggaggaggagatcgacatcgacgtggacgaccccgccgtgagcagattccagtaccccttccacgagctgatggtgtgggccgtgctgatgaagagacagaagatggccgtgttcctgtggcagagaggcgaggagagcatggccaaggccctggtggcctgcaagctgtacaaggccatggcccacgagagcagcgagagcgacctggtggacgacatcagccaggacctggacaacaacagcaaggacttcggccagctggccctggagctgctggaccagagctacaagcacgacgagcagatcgccatgaagctgctgacctacgagctgaagaactggagcaacagcacctgcctgaagctggccgtggccgccaagcacagagacttcatcgcccacacctgcagccagatgctgctgaccgacatgtggatgggcagactgagaatgagaaagaaccccggcctgaaggtgatcatgggcatcctgctgccccccaccatcctgttcctggagttcagaacctacgacgacttcagctaccagaccagcaaggagaacgaggacggcaaggagaaggaggaggagaacaccgacgccaacgccgacgccggcagcagaaagggcgacgaggagaacgagcacaagaagcagagaagcatccccatcggcaccaagatctgcgagttctacaacgcccccatcgtgaagttctggttctacaccatcagctacctgggctacctgctgctgttcaactacgtgatcctggtgagaatggacggctggcccagcctgcaggagtggatcgtgatcagctacatcgtgagcctggccctggagaagatcagagagatcctgatgagcgagcccggcaagctgagccagaagatcaaggtgtggctgcaggagtactggaacatcaccgacctggtggccatcagcaccttcatgatcggcgccatcctgagactgcagaaccagccctacatgggctacggcagagtgatctactgcgtggacatcatcttctggtacatcagagtgctggacatcttcggcgtgaacaagtacctgggcccctacgtgatgatgatcggcaagatgatgatcgacatgctgtacttcgtggtgatcatgctggtggtgctgatgagcttcggcgtggccagacaggccatcctgcaccccgaggagaagcccagctggaagctggccagaaacatcttctacatgccctactggatgatctacggcgaggtgttcgccgaccagatcgacctgtacgccatggagatcaaccccccctgcggcgagaacctgtacgacgaggagggcaagagactgcccccctgcatccccggcgcctggctgacccccgccctgatggcctgctacctgctggtggccaacatcctgctggtgaacctgctgatcgccgtgttcaacaacaccttcttcgaggtgaagagcatcagcaaccaggtgtggaagttccagagataccagctgatcatgaccttccacgacagacccgtgctgcccccccccatgatcatcctgagccacatctacatcatcatcatgagactgagcggcagatgcagaaagaagagagagggcgaccaggaggagagagacagaggcctgaagctgttcctgagcgacgaggagctgaagagactgcacgagttcgaggagcagtgcgtgcaggagcacttcagagagaaggaggacgagcagcagagcagcagcgacgagagaatcagagtgaccagcgagagagtggagaacatgagcatgagactggaggagatcaacgagagagagaccttcatgaagaccagcctgcagaccgtggacctgagactggcccagctggaggagctgagcaacagaatggtgaacgccctggagaacctggccggcatcgacagaagcgacctgatccaggccagaagcagagccagcagcgagtgcgaggccacctacctgctgagacagagcagcatcaacagcgccgacggctacagcctgtacagataccacttcaacggcgaggagctgctgttcgaggacaccagcctgagcaccagccccggcaccggcgtgagaaagaagacctgcagcttcagaatcaaggaggagaaggacgtgaagacccacctggtgcccgagtgccagaacagcctgcacctgagcctgggcaccagcaccagcgccacccccgacggcagccacctggccgtggacgacctgaagaacgccgaggagagcaagctgggccccgacatcggcatcagcaaggaggacgacgagagacagaccgacagcaagaaggaggagaccatcagccccagcctgaacaagaccgacgtgatccacggccagtag

SEQ ID NO: 13311 - DNA, 4584 bp, synthetic construct
  misc_feature 1..4584: note = Description of Artificial Sequence: Synthetic coding sequence
  source 1..4584: mol_type = other DNA
atgtacatcagagtgagctacgacaccaagcccgacagcctgctgcacctgatggtgaaggactggcagctggagctgcccaagctgctgatcagcgtgcacggcggcctgcagaacttcgagatgcagcccaagctgaagcaggtgttcggcaagggcctgatcaaggccgccatgaccaccggcgcctggatcttcaccggcggcgtgagcaccggcgtgatcagccacgtgggcgacgccctgaaggaccacagcagcaagagcagaggcagagtgtgcgccatcggcatcgccccctggggcatcgtggagaacaaggaggacctggtgggcaaggacgtgaccagagtgtaccagaccatgagcaaccccctgagcaagctgagcgtgctgaacaacagccacacccacttcatcctggccgacaacggcaccctgggcaagtacggcgccgaggtgaagctgagaagactgctggagaagcacatcagcctgcagaagatcaacaccagactgggccagggcgtgcccctggtgggcctggtggtggagggcggccccaacgtggtgagcatcgtgctggagtacctgcaggaggagccccccatccccgtggtgatctgcgacggcagcggcagagccagcgacatcctgagcttcgcccacaagatcatcaacgagagcctgagagagcagctgctggtgaccatccagaagaccttcaactacaacaaggcccagagccaccagctgttcgccatcatcatggagtgcatgaagaagaaggagctggtgaccgtgttcagaatgggcagcgagggccagcaggacatcgagatggccatcctgaccgccctgctgaagggcaccaacgtgagcgcccccgaccagctgagcctggccctggcctggaacagagtggacatcgccagaagccagatcttcgtgttcggcccccactggccccccctgggcagcctggccccccccaccgacagcaaggccaccgagaaggagaagaagccccccatggccaccaccaagggcggcagaggcaagggcaagggcaagaagaagggcaaggtgaaggaggaggtggaggaggagaccgaccccagaaagatcgagctgctgaactgggtgaacgccctggagcaggccatgctggacgccctggtgctggacagagtggacttcgtgaagctgctgatcgagaacggcgtgaacatgcagcacttcctgaccatccccagactggaggagctgtacaacaccagactgggcccccccaacaccctgcacctgctggtgagagacgtgaagaagagcaacctgccccccgactaccacatcagcctgatcgacatcggcctggtgctggagtacctgatgggcggcgcctacagatgcaactacaccagaaagaacttcagaaccctgtacaacaacctgttcggccccaagagacccaaggccctgaagctgctgggcatggaggacgacgagccccccgccaagggcaagaagaagaagaagaagaagaaggaggaggagatcgacatcgacgtggacgaccccgccgtgagcagattccagtaccccttccacgagctgatggtgtgggccgtgctgatgaagagacagaagatggccgtgttcctgtggcagagaggcgaggagagcatggccaaggccctggtggcctgcaagctgtacaaggccatggcccacgagagcagcgagagcgacctggtggacgacatcagccaggacctggacaacaacagcaaggacttcggccagctggccctggagctgctggaccagagctacaagcacgacgagcagatcgccatgaagctgctgacctacgagctgaagaactggagcaacagcacctgcctgaagctggccgtggccgccaagcacagagacttcatcgcccacacctgcagccagatgctgctgaccgacatgtggatgggcagactgagaatgagaaagaaccccggcctgaaggtgatcatgggcatcctgctgccccccaccatcctgttcctggagttcagaacctacgacgacttcagctaccagaccagcaaggagaacgaggacggcaaggagaaggaggaggagaacaccgacgccaacgccgacgccggcagcagaaagggcgacgaggagaacgagcacaagaagcagagaagcatccccatcggcaccaagatctgcgagttctacaacgcccccatcgtgaagttctggttctacaccatcagctacctgggctacctgctgctgttcaactacgtgatcctggtgagaatggacggctggcccagcctgcaggagtggatcgtgatcagctacatcgtgagcctggccctggagaagatcagagagatcctgatgagcgagcccggcaagctgagccagaagatcaaggtgtggctgcaggagtactggaacatcaccgacctggtggccatcagcaccttcatgatcggcgccatcctgagactgcagaaccagccctacatgggctacggcagagtgatctactgcgtggacatcatcttctggtacatcagagtgctggacatcttcggcgtgaacaagtacctgggcccctacgtgatgatgatcggcaagatgatgatcgacatgctgtacttcgtggtgatcatgctggtggtgctgatgagcttcggcgtggccagacaggccatcctgcaccccgaggagaagcccagctggaagctggccagaaacatcttctacatgccctactggatgatctacggcgaggtgttcgccgaccagatcgacctgtacgccatggagatcaaccccccctgcggcgagaacctgtacgacgaggagggcaagagactgcccccctgcatccccggcgcctggctgacccccgccctgatggcctgctacctgctggtggccaacatcctgctggtgaacctgctgatcgccgtgttcaacaacaccttcttcgaggtgaagagcatcagcaaccaggtgtggaagttccagagataccagctgatcatgaccttccacgacagacccgtgctgcccccccccatgatcatcctgagccacatctacatcatcatcatgagactgagcggcagatgcagaaagaagagagagggcgaccaggaggagagagacagaggcctgaagctgttcctgagcgacgaggagctgaagagactgcacgagttcgaggagcagtgcgtgcaggagcacttcagagagaaggaggacgagcagcagagcagcagcgacgagagaatcagagtgaccagcgagagagtggagaacatgagcatgagactggaggagatcaacgagagagagaccttcatgaagaccagcctgcagaccgtggacctgagactggcccagctggaggagctgagcaacagaatggtgaacgccctggagaacctggccggcatcgacagaagcgacctgatccaggccagaagcagagccagcagcgagtgcgaggccacctacctgctgagacagagcagcatcaacagcgccgacggctacagcctgtacagataccacttcaacggcgaggagctgctgttcgaggacaccagcctgagcaccagccccggcaccggcgtgagaaagaagacctgcagcttcagaatcaaggaggagaaggacgtgaagacccacctggtgcccgagtgccagaacagcctgcacctgagcctgggcaccagcaccagcgccacccccgacggcagccacctggccgtggacgacctgaagaacgccgaggagagcaagctgggccccgacatcggcatcagcaaggaggacgacgagagacagaccgacagcaagaaggaggagaccatcagccccagcctgaacaagaccgacgtgatccacggccaggacaagagcgacgtgcagaacacccagctgaccgtggagaccaccaacatcgagggcaccatcagctaccccctggaggagaccaagatcaccagatacttccccgacgagaccatcaacgcctgcaagaccatgaagagcagaagcttcgtgtacagcagaggcagaaagctggtgggcggcgtgaaccaggacgtggagtacagcagcatcaccgaccagcagctgaccaccgagtggcagtgccaggtgcagaagatcaccagaagccacagcaccgacatcccctacatcgtgagcgaggccgccgtgcaggccgagcacaaggagcagttcgccgacatgcaggacgagcaccacgtggccgaggccatccccagaatccccagactgagcctgaccatcaccgacagaaacggcatggagaacctgctgagcgtgaagcccgaccagaccctgggcttccccagcctgagaagcaagagcctgcacggccaccccagaaacgtgaagagcatccagggcaagctggacagaagcggccacgccagcagcgtgagcagcctggtgatcgtgagcggcatgaccgccgaggagaagaaggtgaagaaggagaaggccagcaccgagaccgagtgctag

SEQ ID NO: 13312 - DNA, 1479 bp, synthetic construct
  misc_feature 1..1479: note = Description of Artificial Sequence: Synthetic coding sequence
  source 1..1479: mol_type = other DNA
atggccctgaacagcggcagcccccccgccatcggcccctactacgagaaccacggctaccagcccgagaacccctaccccgcccagcccaccgtggtgcccaccgtgtacgaggtgcaccccgcccagtactaccccagccccgtgccccagtacgcccccagagtgctgacccaggccagcaaccccgtggtgtgcacccagcccaagagccccagcggcaccgtgtgcaccagcaagaccaagaaggccctgtgcatcaccctgaccctgggcaccttcctggtgggcgccgccctggccgccggcctgctgtggaagttcatgggcagcaagtgcagcaacagcggcatcgagtgcgacagcagcggcacctgcatcaaccccagcaactggtgcgacggcgtgagccactgccccggcggcgaggacgagaacagatgcgtgagactgtacggccccaacttcatcctgcaggtgtacagcagccagagaaagagctggcaccccgtgtgccaggacgactggaacgagaactacggcagagccgcctgcagagacatgggctacaagaacaacttctacagcagccagggcatcgtggacgacagcggcagcaccagcttcatgaagctgaacaccagcgccggcaacgtggacatctacaagaagctgtaccacagcgacgcctgcagcagcaaggccgtggtgagcctgagatgcatcgcctgcggcgtgaacctgaacagcagcagacagagcagaatcgtgggcggcgagagcgccctgcccggcgcctggccctggcaggtgagcctgcacgtgcagaacgtgcacgtgtgcggcggcagcatcatcacccccgagtggatcgtgaccgccgcccactgcgtggagaagcccctgaacaacccctggcactggaccgccttcgccggcatcctgagacagagcttcatgttctacggcgccggctaccaggtggagaaggtgatcagccaccccaactacgacagcaagaccaagaacaacgacatcgccctgatgaagctgcagaagcccctgaccttcaacgacctggtgaagcccgtgtgcctgcccaaccccggcatgatgctgcagcccgagcagctgtgctggatcagcggctggggcgccaccgaggagaagggcaagaccagcgaggtgctgaacgccgccaaggtgctgctgatcgagacccagagatgcaacagcagatacgtgtacgacaacctgatcacccccgccatgatctgcgccggcttcctgcagggcaacgtggacagctgccagggcgacagcggcggccccctggtgaccagcaagaacaacatctggtggctgatcggcgacaccagctggggcagcggctgcgccaaggcctacagacccggcgtgtacggcaacgtgatggtgttcaccgactggatctacagacagatgagagccgacggctag

SEQ ID NO: 13313 - DNA, 1590 bp, synthetic construct
  misc_feature 1..1590: note = Description of Artificial Sequence: Synthetic coding sequence
  source 1..1590: mol_type = other DNA
atgccccccgccccccccggcggcgagagcggctgcgaggagagaggcgccgccggccacatcgagcacagcagatacctgagcctgctggacgccgtggacaacagcaagatggccctgaacagcggcagcccccccgccatcggcccctactacgagaaccacggctaccagcccgagaacccctaccccgcccagcccaccgtggtgcccaccgtgtacgaggtgcaccccgcccagtactaccccagccccgtgccccagtacgcccccagagtgctgacccaggccagcaaccccgtggtgtgcacccagcccaagagccccagcggcaccgtgtgcaccagcaagaccaagaaggccctgtgcatcaccctgaccctgggcaccttcctggtgggcgccgccctggccgccggcctgctgtggaagttcatgggcagcaagtgcagcaacagcggcatcgagtgcgacagcagcggcacctgcatcaaccccagcaactggtgcgacggcgtgagccactgccccggcggcgaggacgagaacagatgcgtgagactgtacggccccaacttcatcctgcaggtgtacagcagccagagaaagagctggcaccccgtgtgccaggacgactggaacgagaactacggcagagccgcctgcagagacatgggctacaagaacaacttctacagcagccagggcatcgtggacgacagcggcagcaccagcttcatgaagctgaacaccagcgccggcaacgtggacatctacaagaagctgtaccacagcgacgcctgcagcagcaaggccgtggtgagcctgagatgcatcgcctgcggcgtgaacctgaacagcagcagacagagcagaatcgtgggcggcgagagcgccctgcccggcgcctggccctggcaggtgagcctgcacgtgcagaacgtgcacgtgtgcggcggcagcatcatcacccccgagtggatcgtgaccgccgcccactgcgtggagaagcccctgaacaacccctggcactggaccgccttcgccggcatcctgagacagagcttcatgttctacggcgccggctaccaggtggagaaggtgatcagccaccccaactacgacagcaagaccaagaacaacgacatcgccctgatgaagctgcagaagcccctgaccttcaacgacctggtgaagcccgtgtgcctgcccaaccccggcatgatgctgcagcccgagcagctgtgctggatcagcggctggggcgccaccgaggagaagggcaagaccagcgaggtgctgaacgccgccaaggtgctgctgatcgagacccagagatgcaacagcagatacgtgtacgacaacctgatcacccccgccatgatctgcgccggcttcctgcagggcaacgtggacagctgccagggcgacagcggcggccccctggtgaccagcaagaacaacatctggtggctgatcggcgacaccagctggggcagcggctgcgccaaggcctacagacccggcgtgtacggcaacgtgatggtgttcaccgactggatctacagacagatgagagccgacggctag

SEQ ID NO: 13314 - DNA, 1470 bp, synthetic construct
  misc_feature 1..1470: note = Description of Artificial Sequence: Synthetic coding sequence
  source 1..1470: mol_type = other DNA
atggccctgaacagcggcagcccccccgccatcggcccctactacgagaaccacggctaccagcccgagaacccctaccccgcccagcccaccgtggtgcccaccgtgtacgaggtgcaccccgcccagtactaccccagccccgtgccccagtacgcccccagagtgctgacccaggccagcaaccccgtggtgtgcacccagcccaagagccccagcggcaccgtgtgcaccagcaagaccaagaaggccctgtgcatcaccctgaccctgggcaccttcctggtgggcgccgccctggccgccggcctgctgtggaagttcatgggcagcaagtgcagcaacagcggcatcgagtgcgacagcagcggcacctgcatcaaccccagcaactggtgcgacggcgtgagccactgccccggcggcgaggacgagaacagatgcgtgagactgtacggccccaacttcatcctgcaggtgtacagcagccagagaaagagctggcaccccgtgtgccaggacgactggaacgagaactacggcagagccgcctgcagagacatgggctacaagaacaacttctacagcagccagggcatcgtggacgacagcggcagcaccagcttcatgaagctgaacaccagcgccggcaacgtggacatctacaagaagctgtaccacagcgacgcctgcagcagcaaggccgtggtgagcctgagatgcatcgcctgcggcgtgaacctgaacagcagcagacagagcagaatcgtgggcggcgagagcgccctgcccggcgcctggccctggcaggtgagcctgcacgtgcagaacgtgcacgtgtgcggcggcagcatcatcacccccgagtggatcgtgaccgccgcccactgcgtggagaagcccctgaacaacccctggcactggaccgccttcgccggcatcctgagacagagcttcatgttctacggcgccggctaccaggtggagaaggtgatcagccaccccaactacgacagcaagaccaagaacaacgacatcgccctgatgaagctgcagaagcccctgaccttcaacgacctggtgaagcccgtgtgcctgcccaaccccggcatgatgctgcagcccgagcagctgtgctggatcagcggctggggcgccaccgaggagaagggcaagaccagcgaggtgctgaacgccgccaaggtgctgctgatcgagacccagagatgcaacagcagatacgtgtacgacaacctgatcacccccgccatgatctgcgccggcttcctgcagggcaacgtggacagctgccagggcgacagcggcggccccctggtgaccagcaagaacaacatctggtggctgatcggcgacaccagctggggcagcggctgcgccaaggcctacagacccggcgtgtacggcaacgtgatggtgttcaccgactggatctacagacagatgagatag

SEQ ID NO: 13315 - DNA, 240 bp, synthetic construct
  misc_feature 1..240: note = Description of Artificial Sequence: Synthetic coding sequence
  source 1..240: mol_type = other DNA
atggccctgaacagcggcagcccccccgccatcggcccctactacgagaaccacggctaccagcccgagaacccctaccccgcccagcccaccgtggtgcccaccgtgtacgaggtgcaccccgcccagtactaccccagccccgtgccccagtacgcccccagagtgctgacccaggccagcaaccccgtggtgtgcacccagcccaagagccccagcggcaccgtgtgcaccagctag

SEQ ID NO: 13316 - DNA, 1479 bp, synthetic construct; identical to SEQ ID NO: 13312
  misc_feature 1..1479: note = Description of Artificial Sequence: Synthetic coding sequence
  source 1..1479: mol_type = other DNA

SEQ ID NO: 13317 - DNA, 717 bp, synthetic construct
  misc_feature 1..717: note = Description of Artificial Sequence: Synthetic coding sequence
  source 1..717: mol_type = other DNA
atgtacgcccccggcggcgccggcctgcccggcggcagaagaagaagaagccccggcggcagcgccctgcccaagcagcccgagagaagcctggccagcgccctgcccggcgccctgagcatcaccgccctgtgcaccgccctggccgagcccgcctggctgcacatccacggcggcacctgcagcagacaggagctgggcgtgagcgacgtgctgggctacgtgcaccccgacctgctgaaggacttctgcatgaacccccagaccgtgctgctgctgagagtgatcgccgccttctgcttcctgggcatcctgtgcagcctgagcgccttcctgctggacgtgttcggccccaagcaccccgccctgaagatcaccagaagatacgccttcgcccacatcctgaccgtgctgcagtgcgccaccgtgatcggcttcagctactgggccagcgagctgatcctggcccagcagcagcagcacaagaagtaccacggcagccaggtgtacgtgaccttcgccgtgagcttctacctggtggccggcgccggcggcgccagcatcctggccaccgccgccaacctgctgagacactaccccaccgaggaggaggagcaggccctggagctgctgagcgagatggaggagaacgagccctaccccgccgagtacgaggtgatcaaccagttccagcccccccccgcctacaccccctag

SEQ ID NO: 13318 - DNA, 717 bp, synthetic construct; identical to SEQ ID NO: 13317
  misc_feature 1..717: note = Description of Artificial Sequence: Synthetic coding sequence
  source 1..717: mol_type = other DNA

SEQ ID NO: 13319 - DNA, 3075 bp, synthetic construct
  misc_feature 1..3075: note = Description of Artificial Sequence: Synthetic coding sequence
  source 1..3075: mol_type = other DNA
atgtgcgccagaatggccggcagaaccaccgccgcccccagaggcccctacggcccctggctgtgcctgctggtggccctggccctggacgtggtgagagtggactgcggccaggcccccctggaccccgtgtacctgcccgccgccctggagctgctggacgcccccgagcacttcagagtgcagcaggtgggccactacccccccgccaacagcagcctgagcagcagaagcgagaccttcctgctgctgcagccctggcccagagcccagcccctgctgagagccagctacccccccttcgccacccagcaggtggtgccccccagagtgaccgagccccaccagagacccgtgccctgggacgtgagagccgtgagcgtggaggccgccgtgacccccgccgagccctacgccagagtgctgttccacctgaagggccaggactggccccccggcagcggcagcctgccctgcgccagactgcacgccacccaccccgccggcaccgcccaccaggcctgcagattccagcccagcctgggcgcctgcgtggtggagctggagctgcccagccactggttcagccaggccagcaccaccagagccgagctggcctacaccctggagcccgccgccgagggccccggcggctgcggcagcggcgaggagaacgaccccggcgagcaggccctgcccgtgggcggcgtggagctgagacccgccgaccccccccagtaccaggaggtgcccctggacgaggccgtgaccctgagagtgcccgacatgcccgtgagacccggccagctgttcagcgccaccctgctgctgagacacaacttcaccgccagcctgctgaccctgagaatcaaggtgaagaagggcctgcacgtgaccgccgccagacccgcccagcccaccctgtggaccgccaagctggacagattcaagggcagcagacaccacaccaccctgatcacctgccacagagccggcctgaccgagcccgacagcagcagccccctggagctgagcgagttcctgtgggtggacttcgtggtggagaacagcaccggcggcggcgtggccgtgaccagacccgtgacctggcagctggagtaccccggccaggcccccgaggccgagaaggacaagatggtgtgggagatcctggtgagcgagagagacatcagagccctgatccccctggccaaggccgaggagctggtgaacaccgcccccctgaccggcgtgccccagcacgtgcccgtgagactggtgaccgtggacggcggcggcgccctggtggaggtgaccgagcacgtgggctgcgagagcgccaacacccaggtgctgcaggtgagcgaggcctgcgacgccgtgttcgtggccggcaaggagagcagaggcgccagaggcgtgagagtggacttctggtggagaagactgagagccagcctgagactgaccgtgtgggcccccctgctgcccctgagaatcgagctgaccgacaccaccctggagcaggtgagaggctggagagtgcccggccccgccgagggccccgccgagcccgccgccgaggccagcgacgaggccgagagaagagccagaggctgccacctgcagtaccagagagccggcgtgagattcctggcccccttcgccgcccaccccctggacggcggcagaagactgacccacctgctgggccccgactggctgctggacgtgagccacctggtggccccccacgccagagtgctggacagcagagtggccagcctggagggcggcagagtggtggtgggcagagagcccggcgtgaccagcatcgaggtgagaagccccctgagcgacagcatcctgggcgagcaggccctggccgtgaccgacgacaaggtgagcgtgctggagctgagagtgcagcccgtgatgggcatcagcctgaccctgagcagaggcaccgcccaccccggcgaggtgaccgccacctgctgggcccagagcgccctgcccgcccccaagcaggaggtggccctgagcctgtggctgagcttcagcgaccacaccgtggcccccgccgagctgtacgacagaagagacctgggcctgagcgtgagcgccgaggagcccggcgccatcctgcccgccgaggagcagggcgcccagctgggcgtggtggtgagcggcgccggcgccgagggcctgcccctgcacgtggccctgcacccccccgagccctgcagaagaggcagacacagagtgcccctggccagcggcaccgcctggctgggcctgccccccgccagcacccccgcccccgccctgcccagcagccccgcctggagcccccccgccaccgaggccaccatgggcggcaagagacaggtggccggcagcgtgggcggcaacaccggcgtgagaggcaagttcgagagagccgaggaggaggccagaaaggaggagaccgaggccagagaggaggaggaggaggaggaggaggagatggtgcccgccccccagcacgtgaccgagctggagctgggcatgtacgccctgctgggcgtgttctgcgtggccatcttcatcttcctggtgaacggcgtggtgttcgtgctgagataccagagaaaggagccccccgacagcgccaccgaccccaccagcccccagccccacaactgggtgtggctgggcaccgaccaggaggagctgagcagacagctggacagacagagccccggcccccccaagggcgagggcagctgcccctgcgagagcggcggcggcggcgaggcccccaccctggcccccggcccccccggcggcaccaccagcagcagcagcaccctggccagaaaggaggccggcggcagaagaaagagagtggagttcgtgaccttcgcccccgccccccccgcccagagccccgaggagcccgtgggcgcccccgccgtgcagagcatcctggtggccggcgaggaggacatcagatgggtgtgcgaggacatgggcctgaaggaccccgaggagctgagaaactacatggagagaatcagaggcagcagctag

SEQ ID NO: 13320 - DNA, 3072 bp, synthetic construct
  misc_feature 1..3072: note = Description of Artificial Sequence: Synthetic coding sequence
  source 1..3072: mol_type = other DNA
atgtgcgccagaatggccggcagaaccaccgccgcccccagaggcccctacggcccctggctgtgcctgctggtggccctggccctggacgtggtgagagtggactgcggccaggcccccctggaccccgtgtacctgcccgccgccctggagctgctggacgcccccgagcacttcagagtgcagcaggtgggccactacccccccgccaacagcagcctgagcagcagaagcgagaccttcctgctgctgcagccctggcccagagcccagcccctgctgagagccagctacccccccttcgccacccagcaggtggtgccccccagagtgaccgagccccaccagagacccgtgccctgggacgtgagagccgtgagcgtggaggccgccgtgacccccgccgagccctacgccagagtgctgttccacctgaagggccaggactggccccccggcagcggcagcctgccctgcgccagactgcacgccacccaccccgccggcaccgcccaccaggcctgcagattccagcccagcctgggcgcctgcgtggtggagctggagctgcccagccactggttcagccaggccagcaccaccagagccgagctggcctacaccctggagcccgccgccgagggccccggcggctgcggcagcggcgaggagaacgaccccggcgagcaggccctgcccgtgggcggcgtggagctgagacccgccgaccccccccagtaccaggaggtgcccctggacgaggccgtgaccctgagagtgcccgacatgcccgtgagacccggccagctgttcagcgccaccctgctgctgagacacaacttcaccgccagcctgctgaccctgagaatcaaggtgaagaagggcctgcacgtgaccgccgccagacccgcccagcccaccctgtggaccgccaagctggacagattcaagggcagcagacaccacaccaccctgatcacctgccacagagccggcctgaccgagcccgacagcagccccctggagctgagcgagttcctgtgggtggacttcgtggtggagaacagcaccggcggcggcgtggccgtgaccagacccgtgacctggcagctggagtaccccggccaggcccccgaggccgagaaggacaagatggtgtgggagatcctggtgagcgagagagacatcagagccctgatccccctggccaaggccgaggagctggtgaacaccgcccccctgaccggcgtgccccagcacgtgcccgtgagactggtgaccgtggacggcggcggcgccctggtggaggtgaccgagcacgtgggctgcgagagcgccaacacccaggtgctgcaggtgagcgaggcctgcgacgccgtgttcgtggccggcaaggagagcagaggcgccagaggcgtgagagtggacttctggtggagaagactgagagccagcctgagactgaccgtgtgggcccccctgctgcccctgagaatcgagctgaccgacaccaccctggagcaggtgagaggctggagagtgcccggccccgccgagggccccgccgagcccgccgccgaggccagcgacgaggccgagagaagagccagaggctgccacctgcagtaccagagagccggcgtgagattcctggcccccttcgccgcccaccccctggacggcggcagaagactgacccacctgctgggccccgactggctgctggacgtgagccacctggtggccccccacgccagagtgctggacagcagagtggccagcctggagggcggcagagtggtggtgggcagagagcccggcgtgaccagcatcgaggtgagaagccccctgagcgacagcatcctgggcgagcaggccctggccgtgaccgacgacaaggtgagcgtgctggagctgagagtgcagcccgtgatgggcatcagcctgaccctgagcagaggcaccgcccaccccggcgaggtgaccgccacctgctgggcccagagcgccctgcccgcccccaagcaggaggtggccctgagcctgtggctgagcttcagcgaccacaccgtggcccccgccgagctgtacgacagaagagacctgggcctgagcgtgagcgccgaggagcccggcgccatcctgcccgccgaggagcagggcgcccagctgggcgtggtggtgagcggcgccggcgccgagggcctgcccctgcacgtggccctgcacccccccgagccctgcagaagaggcagacacagagtgcccctggccagcggcaccgcctggctgggcctgccccccgccagcacccccgcccccgccctgcccagcagccccgcctggagcccccccgccaccgaggccaccatgggcggcaagagacaggtggccggcagcgtgggcggcaacaccggcgtgagaggcaagttcgagagagccgaggaggaggccagaaaggaggagaccgaggccagagaggaggaggaggaggaggaggaggagatggtgcccgccccccagcacgtgaccgagctggagctgggcatgtacgccctgctgggcgtgttctgcgtggccatcttcatcttcctggtgaacggcgtggtgttcgtgctgagataccagagaaaggagccccccgacagcgccaccgaccccaccagcccccagccccacaactgggtgtggctgggcaccgaccaggaggagctgagcagacagctggacagacagagccccggcccccccaagggcgagggcagctgcccctgcgagagcggcggcggcggcgaggcccccaccctggcccccggcccccccggcggcaccaccagcagcagcagcaccctggccagaaaggaggccggcggcagaagaaagagagtggagttcgtgaccttcgcccccgccccccccgcccagagccccgaggagcccgtgggcgcccccgccgtgcagagcatcctggtggccggcgaggaggacatcagatgggtgtgcgaggacatgggcctgaaggaccccgaggagctgagaaactacatggagagaatcagaggcagcagctag

SEQ ID NO: 13321 - DNA, 1026 bp, synthetic construct
  misc_feature 1..1026: note = Description of Artificial Sequence: Synthetic coding sequence
  source 1..1026: mol_type = other DNA
atgctgcccgagcagctgtacttcctgcagagcccccccgaggaggagcccgagtaccaccccgacgccagcgcccaggagctgaacgtgagagagagcgacgtgagagtgtgcgacgagagcagctgcaagtacggcggcgtgtgcaaggaggacggcgacggcctgaagtgcgcctgccagttccagtgccacaccaactacatccccgtgtgcggcagcaacggcgacacctaccagaacgagtgcttcctgagaagagccgcctgcaagcaccagaaggagatcaccgtgatcgccagaggcccctgctacagcgacaacggcagcggcagcggcgagggcgaggaggagggcagcggcgccgaggtgcacagaaagcacagcaagtgcggcccctgcaagtacaaggccgagtgcgacgaggacgccgagaacgtgggctgcgtgtgcaacatcgactgcagcggctacagcttcaaccccgtgtgcgccagcgacggcagcagctacaacaacccctgcttcgtgagagaggccagctgcatcaagcaggagcagatcgacatcagacacctgggccactgcaccgacaccgacgacaccagcctgctgggcaagaaggacgacggcctgcagtacagacccgacgtgaaggacgccagcgaccagagagaggacgtgtacatcggcaaccacatgccctgccccgagaacctgaacggctactgcatccacggcaagtgcgagttcatctacagcacccagaaggccagctgcagatgcgagagcggctacaccggccagcactgcgagaagaccgacttcagcatcctgtacgtggtgcccagcagacagaagctgacccacgtgctgatcgccgccatcatcggcgccgtgcagatcgccatcatcgtggccatcgtgatgtgcatcaccagaaagtgccccaagaacaacagaggcagaagacagaagcagaacctgggccacttcaccagcgacaccagcagcagaatggtgtag

SEQ ID NO: 13322 - DNA, 1143 bp, synthetic construct
  misc_feature 1..1143: note = Description of Artificial Sequence: Synthetic coding sequence
  source 1..1143: mol_type = other DNA
atgggcgccgccgccgccgaggcccccctgagactgcccgccgccccccccctggccttctgctgctacaccagcgtgctgctgctgttcgccttcagcctgcccggcagcagagccagcaaccagccccccggcggcggcggcggcagcggcggcgactgccccggcggcaagggcaagagcatcaactgcagcgagctgaacgtgagagagagcgacgtgagagtgtgcgacgagagcagctgcaagtacggcggcgtgtgcaaggaggacggcgacggcctgaagtgcgcctgccagttccagtgccacaccaactacatccccgtgtgcggcagcaacggcgacacctaccagaacgagtgcttcctgagaagagccgcctgcaagcaccagaaggagatcaccgtgatcgccagaggcccctgctacagcgacaacggcagcggcagcggcgagggcgaggaggagggcagcggcgccgaggtgcacagaaagcacagcaagtgcggcccctgcaagtacaaggccgagtgcgacgaggacgccgagaacgtgggctgcgtgtgcaacatcgactgcagcggctacagcttcaaccccgtgtgcgccagcgacggcagcagctacaacaacccctgcttcgtgagagaggccagctgcatcaagcaggagcagatcgacatcagacacctgggccactgcaccgacaccgacgacaccagcctgctgggcaagaaggacgacggcctgcagtacagacccgacgtgaaggacgccagcgaccagagagaggacgtgtacatcggcaaccacatgccctgccccgagaacctgaacggctactgcatccacggcaagtgcgagttcatctacagcacccagaaggccagctgcagatgcgagagcggctacaccggccagcactgcgagaagaccgacttcagcatcctgtacgtggtgcccagcagacagaagctgacccacgtgctgatcgccgccatcatcggcgccgtgcagatcgccatcatcgtggccatcgtgatgtgcatcaccagaaagtgccccaagaacaacagaggcagaagacagaagcagaacctgggccacttcaccagcgacaccagcagcagaatggtgtag

SEQ ID NO: 13323 - DNA, 393 bp, synthetic construct
  misc_feature 1..393: note = Description of Artificial Sequence: Synthetic coding sequence
  source 1..393: mol_type = other DNA
atgcaggagagaaccggcgccgccaccgccagaagagagagcctgccccaggccaacaaccccgagcagctgtgcaagcagagatgcatcaacgaggccagctggaccatgaagagagtgctgagctgcgtgcccgagcccaccgtggtgatggccgccagagccctgtgcatgctgggcctggtgctggccctgctgagcagcagcagcgccgaggagtacgtgggcctgagcgccaaccagtgcgccgtgcccgccaaggacagagtggactgcggctacccccacgtgacccccaaggagtgcaacaacagaggctgctgcttcgacagcagaatccccggcgtgccctggtgcttcaagcccctgcaggaggccgagtgcaccttctag

SEQ ID NO: 13324 - DNA, 285 bp, synthetic construct
  misc_feature 1..285: note = Description of Artificial Sequence: Synthetic coding sequence
  source 1..285: mol_type = other DNA
atgaagagagtgctgagctgcgtgcccgagcccaccgtggtgatggccgccagagccctgtgcatgctgggcctggtgctggccctgctgagcagcagcagcgccgaggagtacgtgggcctgagcgccaaccagtgcgccgtgcccgccaaggacagagtggactgcggctacccccacgtgacccccaaggagtgcaacaacagaggctgctgcttcgacagcagaatccccggcgtgccctggtgcttcaagcccctgcaggaggccgagtgcaccttctag

SEQ ID NO: 13325 - DNA, 1497 bp, synthetic construct
  misc_feature 1..1497: note = Description of Artificial Sequence: Synthetic coding sequence
  source 1..1497: mol_type = other DNA
atggccctgcccaccctgcccagctactggtgcagccagcagagactgaaccagcagctggccagacagagagagcaggaggccagactgagacagcagtgggagcagaacagcagatacttcagaatgagcgacatctgcagcagcaagcaggccgagtggagcagcaagaccagctaccagagaagcatgcacgcctaccagagagagaagatgaaggaggagaagagaagaagcctggaggccagaagagagaagctgagacagctgatgcaggaggagcaggacctgctggccagagagctggaggagctgagactgagcatgaacctgcaggagagaagaatcagagagcagcacggcaagctgaagagcgccaaggaggagcagagaaagctgatcgccgagcagctgctgtacgagcactggaagaagaacaaccccaagctgagagagatggagctggacctgcaccagaagcacgtggtgaacagctgggagatgcagaaggaggagaagaagcagcaggaggccaccgccgagcaggagaacaagagatacgagaacgagtacgagagagccagaagagaggccctggagagaatgaaggccgaggaggagagaagacagctggaggacaagctgcaggccgaggccctgctgcagcagatggaggagctgaagctgaaggaggtggaggccaccaagctgaagaaggagcaggagaacctgctgaagcagagatgggagctggagagactggaggaggagagaaagcagatggaggccttcagacagaaggccgagctgggcagattcctgagacaccagtacaacgcccagctgagcagaagaacccagcagatccaggaggagctggaggccgacagaagaatcctgcaggccctgctggagaaggaggacgagagccagagactgcacctggccagaagagagcaggtgatggccgacgtggcctggatgaagcaggccatcgaggagcagctgcagctggagagagccagagaggccgagctgcagatgctgctgagagaggaggccaaggagatgtgggagaagagagaggccgagtgggccagagagagaagcgccagagacagactgatgagcgaggtgctgaccggcagacagcagcagatccaggagaagatcgagcagaacagaagagcccaggaggagagcctgaagcacagagagcagctgatcagaaacctggaggaggtgagagagctggccagaagagagaaggaggagagcgagaagctgaagagcgccagaaagcaggagctggaggcccaggtggccgagagaagactgcaggcctgggaggccgaccagcaggaggaggaggaggaggaggaggccagaagagtggagcagctgagcgacgccctgctgcagcaggaggccgagaccatggccgagcagggctacagacccaagccctacggccaccccaagatcgcctggaactag

SEQ ID NO: 13326 - DNA, 1497 bp, synthetic construct; identical to SEQ ID NO: 13325
  misc_feature 1..1497: note = Description of Artificial Sequence: Synthetic coding sequence
  source 1..1497: mol_type = other DNA

SEQ ID NO: 13327 - DNA, 525 bp, synthetic construct
  misc_feature 1..525: note = Description of Artificial Sequence: Synthetic coding sequence
  source 1..525: mol_type = other DNA
atggccctgcccaccctgcccagctactggtgcagccagcagagactgaaccagcagctggccagacagagagagcaggaggccagactgagacagcagtgggagcagaacagcagatacttcagaatgagcgacatctgcagcagcaagcaggccgagtggagcagcaagaccagctaccagagaagcatgcacgcctaccagagagagaagatgaaggaggagaagagaagaagcctggaggccagaagagagaagctgagacagctgatgcaggaggagcaggacctgctggccagagagctggaggagctgagactgagcatgaacctgcaggagagaagaatcagagagcagcacggcaagctgaagagcgccaaggaggagcagagaaagctgatcgccgagcagctgctgtacgagcactggaagaagaacaaccccaagctgagagagatggagctggacctgcaccagaagcacgtggtgaacagctgggagatgcagaaggaggagaagaagtag

SEQ ID NO: 13328 - DNA, 663 bp, synthetic construct
  misc_feature 1..663: note = Description of Artificial Sequence: Synthetic coding sequence
  source 1..663: mol_type = other DNA
atggccctgcccaccctgcccagctactggtgcagccagcagagactgaaccagcagctggccagacagagagagcaggaggccagactgagacagcagtgggagcagaacagcagatacttcagaatgagcgacatctgcagcagcaagcaggccgagtggagcagcaagaccagctaccagagaagcatgcacgcctaccagagagagaagatgaaggaggagaagagaagaagcctggaggccagaagagagaagctgagacagctgatgcaggaggagcaggacctgctggccagagagctggaggagctgagactgagcatgaacctgcaggagagaagaatcagagagcagcacggcaagctgaagagcgccaaggaggagcagagaaagctgatcgccgagcagctgctgtacgagcactggaagaagaacaaccccaagctgagagagatggagctggacctgcaccagaagcacgtggtgaacagctgggagatgcagaaggaggagaagaagcagcaggaggccaccgccgagcaggagaacaagagatacgagaacgagtacgagagagccagaagagaggccctggagagaatgaaggccgaggaggagagaagactgagcagaaccgacggccacaagagaaacccctag

SEQ ID NO: 13329 - DNA, 1497 bp, synthetic construct; identical to SEQ ID NO: 13325
  misc_feature 1..1497: note = Description of Artificial Sequence: Synthetic coding sequence
  source 1..1497: mol_type = other DNA

SEQ ID NO: 13330 - DNA, 3090 bp, synthetic construct
  misc_feature 1..3090: note = Description of Artificial Sequence: Synthetic coding sequence
  source 1..3090: mol_type = other DNA
atgcagaccaacgagggcgaggtgagcgaggagagcagcagcaaggtggagcaggaggacttcgtgatggagggccacggcaagacccccccccccggcgaggagagcaagcaggagaaggagcaggagagagaggagcagctgatggaggacaagaagagaaagaaggaggacaagaagaagaaggaggccacccagaaggtgaccgagcagaagaccaaggtgcccgaggtgaccaagcccagcctgagccagcccaccgccgccagccccatcggcagcagccccagcccccccgtgaacggcggcaacaacgccaagagagtggccgtgcccaacggccagccccccagcgccgccagatacatgcccagagaggtgccccccagattcagatgccagcaggaccacaaggtgctgctgaagagaggccagccccccccccccagctgcatgctgctgggcggcggcgccggcccccccccctgcaccgcccccggcgccaaccccaacaacgcccaggtgaccggcgccctgctgcagagcgagagcggcaccgcccccgtgtggagcaagagcaccccccccgcccccgacaacggcaccagcgcctggggcgagcccaacgagagcagccccggctggggcgagatggacgacaccggcgccagcaccaccggctggggcaacacccccgccaacgcccccaacgccatgaagcccaacagcaagagcatgcaggacggctggggcgagagcgacggccccgtgaccggcgccagacaccccagctgggaggaggaggaggacggcggcgtgtggaacaccaccggcagccagggcagcgccagcagccacaacagcgccagctggggccagggcggcaagaagcagatgaagtgcagcctgaagggcggcaacaacgacagctggatgaaccccctggccaagcagttcagcaacatgggcctgctgagccagaccgaggacaaccccagcagcaagatggacctgagcgtgggcagcctgagcgacaagaagttcgacgtggacaagagagccatgaacctgggcgacttcaacgacatcatgagaaaggacagaagcggcttcagaccccccaacagcaaggacatgggcaccaccgacagcggcccctacttcgagaagggcggcagccacggcctgttcggcaacagcaccgcccagagcagaggcctgcacacccccgtgcagcccctgaacagcagccccagcctgagagcccaggtgcccccccagttcatcagcccccaggtgagcgccagcatgctgaagcagttccccaacagcggcctgagccccggcctgttcaacgtgggcccccagctgagcccccagcagatcgccatgctgagccagctgccccagatcccccagttccagctggcctgccagctgctgctgcagcagcagcagcagcagcagctgctgcagaaccagagaaagatcagccaggccgtgagacagcagcaggagcagcagctggccagaatggtgagcgccctgcagcagcagcagcagcagcagcagagacagcccggcatgaagcacagccccagccaccccgtgggccccaagccccacctggacaacatggtgcccaacgccctgaacgtgggcctgcccgacctgcagaccaagggccccatccccggctacggcagcggcttcagcagcggcggcatggactacggcatggtgggcggcaaggaggccggcaccgagagcagattcaagcagtggaccagcatgatggagggcctgcccagcgtggccacccaggaggccaacatgcacaagaacggcgccatcgtggcccccggcaagaccagaggcggcagcccctacaaccagttcgacatcatccccggcgacaccctgggcggccacaccggccccgccggcgacagctggctgcccgccaagagcccccccaccaacaagatcggcagcaagagcagcaacgccagctggccccccgagttccagcccggcgtgccctggaagggcatccagaacatcgaccccgagagcgacccctacgtgacccccggcagcgtgctgggcggcaccgccaccagccccatcgtggacaccgaccaccagctgctgagagacaacaccaccggcagcaacagcagcctgaacaccagcctgcccagccccggcgcctggccctacagcgccagcgacaacagcttcaccaacgtgcacagcaccagcgccaagttccccgactacaagagcacctggagccccgaccccatcggccacaaccccacccacctgagcaacaagatgtggaagaaccacatcagcagcagaaacaccacccccctgcccagacccccccccggcctgaccaaccccaagcccagcagcccctggagcagcaccgcccccagaagcgtgagaggctggggcacccaggacagcagactggccagcgccagcacctggagcgacggcggcagcgtgagacccagctactggctggtgctgcacaacctgaccccccagatcgacggcagcaccctgagaaccatctgcatgcagcacggccccctgctgaccttccacctgaacctgacccagggcaccgccctgatcagatacagcaccaagcaggaggccgccaaggcccagaccgccctgcacatgtgcgtgctgggcaacaccaccatcctggccgagttcgccaccgacgacgaggtgagcagattcctggcccaggcccagccccccacccccgccgccacccccagcgcccccgccgccggctggcagagcctggagaccggccagaaccagagcgaccccgtgggccccgccctgaacctgttcggcggcagcaccggcctgggccagtggagcagcagcgccggcggcagcagcggcgccgacctggccggcgccagcctgtggggcccccccaactacagcagcagcctgtggggcgtgcccaccgtggaggacccccacagaatgggcagccccgcccccctgctgcccggcgacctgctgggcggcggcagcgacagcatctag

SEQ ID NO: 13331 - DNA, 5172 bp, synthetic construct
  misc_feature 1..5172: note = Description of Artificial Sequence: Synthetic coding sequence
  source 1..5172: mol_type = other DNA
atgagagagaaggagcaggagagagaggagcagctgatggaggacaagaagagaaagaaggaggacaagaagaagaaggaggccacccagaaggtgaccgagcagaagaccaaggtgcccgaggtgaccaagcccagcctgagccagcccaccgccgccagccccatcggcagcagccccagcccccccgtgaacggcggcaacaacgccaagagagtggccgtgcccaacggccagccccccagcgccgccagatacatgcccagagaggtgccccccagattcagatgccagcaggaccacaaggtgctgctgaagagaggccagccccccccccccagctgcatgctgctgggcggcggcgccggcccccccccctgcaccgcccccggcgccaaccccaacaacgcccaggtgaccggcgccctgctgcagagcgagagcggcaccgcccccgacagcaccctgggcggcgccgccgccagcaactacgccaacagcacctggggcagcggcgccagcagcaacaacggcaccagccccaaccccatccacatctgggacaaggtgatcgtggacggcagcgacatggaggagtggccctgcatcgccagcaaggacaccgagagcagcagcgagaacaccaccgacaacaacagcgccagcaaccccggcagcgagaagagcaccctgcccggcagcaccaccagcaacaagggcaagggcagccagtgccagagcgccagcagcggcaacgagtgcaacctgggcgtgtggaagagcgaccccaaggccaagagcgtgcagagcagcaacagcaccaccgagaacaacaacggcctgggcaactggagaaacgtgagcggccaggacagaatcggccccggcagcggcttcagcaacttcaaccccaacagcaaccccagcgcctggcccgccctggtgcaggagggcaccagcagaaagggcgccctggagaccgacaacagcaacagcagcgcccaggtgagcaccgtgggccagaccagcagagagcagcagagcaagatggagaacgccggcgtgaacttcgtggtgagcggcagagagcaggcccagatccacaacaccgacggccccaagaacggcaacaccaacagcctgaacctgagcagccccaaccccatggagaacaagggcatgcccttcggcatgggcctgggcaacaccagcagaagcaccgacgcccccagccagagcaccggcgacagaaagaccggcagcgtgggcagctggggcgccgccagaggccccagcggcaccgacaccgtgagcggccagagcaacagcggcaacaacggcaacaacggcaaggagagagaggacagctggaagggcgccagcgtgcagaagagcaccggcagcaagaacgacagctgggacaacaacaacagaagcaccggcggcagctggaacttcggcccccaggacagcaacgacaacaagtggggcgagggcaacaagatgaccagcggcgtgagccagggcgagtggaagcagcccaccggcagcgacgagctgaagatcggcgagtggagcggccccaaccagcccaacagcagcaccggcgcctgggacaaccagaagggccaccccctgcccgagaaccagggcaacgcccaggccccctgctggggcagaagcagcagcagcaccggcagcgaggtgggcggccagagcaccggcagcaaccacaaggccggcagcagcgacagccacaacagcggcagaagaagctacagacccacccaccccgactgccaggccgtgctgcagaccctgctgagcagaaccgacctggaccccagagtgctgagcaacaccggctggggccagacccagatcaagcaggacaccgtgtgggacatcgaggaggtgcccagacccgagggcaagagcgacaagggcaccgagggctgggagagcgccgccacccagaccaagaacagcggcggctggggcgacgcccccagccagagcaaccagatgaagagcggctggggcgagctgagcgccagcaccgagtggaaggaccccaagaacaccggcggctggaacgactacaagaacaacaacagcagcaactggggcggcggcagacccgacgagaagacccccagcagctggaacgagaaccccagcaaggaccagggctggggcggcggcagacagcccaaccagggctggagcagcggcaagaacggctggggcgaggaggtggaccagaccaagaacagcaactgggagagcagcgccagcaagcccgtgagcggctggggcgagggcggccagaacgagatcggcacctggggcaacggcggcaacgccagcctggccagcaagggcggctgggaggactgcaagagaagccccgcctggaacgagaccggcagacagcccaacagctggaacaagcagcaccagcagcagcagcccccccagcagcccccccccccccagcccgaggccagcggcagctggggcggcccccccccccccccccccggcaacgtgagacccagcaacagcagctggagcagcggcccccagcccgccacccccaaggacgaggagcccagcggctgggaggagcccagcccccagagcatcagcagaaagatggacatcgacgacggcaccagcgcctggggcgaccccaacagctacaactacaagaacgtgaacctgtgggacaagaacagccagggcggccccgcccccagagagcccaacctgcccacccccatgaccagcaagagcgccagcgacagcaagagcatgcaggacggctggggcgagagcgacggccccgtgaccggcgccagacaccccagctgggaggaggaggaggacggcggcgtgtggaacaccaccggcagccagggcagcgccagcagccacaacagcgccagctggggccagggcggcaagaagcagatgaagtgcagcctgaagggcggcaacaacgacagctggatgaaccccctggccaagcagttcagcaacatgggcctgctgagccagaccgaggacaaccccagcagcaagatggacctgagcgtgggcagcctgagcgacaagaagttcgacgtggacaagagagccatgaacctgggcgacttcaacgacatcatgagaaaggacagaagcggcttcagaccccccaacagcaaggacatgggcaccaccgacagcggcccctacttcgagaagggcggcagccacggcctgttcggcaacagcaccgcccagagcagaggcctgcacacccccgtgcagcccctgaacagcagccccagcctgagagcccaggtgcccccccagttcatcagcccccaggtgagcgccagcatgctgaagcagttccccaacagcggcctgagccccggcctgttcaacgtgggcccccagctgagcccccagcagatcgccatgctgagccagctgccccagatcccccagttccagctggcctgccagctgctgctgcagcagcagcagcagcagcagctgctgcagaaccagagaaagatcagccaggccgtgagacagcagcaggagcagcagctggccagaatggtgagcgccctgcagcagcagcagcagcagcagcagagacagcccggcatgaagcacagccccagccaccccgtgggccccaagccccacctggacaacatggtgcccaacgccctgaacgtgggcctgcccgacctgcagaccaagggccccatccccggctacggcagcggcttcagcagcggcggcatggactacggcatggtgggcggcaaggaggccggcaccgagagcagattcaagcagtggaccagcatgatggagggcctgcccagcgtggccacccaggaggccaacatgcacaagaacggcgccatcgtggcccccggcaagaccagaggcggcagcccctacaaccagttcgacatcatccccggcgacaccctgggcggccacaccggccccgccggcgacagctggctgcccgccaagagcccccccaccaacaagatcggcagcaagagcagcaacgccagctggccccccgagttccagcccggcgtgccctggaagggcatccagaacatcgaccccgagagcgacccctacgtgacccccggcagcgtgctgggcggcaccgccaccagccccatcgtggacaccgaccaccagctgctgagagacaacaccaccggcagcaacagcagcctgaacaccagcctgcccagccccggcgcctggccctacagcgccagcgacaacagcttcaccaacgtgcacagcaccagcgccaagttccccgactacaagagcacctggagccccgaccccatcggccacaaccccacccacctgagcaacaagatgtggaagaaccacatcagcagcagaaacaccacccccctgcccagacccccccccggcctgaccaaccccaagcccagcagcccctggagcagcaccgcccccagaagcgtgagaggctggggcacccaggacagcagactggccagcgccagcacctggagcgacggcggcagcgtgagacccagctactggctggtgctgcacaacctgaccccccagatcgacggcagcaccctgagaaccatctgcatgcagcacggccccctgctgaccttccacctgaacctgacccagggcaccgccctgatcagatacagcaccaagcaggaggccgccaaggcccagaccgccctgcacatgtgcgtgctgggcaacaccaccatcctggccgagttcgccaccgacgacgaggtgagcagattcctggcccaggcccagccccccacccccgccgccacccccagcgcccccgccgccggctggcagagcctggagaccggccagaaccagagcgaccccgtgggccccgccctgaacctgttcggcggcagcaccggcctgggccagtggagcagcagcgccggcggcagcagcggcgccgacctggccggcgccagcctgtggggcccccccaactacagcagcagcctgtggggcgtgcccaccgtggaggacccccacagaatgggcagccccgcccccctgctgcccggcgacctgctgggcggcggcagcgacagcatctag

SEQ ID NO: 13332 - DNA, 5172 bp, synthetic construct
  misc_feature 1..5172: note = Description of Artificial Sequence: Synthetic coding sequence
  source 1..5172: mol_type = other DNA
atgagagagaaggagcaggagagagaggagcagctgatggaggacaagaagagaaagaaggaggacaagaagaagaaggaggccacccagaagcacagcaaccagaagaccgccatgcccgaggtgaccaagcccagcctgagccagcccaccgccgccagccccatcggcagcagccccagcccccccgtgaacggcggcaacaacgccaagagagtggccgtgcccaacggccagccccccagcgccgccagatacatgcccagagaggtgccccccagattcagatgccagcaggaccacaaggtgctgctgaagagaggccagccccccccccccagctgcatgctgctgggcggcggcgccggcccccccccctgcaccgcccccggcgccaaccccaacaacgcccaggtgaccggcgccctgctgcagagcgagagcggcaccgcccccgacagcaccctgggcggcgccgccgccagcaactacgccaacagcacctggggcagcggcgccagcagcaacaacggcaccagccccaaccccatccacatctgggacaaggtgatcgtggacggcagcgacatggaggagtggccctgcatcgccagcaaggacaccgagagcagcagcgagaacaccaccgacaacaacagcgccagcaaccccggcagcgagaagagcaccctgcccggcagcaccaccagcaacaagggcaagggcagccagtgccagagcgccagcagcggcaacgagtgcaacctgggcgtgtggaagagcgaccccaaggccaagagcgtgcagagcagcaacagcaccaccgagaacaacaacggcctgggcaactggagaaacgtgagcggccaggacagaatcggccccggcagcggcttcagcaacttcaaccccaacagcaaccccagcgcctggcccgccctggtgcaggagggcaccagcagaaagggcgccctggagaccgacaacagcaacagcagcgcccaggtgagcaccgtgggccagaccagcagagagcagcagagcaagatggagaacgccggcgtgaacttcgtggtgagcggcagagagcaggcccagatccacaacaccgacggccccaagaacggcaacaccaacagcctgaacctgagcagccccaaccccatggagaacaagggcatgcccttcggcatgggcctgggcaacaccagcagaagcaccgacgcccccagccagagcaccggcgacagaaagaccggcagcgtgggcagctggggcgccgccagaggccccagcggcaccgacaccgtgagcggccagagcaacagcggcaacaacggcaacaacggcaaggagagagaggacagctggaagggcgccagcgtgcagaagagcaccggcagcaagaacgacagctgggacaacaacaacagaagcaccggcggcagctggaacttcggcccccaggacagcaacgacaacaagtggggcgagggcaacaagatgaccagcggcgtgagccagggcgagtggaagcagcccaccggcagcgacgagctgaagatcggcgagtggagcggccccaaccagcccaacagcagcaccggcgcctgggacaaccagaagggccaccccctgcccgagaaccagggcaacgcccaggccccctgctggggcagaagcagcagcagcaccggcagcgaggtgggcggccagagcaccggcagcaaccacaaggccggcagcagcgacagccacaacagcggcagaagaagctacagacccacccaccccgactgccaggccgtgctgcagaccctgctgagcagaaccgacctggaccccagagtgctgagcaacaccggctggggccagacccagatcaagcaggacaccgtgtgggacatcgaggaggtgcccagacccgagggcaagagcgacaagggcaccgagggctgggagagcgccgccacccagaccaagaacagcggcggctggggcgacgcccccagccagagcaaccagatgaagagcggctggggcgagctgagcgccagcaccgagtggaaggaccccaagaacaccggcggctggaacgactacaagaacaacaacagcagcaactggggcggcggcagacccgacgagaagacccccagcagctggaacgagaaccccagcaaggaccagggctggggcggcggcagacagcccaaccagggctggagcagcggcaagaacggctggggcgaggaggtggaccagaccaagaacagcaactgggagagcagcgccagcaagcccgtgagcggctggggcgagggcggccagaacgagatcggcacctggggcaacggcggcaacgccagcctggccagcaagggcggctgggaggactgcaagagaagccccgcctggaacgagaccggcagacagcccaacagctggaacaagcagcaccagcagcagcagcccccccagcagcccccccccccccagcccgaggccagcggcagctggggcggcccccccccccccccccccggcaacgtgagacccagcaacagcagctggagcagcggcccccagcccgccacccccaaggacgaggagcccagcggctgggaggagcccagcccccagagcatcagcagaaagatggacatcgacgacggcaccagcgcctggggcgaccccaacagctacaactacaagaacgtgaacctgtgggacaagaacagccagggcggccccgcccccagagagcccaacctgcccacccccatgaccagcaagagcgccagcgacagcaagagcatgcaggacggctggggcgagagcgacggccccgtgaccggcgccagacaccccagctgggaggaggaggaggacggcggcgtgtggaacaccaccggcagccagggcagcgccagcagccacaacagcgccagctggggccagggcggcaagaagcagatgaagtgcagcctgaagggcggcaacaacgacagctggatgaaccccctggccaagcagttcagcaacatgggcctgctgagccagaccgaggacaaccccagcagcaagatggacctgagcgtgggcagcctgagcgacaagaagttcgacgtggacaagagagccatgaacctgggcgacttcaacgacatcatgagaaaggacagaagcggcttcagaccccccaacagcaaggacatgggcaccaccgacagcggcccctacttcgagaagggcggcagccacggcctgttcggcaacagcaccgcccagagcagaggcctgcacacccccgtgcagcccctgaacagcagccccagcctgagagcccaggtgcccccccagttcatcagcccccaggtgagcgccagcatgctgaagcagttccccaacagcggcctgagccccggcctgttcaacgtgggcccccagctgagcccccagcagatcgccatgctgagccagctgccccagatcccccagttccagctggcctgccagctgctgctgcagcagcagcagcagcagcagctgctgcagaaccagagaaagatcagccaggccgtgagacagcagcaggagcagcagctggccagaatggtgagcgccctgcagcagcagcagcagcagcagcagagacagcccggcatgaagcacagccccagccaccccgtgggccccaagccccacctggacaacatggtgcccaacgccctgaacgtgggcctgcccgacctgcagaccaagggccccatccccggctacggcagcggcttcagcagcggcggcatggactacggcatggtgggcggcaaggaggccggcaccgagagcagattcaagcagtggaccagcatgatggagggcctgcccagcgtggccacccaggaggccaacatgcacaagaacggcgccatcgtggcccccggcaagaccagaggcggcagcccctacaaccagttcgacatcatccccggcgacaccctgggcggccacaccggccccgccggcgacagctggctgcccgccaagagcccccccaccaacaagatcggcagcaagagcagcaacgccagctggccccccgagttccagcccggcgtgccctggaagggcatccagaacatcgaccccgagagcgacccctacgtgacccccggcagcgtgctgggcggcaccgccaccagccccatcgtggacaccgaccaccagctgctgagagacaacaccaccggcagcaacagcagcctgaacaccagcctgcccagccccggcgcctggccctacagcgccagcgacaacagcttcaccaacgtgcacagcaccagcgccaagttccccgactacaagagcacctggagccccgaccccatcggccacaaccccacccacctgagcaacaagatgtggaagaaccacatcagcagcagaaacaccacccccctgcccagacccccccccggcctgaccaaccccaagcccagcagcccctggagcagcaccgcccccagaagcgtgagaggctggggcacccaggacagcagactggccagcgccagcacctggagcgacggcggcagcgtgagacccagctactggctggtgctgcacaacctgaccccccagatcgacggcagcaccctgagaaccatctgcatgcagcacggccccctgctgaccttccacctgaacctgacccagggcaccgccctgatcagatacagcaccaagcaggaggccgccaaggcccagaccgccctgcacatgtgcgtgctgggcaacaccaccatcctggccgagttcgccaccgacgacgaggtgagcagattcctggcccaggcccagccccccacccccgccgccacccccagcgcccccgccgccggctggcagagcctggagaccggccagaaccagagcgaccccgtgggccccgccctgaacctgttcggcggcagcaccggcctgggccagtggagcagcagcgccggcggcagcagcggcgccgacctggccggcgccagcctgtggggcccccccaactacagcagcagcctgtggggcgtgcccaccgtggaggacccccacagaatgggcagccccgcccccctgctgcccggcgacctgctgggcggcggcagcgacagcatctag

SEQ ID NO: 13333 - DNA, 3090 bp, synthetic construct; identical to SEQ ID NO: 13330
  misc_feature 1..3090: note = Description of Artificial Sequence: Synthetic coding sequence
  source 1..3090: mol_type = other DNA

SEQ ID NO: 13334 - DNA, 114 bp, synthetic construct
  misc_feature 1..114: note = Description of Artificial Sequence: Synthetic coding sequence
  source 1..114: mol_type = other DNA
atgcagaccaacgagggcgaggtgagcgaggagagcagcagcaaggtggagcaggaggacttcgtgatggagggccacggcaagacccccccccccggcgaggagagcaagtag

SEQ ID NO: 13335 - DNA, 5502 bp, synthetic construct
  misc_feature 1..5502: note = Description of Artificial Sequence: Synthetic coding sequence
  source 1..5502: mol_type = other DNA
atgagagagaaggagcaggagagagaggagcagctgatggaggacaagaagagaaagaaggaggacaagaagaagaaggaggccacccagaaggtgaccgagcagaagaccaaggtgcccgaggtgaccaagcccagcctgagccagcccaccgccgccagccccatcggcagcagccccagcccccccgtgaacggcggcaacaacgccaagagagtggccgtgcccaacggccagccccccagcgccgccagatacatgcccagagaggtgccccccagattcagatgccagcaggaccacaaggtgctgctgaagagaggccagccccccccccccagctgcatgctgctgggcggcggcgccggcccccccccctgcaccgcccccggcgccaaccccaacaacgcccaggtgaccggcgccctgctgcagagcgagagcggcaccgcccccgacagcaccctgggcggcgccgccgccagcaactacgccaacagcacctggggcagcggcgccagcagcaacaacggcaccagccccaaccccatccacatctgggacaaggtgatcgtggacggcagcgacatggaggagtggccctgcatcgccagcaaggacaccgagagcagcagcgagaacaccaccgacaacaacagcgccagcaaccccggcagcgagaagagcaccctgcccggcagcaccaccagcaacaagggcaagggcagccagtgccagagcgccagcagcggcaacgagtgcaacctgggcgtgtggaagagcgaccccaaggccaagagcgtgcagagcagcaacagcaccaccgagaacaacaacggcctgggcaactggagaaacgtgagcggccaggacagaatcggccccggcagcggcttcagcaacttcaaccccaacagcaaccccagcgcctggcccgccctggtgcaggagggcaccagcagaaagggcgccctggagaccgacaacagcaacagcagcgcccaggtgagcaccgtgggccagaccagcagagagcagcagagcaagatggagaacgccggcgtgaacttcgtggtgagcggcagagagcaggcccagatccacaacaccgacggccccaagaacggcaacaccaacagcctgaacctgagcagccccaaccccatggagaacaagggcatgcccttcggcatgggcctgggcaacaccagcagaagcaccgacgcccccagccagagcaccggcgacagaaagaccggcagcgtgggcagctggggcgccgccagaggccccagcggcaccgacaccgtgagcggccagagcaacagcggcaacaacggcaacaacggcaaggagagagaggacagctggaagggcgccagcgtgcagaagagcaccggcagcaagaacgacagctgggacaacaacaacagaagcaccggcggcagctggaacttcggcccccaggacagcaacgacaacaagtggggcgagggcaacaagatgaccagcggcgtgagccagggcgagtggaagcagcccaccggcagcgacgagctgaagatcggcgagtggagcggccccaaccagcccaacagcagcaccggcgcctgggacaaccagaagggccaccccctgcccgagaaccagggcaacgcccaggccccctgctggggcagaagcagcagcagcaccggcagcgaggtgggcggccagagcaccggcagcaaccacaaggccggcagcagcgacagccacaacagcggcagaagaagctacagacccacccaccccgactgccaggccgtgctgcagaccctgctgagcagaaccgacctggaccccagagtgctgagcaacaccggctggggccagacccagatcaagcaggacaccgtgtgggacatcgaggaggtgcccagacccgagggcaagagcgacaagggcaccgagggctgggagagcgccgccacccagaccaagaacagcggcggctggggcgacgcccccagccagagcaaccagatgaagagcggctggggcgagctgagcgccagcaccgagtggaaggaccccaagaacaccggcggctggaacgactacaagaacaacaacagcagcaactggggcggcggcagacccgacgagaagacccccagcagctggaacgagaaccccagcaaggaccagggctggggcggcggcagacagcccaaccagggctggagcagcggcaagaacggctggggcgaggaggtggaccagaccaagaacagcaactgggagagcagcgccagcaagcccgtgagcggctggggcgagggcggccagaacgagatcggcacctggggcaacggcggcaacgccagcctggccagcaagggcggctgggaggactgcaagagaagccccgcctggaacgagaccggcagacagcccaacagctggaacaagcagcaccagcagcagcagcccccccagcagcccccccccccccagcccgaggccagcggcagctggggcggcccccccccccccccccccggcaacgtgagacccagcaacagcagctggagcagcggcccccagcccgccacccccaaggacgaggagcccagcggctgggaggagcccagcccccagagcatcagcagaaagatggacatcgacgacggcaccagcgcctggggcgaccccaacagctacaactacaagaacgtgaacctgtgggacaagaacagccagggcggccccgcccccagagagcccaacctgcccacccccatgaccagcaagagcgccagcgtgtggagcaagagcaccccccccgcccccgacaacggcaccagcgcctggggcgagcccaacgagagcagccccggctggggcgagatggacgacaccggcgccagcaccaccggctggggcaacacccccgccaacgcccccaacgccatgaagcccaacagcaagagcatgcaggacggctggggcgagagcgacggccccgtgaccggcgccagacaccccagctgggaggaggaggaggacggcggcgtgtggaacaccaccggcagccagggcagcgccagcagccacaacagcgccagctggggccagggcggcaagaagcagatgaagtgcagcctgaagggcggcaacaacgacagctggatgaaccccctggccaagcagttcagcaacatgggcctgctgagccagaccgaggacaaccccagcagcaagatggacctgagcgtgggcagcctgagcgacaagaagttcgacgtggacaagagagccatgaacctgggcgacttcaacgacatcatgagaaaggacagaagcggcttcagaccccccaacagcaaggacatgggcaccaccgacagcggcccctacttcgagaagctgaccctgcccttcagcaaccaggacggctgcctgggcgacgaggccccctgcagccccttcagccccagccccagctacaagctgagccccagcggcagcaccctgcccaacgtgagcctgggcgccatcggcaccggcctgaacccccagaacttcgccgccagacagggcggcagccacggcctgttcggcaacagcaccgcccagagcagaggcctgcacacccccgtgcagcccctgaacagcagccccagcctgagagcccaggtgcccccccagttcatcagcccccaggtgagcgccagcatgctgaagcagttccccaacagcggcctgagccccggcctgttcaacgtgggcccccagctgagcccccagcagatcgccatgctgagccagctgccccagatcccccagttccagctggcctgccagctgctgctgcagcagcagcagcagcagcagctgctgcagaaccagagaaagatcagccaggccgtgagacagcagcaggagcagcagctggccagaatggtgagcgccctgcagcagcagcagcagcagcagcagagacagcccggcatgaagcacagccccagccaccccgtgggccccaagccccacctggacaacatggtgcccaacgccctgaacgtgggcctgcccgacctgcagaccaagggccccatccccggctacggcagcggcttcagcagcggcggcatggactacggcatggtgggcggcaaggaggccggcaccgagagcagattcaagcagtggaccagcatgatggagggcctgcccagcgtggccacccaggaggccaacatgcacaagaacggcgccatcgtggcccccggcaagaccagaggcggcagcccctacaaccagttcgacatcatccccggcgacaccctgggcggccacaccggccccgccggcgacagctggctgcccgccaagagcccccccaccaacaagatcggcagcaagagcagcaacgccagctggccccccgagttccagcccggcgtgccctggaagggcatccagaacatcgaccccgagagcgacccctacgtgacccccggcagcgtgctgggcggcaccgccaccagccccatcgtggacaccgaccaccagctgctgagagacaacaccaccggcagcaacagcagcctgaacaccagcctgcccagccccggcgcctggccctacagcgccagcgacaacagcttcaccaacgtgcacagcaccagcgccaagttccccgactacaagagcacctggagccccgaccccatcggccacaaccccacccacctgagcaacaagatgtggaagaaccacatcagcagcagaaacaccacccccctgcccagacccccccccggcctgaccaaccccaagcccagcagcccctggagcagcaccgcccccagaagcgtgagaggctggggcacccaggacagcagactggccagcgccagcacctggagcgacggcggcagcgtgagacccagctactggctggtgctgcacaacctgaccccccagatcgacggcagcaccctgagaaccatctgcatgcagcacggccccctgctgaccttccacctgaacctgacccagggcaccgccctgatcagatacagcaccaagcaggaggccgccaaggcccagaccgccctgcacatgtgcgtgctgggcaacaccaccatcctggccgagttcgccaccgacgacgaggtgagcagattcctggcccaggcccagccccccacccccgccgccacccccagcgcccccgccgccggctggcagagcctggagaccggccagaaccagagcgaccccgtgggccccgccctgaacctgttcggcggcagcaccggcctgggccagtggagcagcagcgccggcggcagcagcggcgccgacctggccggcgccagcctgtggggcccccccaactacagcagcagcctgtggggcgtgcccaccgtggaggacccccacagaatgggcagccccgcccccctgctgcccggcgacctgctgggcggcggcagcgacagcatctag

SEQ ID NO: 13336 - DNA, 3153 bp, synthetic construct
  misc_feature 1..3153: note = Description of Artificial Sequence: Synthetic coding sequence
  source 1..3153: mol_type = other DNA
atggaggtggccgtggagaaggccgtggccgccgccgccgccgccagcgccgccgccagcggcggccccagcgccgcccccagcggcgagaacgaggccgagagcagacagggccccgacagcgagagaggcggcgaggccgccagactgaacctgctggacacctgcgccgtgtgccaccagaacatccagagcagagcccccaagctgctgccctgcctgcacagcttctgccagagatgcctgcccgccccccagagatacctgatgctgcccgcccccatgctgggcagcgccgagacccccccccccgtgcccgcccccggcagccccgtgagcggcagcagccccttcgccacccaggtgggcgtgatcagatgccccgtgtgcagccaggagtgcgccgagagacacatcatcgacaacttcttcgtgaaggacaccaccgaggtgcccagcagcaccgtggagaagagcaaccaggtgtgcaccagctgcgaggacaacgccgaggccaacggcttctgcgtggagtgcgtggagtggctgtgcaagacctgcatcagagcccaccagagagtgaagttcaccaaggaccacaccgtgagacagaaggaggaggtgagccccgaggccgtgggcgtgaccagccagagacccgtgttctgccccttccacaagaaggagcagctgaagctgtactgcgagacctgcgacaagctgacctgcagagactgccagctgctggagcacaaggagcacagataccagttcatcgaggaggccttccagaaccagaaggtgatcatcgacaccctgatcaccaagctgatggagaagaccaagtacatcaagttcaccggcaaccagatccagaacagaatcatcgaggtgaaccagaaccagaagcaggtggagcaggacatcaaggtggccatcttcaccctgatggtggagatcaacaagaagggcaaggccctgctgcaccagctggagagcctggccaaggaccacagaatgaagctgatgcagcagcagcaggaggtggccggcctgagcaagcagctggagcacgtgatgcacttcagcaagtgggccgtgagcagcggcagcagcaccgccctgctgtacagcaagagactgatcacctacagactgagacacctgctgagagccagatgcgacgccagccccgtgaccaacaacaccatccagttccactgcgaccccagcttctgggcccagaacatcatcaacctgggcagcctggtgatcgaggacaaggagagccagccccagatgcccaagcagaaccccgtggtggagcagaacagccagccccccagcggcctgagcagcaaccagctgagcaagttccccacccagatcagcctggcccagctgagactgcagcacatgcagcagcaggtgatggcccagagacagcaggtgcagagaagacccgcccccgtgggcctgcccaaccccagaatgcagggccccatccagcagcccagcatcagccaccagcagcccccccccagactgatcaacttccagaaccacagccccaagcccaacggccccgtgctgcccccccacccccagcagctgagatacccccccaaccagaacatccccagacaggccatcaagcccaaccccctgcagatggccttcctggcccagcaggccatcaagcagtggcagatcagcagcggccagggcacccccagcaccaccaacagcaccagcagcacccccagcagccccaccatcaccagcgccgccggctacgacggcaaggccttcggcagccccatgatcgacctgagcagccccgtgggcggcagctacaacctgcccagcctgcccgacatcgactgcagcagcaccatcatgctggacaacatcgtgagaaaggacaccaacatcgaccacggccagcccagaccccccagcaacagaaccgtgcagagccccaacagcagcgtgcccagccccggcctggccggccccgtgaccatgaccagcgtgcacccccccatcagaagccccagcgccagcagcgtgggcagcagaggcagcagcggcagcagcagcaagcccgccggcgccgacagcacccacaaggtgcccgtggtgatgctggagcccatcagaatcaagcaggagaacagcggcccccccgagaactacgacttccccgtggtgatcgtgaagcaggagagcgacgaggagagcagaccccagaacgccaactaccccagaagcatcctgaccagcctgctgctgaacagcagccagagcagcaccagcgaggagaccgtgctgagaagcgacgcccccgacagcaccggcgaccagcccggcctgcaccaggacaacagcagcaacggcaagagcgagtggctggaccccagccagaagagccccctgcacgtgggcgagaccagaaaggaggacgaccccaacgaggactggtgcgccgtgtgccagaacggcggcgagctgctgtgctgcgagaagtgccccaaggtgttccacctgagctgccacgtgcccaccctgaccaacttccccagcggcgagtggatctgcaccttctgcagagacctgagcaagcccgaggtggagtacgactgcgacgcccccagccacaacagcgagaagaagaagaccgagggcctggtgaagctgacccccatcgacaagagaaagtgcgagagactgctgctgttcctgtactgccacgagatgagcctggccttccaggaccccgtgcccctgaccgtgcccgactactacaagatcatcaagaaccccatggacctgagcaccatcaagaagagactgcaggaggactacagcatgtacagcaagcccgaggacttcgtggccgacttcagactgatcttccagaactgcgccgagttcaacgagcccgacagcgaggtggccaacgccggcatcaagctggagaactacttcgaggagctgctgaagaacctgtaccccgagaagagattccccaagcccgagttcagaaacgagagcgaggacaacaagttcagcgacgacagcgacgacgacttcgtgcagcccagaaagaagagactgaagagcatcgaggagagacagctgctgaagtag

SEQ ID NO: 13337 - DNA, 1650 bp, synthetic construct
  misc_feature 1..1650: note = Description of Artificial Sequence: Synthetic coding sequence
  source 1..1650: mol_type = other DNA
atggagggccccagaagcgccgcctgcagagccagacccgccaccagccccggcgccgtggacctgaccgcccccccccccccccccctgctgagaatcctgaacagcagagccgcccccgccaccagaaccttcgccgacctgtgcagaagcctgctgcagcccgagagcagagtgctgtgcagactgcagcccgtgaactgctacccccccgccgccagcaccaagctgtgccccgtgggcgtgatcagatgccccgtgtgcagccaggagtgcgccgagagacacatcatcgacaacttcttcgtgaaggacaccaccgaggtgcccagcagcaccgtggagaagagcaaccaggtgtgcaccagctgcgaggacaacgccgaggccaacggcttctgcgtggagtgcgtggagtggctgtgcaagacctgcatcagagcccaccagagagtgaagttcaccaaggaccacaccgtgagacagaaggaggaggtgagccccgaggccgtgggcgtgaccagccagagacccgtgttctgccccttccacaagaaggagcagctgaagctgtactgcgagacctgcgacaagctgacctgcagagactgccagctgctggagcacaaggagcacagataccagttcatcgaggaggccttccagaaccagaaggtgatcatcgacaccctgatcaccaagctgatggagaagaccaagtacatcaagttcaccggcaaccagatccagaacagaatcatcgaggtgaaccagaaccagaagcaggtggagcaggacatcaaggtggccatcttcaccctgatggtggagatcaacaagaagggcaaggccctgctgcaccagctggagagcctggccaaggaccacagaatgaagctgatgcagcagcagcaggaggtggccggcctgagcaagcagctggagcacgtgatgcacttcagcaagtgggccgtgagcagcggcagcagcaccgccctgctgtacagcaagagactgatcacctacagactgagacacctgctgagagccagatgcgacgccagccccgtgaccaacaacaccatccagttccactgcgaccccagcttctgggcccagaacatcatcaacctgggcagcctggtgatcgaggacaaggagagccagccccagatgcccaagcagaaccccgtggtggagcagaacagccagccccccagcggcctgagcagcaaccagctgagcaagttccccacccagatcagcctggcccagctgagactgcagcacatgcagcagcagcagcccccccccagactgatcaacttccagaaccacagccccaagcccaacggccccgtgctgcccccccacccccagcagctgagatacccccccaaccagaacatccccagacaggccatcaagcccaaccccctgcagatggccttcctggcccagcaggccatcaagcagtggcagatcagcagcggccagggcacccccagcaccacccagaacatcaacaccgccgcctgcaccgtgttcgacgtgagagtgctgcaccacatcccctactgggccctgaacatcagcagcagcgagagagacagcttcctgtggttcagcagcgtgtacaacctggagtag

SEQ ID NO: 13338 - DNA, 3051 bp, synthetic construct
  misc_feature 1..3051: note = Description of Artificial Sequence: Synthetic coding sequence
  source 1..3051: mol_type = other DNA
atggaggtggccgtggagaaggccgtggccgccgccgccgccgccagcgccgccgccagcggcggccccagcgccgcccccagcggcgagaacgaggccgagagcagacagggccccgacagcgagagaggcggcgaggccgccagactgaacctgctggacacctgcgccgtgtgccaccagaacatccagagcagagcccccaagctgctgccctgcctgcacagcttctgccagagatgcctgcccgccccccagagatacctgatgctgcccgcccccatgctgggcagcgccgagacccccccccccgtgcccgcccccggcagccccgtgagcggcagcagccccttcgccacccaggtgggcgtgatcagatgccccgtgtgcagccaggagtgcgccgagagacacatcatcgacaacttcttcgtgaaggacaccaccgaggtgcccagcagcaccgtggagaagagcaaccaggtgtgcaccagctgcgaggacaacgccgaggccaacggcttctgcgtggagtgcgtggagtggctgtgcaagacctgcatcagagcccaccagagagtgaagttcaccaaggaccacaccgtgagacagaaggaggaggtgagccccgaggccgtgggcgtgaccagccagagacccgtgttctgccccttccacaagaaggagcagctgaagctgtactgcgagacctgcgacaagctgacctgcagagactgccagctgctggagcacaaggagcacagataccagttcatcgaggaggccttccagaaccagaaggtgatcatcgacaccctgatcaccaagctgatggagaagaccaagtacatcaagttcaccggcaaccagatccagaacagaatcatcgaggtgaaccagaaccagaagcaggtggagcaggacatcaaggtggccatcttcaccctgatggtggagatcaacaagaagggcaaggccctgctgcaccagctggagagcctggccaaggaccacagaatgaagctgatgcagcagcagcaggaggtggccggcctgagcaagcagctggagcacgtgatgcacttcagcaagtgggccgtgagcagcggcagcagcaccgccctgctgtacagcaagagactgatcacctacagactgagacacctgctgagagccagatgcgacgccagccccgtgaccaacaacaccatccagttccactgcgaccccagcttctgggcccagaacatcatcaacctgggcagcctggtgatcgaggacaaggagagccagccccagatgcccaagcagaaccccgtggtggagcagaacagccagccccccagcggcctgagcagcaaccagctgagcaagttccccacccagatcagcctggcccagctgagactgcagcacatgcagcagcagcagcccccccccagactgatcaacttccagaaccacagccccaagcccaacggccccgtgctgcccccccacccccagcagctgagatacccccccaaccagaacatccccagacaggccatcaagcccaaccccctgcagatggccttcctggcccagcaggccatcaagcagtggcagatcagcagcggccagggcacccccagcaccaccaacagcaccagcagcacccccagcagccccaccatcaccagcgccgccggctacgacggcaaggccttcggcagccccatgatcgacctgagcagccccgtgggcggcagctacaacctgcccagcctgcccgacatcgactgcagcagcaccatcatgctggacaacatcgtgagaaaggacaccaacatcgaccacggccagcccagaccccccagcaacagaaccgtgcagagccccaacagcagcgtgcccagccccggcctggccggccccgtgaccatgaccagcgtgcacccccccatcagaagccccagcgccagcagcgtgggcagcagaggcagcagcggcagcagcagcaagcccgccggcgccgacagcacccacaaggtgcccgtggtgatgctggagcccatcagaatcaagcaggagaacagcggcccccccgagaactacgacttccccgtggtgatcgtgaagcaggagagcgacgaggagagcagaccccagaacgccaactaccccagaagcatcctgaccagcctgctgctgaacagcagccagagcagcaccagcgaggagaccgtgctgagaagcgacgcccccgacagcaccggcgaccagcccggcctgcaccaggacaacagcagcaacggcaagagcgagtggctggaccccagccagaagagccccctgcacgtgggcgagaccagaaaggaggacgaccccaacgaggactggtgcgccgtgtgccagaacggcggcgagctgctgtgctgcgagaagtgccccaaggtgttccacctgagctgccacgtgcccaccctgaccaacttccccagcggcgagtggatctgcaccttctgcagagacctgagcaagcccgaggtggagtacgactgcgacgcccccagccacaacagcgagaagaagaagaccgagggcctggtgaagctgacccccatcgacaagagaaagtgcgagagactgctgctgttcctgtactgccacgagatgagcctggccttccaggaccccgtgcccctgaccgtgcccgactactacaagatcatcaagaaccccatggacctgagcaccatcaagaagagactgcaggaggactacagcatgtacagcaagcccgaggacttcgtggccgacttcagactgatcttccagaactgcgccgagttcaacgagcccgacagcgaggtggccaacgccggcatcaagctggagaactacttcgaggagctgctgaagaacctgtaccccgagaagagattccccaagcccgagttcagaaacgagagcgaggacaacaagttcagcgacgacagcgacgacgacttcgtgcagcccagaaagaagagactgaagagcatcgaggagagacagctgctgaagtag

SEQ ID NO: 13339 - DNA, 2886 bp, synthetic construct
  misc_feature 1..2886: note = Description of Artificial Sequence: Synthetic coding sequence
  source 1..2886: mol_type = other DNA
atgctgcccgcccccatgctgggcagcgccgagacccccccccccgtgcccgcccccggcagccccgtgagcggcagcagccccttcgccacccaggtgggcgtgatcagatgccccgtgtgcagccaggagtgcgccgagagacacatcatcgacaacttcttcgtgaaggacaccaccgaggtgcccagcagcaccgtggagaagagcaaccaggtgtgcaccagctgcgaggacaacgccgaggccaacggcttctgcgtggagtgcgtggagtggctgtgcaagacctgcatcagagcccaccagagagtgaagttcaccaaggaccacaccgtgagacagaaggaggaggtgagccccgaggccgtgggcgtgaccagccagagacccgtgttctgccccttccacaagaaggagcagctgaagctgtactgcgagacctgcgacaagctgacctgcagagactgccagctgctggagcacaaggagcacagataccagttcatcgaggaggccttccagaaccagaaggtgatcatcgacaccctgatcaccaagctgatggagaagaccaagtacatcaagttcaccggcaaccagatccagaacagaatcatcgaggtgaaccagaaccagaagcaggtggagcaggacatcaaggtggccatcttcaccctgatggtggagatcaacaagaagggcaaggccctgctgcaccagctggagagcctggccaaggaccacagaatgaagctgatgcagcagcagcaggaggtggccggcctgagcaagcagctggagcacgtgatgcacttcagcaagtgggccgtgagcagcggcagcagcaccgccctgctgtacagcaagagactgatcacctacagactgagacacctgctgagagccagatgcgacgccagccccgtgaccaacaacaccatccagttccactgcgaccccagcttctgggcccagaacatcatcaacctgggcagcctggtgatcgaggacaaggagagccagccccagatgcccaagcagaaccccgtggtggagcagaacagccagccccccagcggcctgagcagcaaccagctgagcaagttccccacccagatcagcctggcccagctgagactgcagcacatgcagcagcaggtgatggcccagagacagcaggtgcagagaagacccgcccccgtgggcctgcccaaccccagaatgcagggccccatccagcagcccagcatcagccaccagcagcccccccccagactgatcaacttccagaaccacagccccaagcccaacggccccgtgctgcccccccacccccagcagctgagatacccccccaaccagaacatccccagacaggccatcaagcccaaccccctgcagatggccttcctggcccagcaggccatcaagcagtggcagatcagcagcggccagggcacccccagcaccaccaacagcaccagcagcacccccagcagccccaccatcaccagcgccgccggctacgacggcaaggccttcggcagccccatgatcgacctgagcagccccgtgggcggcagctacaacctgcccagcctgcccgacatcgactgcagcagcaccatcatgctggacaacatcgtgagaaaggacaccaacatcgaccacggccagcccagaccccccagcaacagaaccgtgcagagccccaacagcagcgtgcccagccccggcctggccggccccgtgaccatgaccagcgtgcacccccccatcagaagccccagcgccagcagcgtgggcagcagaggcagcagcggcagcagcagcaagcccgccggcgccgacagcacccacaaggtgcccgtggtgatgctggagcccatcagaatcaagcaggagaacagcggcccccccgagaactacgacttccccgtggtgatcgtgaagcaggagagcgacgaggagagcagaccccagaacgccaactaccccagaagcatcctgaccagcctgctgctgaacagcagccagagcagcaccagcgaggagaccgtgctgagaagcgacgcccccgacagcaccggcgaccagcccggcctgcaccaggacaacagcagcaacggcaagagcgagtggctggaccccagccagaagagccccctgcacgtgggcgagaccagaaaggaggacgaccccaacgaggactggtgcgccgtgtgccagaacggcggcgagctgctgtgctgcgagaagtgccccaaggtgttccacctgagctgccacgtgcccaccctgaccaacttccccagcggcgagtggatctgcaccttctgcagagacctgagcaagcccgaggtggagtacgactgcgacgcccccagccacaacagcgagaagaagaagaccgagggcctggtgaagctgacccccatcgacaagagaaagtgcgagagactgctgctgttcctgtactgccacgagatgagcctggccttccaggaccccgtgcccctgaccgtgcccgactactacaagatcatcaagaaccccatggacctgagcaccatcaagaagagactgcaggaggactacagcatgtacagcaagcccgaggacttcgtggccgacttcagactgatcttccagaactgcgccgagttcaacgagcccgacagcgaggtggccaacgccggcatcaagctggagaactacttcgaggagctgctgaagaacctgtaccccgagaagagattccccaagcccgagttcagaaacgagagcgaggacaacaagttcagcgacgacagcgacgacgacttcgtgcagcccagaaagaagagactgaagagcatcgaggagagacagctgctgaagtag

SEQ ID NO: 13340 - DNA, 1692 bp, synthetic construct
  misc_feature 1..1692: note = Description of Artificial Sequence: Synthetic coding sequence
  source 1..1692: mol_type = other DNA
atgggcctgcaggcctgcctgctgggcctgttcgccctgatcctgagcggcaagtgcagctacagccccgagcccgaccagagaagaaccctgccccccggctgggtgagcctgggcagagccgaccccgaggaggagctgagcctgaccttcgccctgagacagcagaacgtggagagactgagcgagctggtgcaggccgtgagcgaccccagcagcccccagtacggcaagtacctgaccctggagaacgtggccgacctggtgagacccagccccctgaccctgcacaccgtgcagaagtggctgctggccgccggcgcccagaagtgccacagcgtgatcacccaggacttcctgacctgctggctgagcatcagacaggccgagctgctgctgcccggcgccgagttccaccactacgtgggcggccccaccgagacccacgtggtgagaagcccccacccctaccagctgccccaggccctggccccccacgtggacttcgtgggcggcctgcacagattcccccccaccagcagcctgagacagagacccgagccccaggtgaccggcaccgtgggcctgcacctgggcgtgacccccagcgtgatcagaaagagatacaacctgaccagccaggacgtgggcagcggcaccagcaacaacagccaggcctgcgcccagttcctggagcagtacttccacgacagcgacctggcccagttcatgagactgttcggcggcaacttcgcccaccaggccagcgtggccagagtggtgggccagcagggcagaggcagagccggcatcgaggccagcctggacgtgcagtacctgatgagcgccggcgccaacatcagcacctgggtgtacagcagccccggcagacacgagggccaggagcccttcctgcagtggctgatgctgctgagcaacgagagcgccctgccccacgtgcacaccgtgagctacggcgacgacgaggacagcctgagcagcgcctacatccagagagtgaacaccgagctgatgaaggccgccgccagaggcctgaccctgctgttcgccagcggcgacagcggcgccggctgctggagcgtgagcggcagacaccagttcagacccaccttccccgccagcagcccctacgtgaccaccgtgggcggcaccagcttccaggagcccttcctgatcaccaacgagatcgtggactacatcagcggcggcggcttcagcaacgtgttccccagacccagctaccaggaggaggccgtgaccaagttcctgagcagcagcccccacctgccccccagcagctacttcaacgccagcggcagagcctaccccgacgtggccgccctgagcgacggctactgggtggtgagcaacagagtgcccatcccctgggtgagcggcaccagcgccagcacccccgtgttcggcggcatcctgagcctgatcaacgagcacagaatcctgagcggcagaccccccctgggcttcctgaaccccagactgtaccagcagcacggcgccggcctgttcgacgtgaccagaggctgccacgagagctgcctggacgaggaggtggagggccagggcttctgcagcggccccggctgggaccccgtgaccggctggggcacccccaacttccccgccctgctgaagaccctgctgaacccctag

SEQ ID NO: 13341 - DNA, 1041 bp, synthetic construct
  misc_feature 1..1041: note = Description of Artificial Sequence: Synthetic coding sequence
  source 1..1041: mol_type = other DNA
atgggcctgcaggcctgcctgctgggcctgttcgccctgatcctgagcggcaagtgcagctacagccccgagcccgaccagagaagaaccctgccccccggctgggtgagcctgggcagagccgaccccgaggaggagctgagcctgaccttcgccctgagacagcagaacgtggagagactgagcgagctggtgcaggccgtgagcgaccccagcagcccccagtacggcaagtacctgaccctggagaacgtggccgacctggtgagacccagccccctgaccctgcacaccgtgcagaagtggctgctggccgccggcgcccagaagtgccacagcgtgatcacccaggacttcctgacctgctggctgagcatcagacaggccgagctgctgctgcccggcgccgagttccaccactacgtgggcggccccaccgagacccacgtggtgagaagcccccacccctaccagctgccccacatcctggaggtgccctacgtgaccaccgtgggcggcaccagcttccaggagcccttcctgatcaccaacgagatcgtggactacatcagcggcggcggcttcagcaacgtgttccccagacccagctaccaggaggaggccgtgaccaagttcctgagcagcagcccccacctgccccccagcagctacttcaacgccagcggcagagcctaccccgacgtggccgccctgagcgacggctactgggtggtgagcaacagagtgcccatcccctgggtgagcggcaccagcgccagcacccccgtgttcggcggcatcctgagcctgatcaacgagcacagaatcctgagcggcagaccccccctgggcttcctgaaccccagactgtaccagcagcacggcgccggcctgttcgacgtgaccagaggctgccacgagagctgcctggacgaggaggtggagggccagggcttctgcagcggccccggctgggaccccgtgaccggctggggcacccccaacttccccgccctgctgaagaccctgctgaacccctag

SEQ ID NO: 13342 - DNA, 3495 bp, synthetic construct
  misc_feature 1..3495: note = Description of Artificial Sequence: Synthetic coding sequence
  source 1..3495: mol_type = other DNA
atggcccagcaggccaacgtgggcgagctgctggccatgctggacagccccatgctgggcgtgagagacgacgtgaccgccgtgttcaaggagaacctgaacagcgacagaggccccatgctggtgaacaccctggtggactactacctggagaccagcagccagcccgccctgcacatcctgaccaccctgcaggagccccacgacaagcacctgctggacagaatcaacgagtacgtgggcaaggccgccaccagactgagcatcctgagcctgctgggccacgtgatcagactgcagcccagctggaagcacaagctgagccaggcccccctgctgcccagcctgctgaagtgcctgaagatggacaccgacgtggtggtgctgaccaccggcgtgctggtgctgatcaccatgctgcccatgatcccccagagcggcaagcagcacctgctggacttcttcgacatcttcggcagactgagcagctggtgcctgaagaagcccggccacgtggccgaggtgtacctggtgcacctgcacgccagcgtgtacgccctgttccacagactgtacggcatgtacccctgcaacttcgtgagcttcctgagaagccactacagcatgaaggagaacctggagaccttcgaggaggtggtgaagcccatgatggagcacgtgagaatccaccccgagctggtgaccggcagcaaggaccacgagctggaccccagaagatggaagagactggagacccacgacgtggtgatcgagtgcgccaagatcagcctggaccccaccgaggccagctacgaggacggctacagcgtgagccaccagatcagcgccagattcccccacagaagcgccgacgtgaccaccagcccctacgccgacacccagaacagctacggctgcgccaccagcaccccctacagcaccagcagactgatgctgctgaacatgcccggccagctgccccagaccctgagcagccccagcaccagactgatcaccgagcccccccaggccaccctgtggagccccagcatggtgtgcggcatgaccaccccccccaccagccccggcaacgtgccccccgacctgagccacccctacagcaaggtgttcggcaccaccgccggcggcaagggcacccccctgggcacccccgccaccagccccccccccgcccccctgtgccacagcgacgactacgtgcacatcagcctgccccaggccaccgtgaccccccccagaaaggaggagagaatggacagcgccagaccctgcctgcacagacagcaccacctgctgaacgacagaggcagcgaggagccccccggcagcaagggcagcgtgaccctgagcgacctgcccggcttcctgggcgacctggccagcgaggaggacagcatcgagaaggacaaggaggaggccgccatcagcagagagctgagcgagatcaccaccgccgaggccgagcccgtggtgcccagaggcggcttcgacagccccttctacagagacagcctgcccggcagccagagaaagacccacagcgccgccagcagcagccagggcgccagcgtgaaccccgagcccctgcacagcagcctggacaagctgggccccgacacccccaagcaggccttcacccccatcgacctgccctgcggcagcgccgacgagagccccgccggcgacagagagtgccagaccagcctggagaccagcatcttcacccccagcccctgcaagatccccccccccaccagagtgggcttcggcagcggccagccccccccctacgaccacctgttcgaggtggccctgcccaagaccgcccaccacttcgtgatcagaaagaccgaggagctgctgaagaaggccaagggcaacaccgaggaggacggcgtgcccagcaccagccccatggaggtgctggacagactgatccagcagggcgccgacgcccacagcaaggagctgaacaagctgcccctgcccagcaagagcgtggactggacccacttcggcggcagcccccccagcgacgagatcagaaccctgagagaccagctgctgctgctgcacaaccagctgctgtacgagagattcaagagacagcagcacgccctgagaaacagaagactgctgagaaaggtgatcaaggccgccgccctggaggagcacaacgccgccatgaaggaccagctgaagctgcaggagaaggacatccagatgtggaaggtgagcctgcagaaggagcaggccagatacaaccagctgcaggagcagagagacaccatggtgaccaagctgcacagccagatcagacagctgcagcacgacagagaggagttctacaaccagagccaggagctgcagaccaagctggaggactgcagaaacatgatcgccgagctgagaatcgagctgaagaaggccaacaacaaggtgtgccacaccgagctgctgctgagccaggtgagccagaagctgagcaacagcgagagcgtgcagcagcagatggagttcctgaacagacagctgctggtgctgggcgaggtgaacgagctgtacctggagcagctgcagaacaagcacagcgacaccaccaaggaggtggagatgatgaaggccgcctacagaaaggagctggagaagaacagaagccacgtgctgcagcagacccagagactggacaccagccagaagagaatcctggagctggagagccacctggccaagaaggaccacctgctgctggagcagaagaagtacctggaggacgtgaagctgcaggccagaggccagctgcaggccgccgagagcagatacgaggcccagaagagaatcacccaggtgttcgagctggagatcctggacctgtacggcagactggagaaggacggcctgctgaagaagctggaggaggagaaggccgaggccgccgaggccgccgaggagagactggactgctgcaacgacggctgcagcgacagcatggtgggccacaacgaggaggccagcggccacaacggcgagaccaagacccccagacccagcagcgccagaggcagcagcggcagcagaggcggcggcggcagcagcagcagcagcagcgagctgagcacccccgagaagcccccccaccagagagccggccccttcagcagcagatgggagaccaccatgggcgaggccagcgccagcatccccaccaccgtgggcagcctgcccagcagcaagagcttcctgggcatgaaggccagagagctgttcagaaacaagagcgagagccagtgcgacgaggacggcatgaccagcagcctgagcgagagcctgaagaccgagctgggcaaggacctgggcgtggaggccaagatccccctgaacctggacggcccccaccccagcccccccacccccgacagcgtgggccagctgcacatcatggactacaacgagacccaccacgagcacagctag

SEQ ID NO: 13343 - DNA, 1101 bp, synthetic construct
  misc_feature 1..1101: note = Description of Artificial Sequence: Synthetic coding sequence
  source 1..1101: mol_type = other DNA
atggcccagcaggccaacgtgggcgagctgctggccatgctggacagccccatgctgggcgtgagagacgacgtgaccgccgtgttcaaggagaacctgaacagcgacagaggccccatgctggtgaacaccctggtggactactacctggagaccagcagccagcccgccctgcacatcctgaccaccctgcaggagccccacgacaagcacctgctggacagaatcaacgagtacgtgggcaaggccgccaccagactgagcatcctgagcctgctgggccacgtgatcagactgcagcccagctggaagcacaagctgagccaggcccccctgctgcccagcctgctgaagtgcctgaagatggacaccgacgtggtggtgctgaccaccggcgtgctggtgctgatcaccatgctgcccatgatcccccagagcggcaagcagcacctgctggacttcttcgacatcttcggcagactgagcagctggtgcctgaagaagcccggccacgtggccgaggtgtacctggtgcacctgcacgccagcgtgtacgccctgttccacagactgtacggcatgtacccctgcaacttcgtgagcttcctgagaagccactacagcatgaaggagaacctggagaccttcgaggaggtggtgaagcccatgatggagcacgtgagaatccaccccgagctggtgaccggcagcaaggaccacgagctggaccccagaagatggaagagactggagacccacgacgtggtgatcgagtgcgccaagatcagcctggaccccaccgaggccagctacgaggacggctacagcgtgagccaccagatcagcgccagattcccccacagaagcgccgacgtgaccaccagcccctacgccgacacccagaacagctacggctgcgccaccagcaccccctacagcaccagcagactgatgctgctgaacatgcccggccagctgccccagaccctgagcagccccagcaccagactgatcaccgagcccccccaggtgtggtgccagctggtgtgcctgctgagccccctgctgagcggcgaggccgaccccctgggccagatctag

SEQ ID NO: 13344 - DNA, 954 bp, synthetic construct
  misc_feature 1..954: note = Description of Artificial Sequence: Synthetic coding sequence
  source 1..954: mol_type = other DNA
atggacaccgacgtggtggtgctgaccaccggcgtgctggtgctgatcaccatgctgcccatgatcccccagagcggcaagcagcacctgctggacttcttcgacatcttcggcagactgagcagctggtgcctgaagaagcccggccacgtggccgaggtgtacctggtgcacctgcacgccagcgtgtacgccctgttccacagactgtacggcatgtacccctgcaacttcgtgagcttcctgagaagccactacagcatgaaggagaacctggagaccttcgaggaggtggtgaagcccatgatggagcacgtgagaatccaccccgagctggtgaccggcagcaaggaccacgagctggaccccagaagatggaagagactggagacccacgacgtggtgatcgagtgcgccaagatcagcctggaccccaccgaggccagctacgaggacggctacagcgtgagccaccagatcagcgccagattcccccacagaagcgccgacgtgaccaccagcccctacgccgacacccagaacagctacggctgcgccaccagcaccccctacagcaccagcagactgatgctgctgaacatgcccggccagctgccccagaccctgagcagccccagcaccagactgatcaccgagcccccccaggccaccctgtggagccccagcatggtgtgcggcatgaccaccccccccaccagccccggcaacgtgccccccgacctgagccacccctacagcaaggtgttcggcaccaccgccggcggcaagggcacccccctgggcacccccgccaccagccccccccccgcccccagcgtgatcagaatgaccacctgcaccttccacagccccagaccccagagccacccccccggcagaaagagagagtggatcctgcaggaccacgtgtacaccgacaacaccatcttctag

SEQ ID NO: 13345 - DNA, 3495 bp, synthetic construct; identical to SEQ ID NO: 13342
  misc_feature 1..3495: note = Description of Artificial Sequence: Synthetic coding sequence
  source 1..3495: mol_type = other DNA

SEQ ID NO: 13346 - DNA, 849 bp, synthetic construct
  misc_feature 1..849: note = Description of Artificial Sequence: Synthetic coding sequence
  source 1..849: mol_type = other DNA
atggacaccgacgtggtggtgctgaccaccggcgtgctggtgctgatcaccatgctgcccatgatcccccagagcggcaagcagcacctgctggacttcttcgacatcttcggcagactgagcagctggtgcctgaagaagcccggccacgtggccgaggtgtacctggtgcacctgcacgccagcgtgtacgccctgttccacagactgtacggcatgtacccctgcaacttcgtgagcttcctgagaagccactacagcatgaaggagaacctggagaccttcgaggaggtggtgaagcccatgatggagcacgtgagaatccaccccgagctggtgaccggcagcaaggaccacgagctggaccccagaagatggaagagactggagacccacgacgtggtgatcgagtgcgccaagatcagcctggaccccaccgaggccagctacgaggacggctacagcgtgagccaccagatcagcgccagattcccccacagaagcgccgacgtgaccaccagcccctacgccgacacccagaacagctacggctgcgccaccagcaccccctacagcaccagcagactgatgctgctgaacatgcccggccacctggccaccaccgtgagacccagaccccccggccccgccgcccccggcgccgtggtggaggccgaggtggtggaggccgccgccgccgccgccgccagcttcctgccccagagaaacccccacaccagaggccaggcccacagcgccgtgggcggcagaagactgtgggagaagagactgcccgccagcccccccctgtgggcccacttccccgtgcagaaggccagctgggtgtag

SEQ ID NO: 13347 - DNA, 3342 bp, synthetic construct
  misc_feature 1..3342: note = Description of Artificial Sequence: Synthetic coding sequence
  source 1..3342: mol_type = other DNA
atggcccagcaggccaacgtgggcgagctgctggccatgctggacagccccatgctgggcgtgagagacgacgtgaccgccgtgttcaaggagaacctgaacagcgacagaggccccatgctggtgaacaccctggtggactactacctggagaccagcagccagcccgccctgcacatcctgaccaccctgcaggagccccacgacaagatggacaccgacgtggtggtgctgaccaccggcgtgctggtgctgatcaccatgctgcccatgatcccccagagcggcaagcagcacctgctggacttcttcgacatcttcggcagactgagcagctggtgcctgaagaagcccggccacgtggccgaggtgtacctggtgcacctgcacgccagcgtgtacgccctgttccacagactgtacggcatgtacccctgcaacttcgtgagcttcctgagaagccactacagcatgaaggagaacctggagaccttcgaggaggtggtgaagcccatgatggagcacgtgagaatccaccccgagctggtgaccggcagcaaggaccacgagctggaccccagaagatggaagagactggagacccacgacgtggtgatcgagtgcgccaagatcagcctggaccccaccgaggccagctacgaggacggctacagcgtgagccaccagatcagcgccagattcccccacagaagcgccgacgtgaccaccagcccctacgccgacacccagaacagctacggctgcgccaccagcaccccctacagcaccagcagactgatgctgctgaacatgcccggccagctgccccagaccctgagcagccccagcaccagactgatcaccgagcccccccaggccaccctgtggagccccagcatggtgtgcggcatgaccaccccccccaccagccccggcaacgtgccccccgacctgagccacccctacagcaaggtgttcggcaccaccgccggcggcaagggcacccccctgggcacccccgccaccagccccccccccgcccccctgtgccacagcgacgactacgtgcacatcagcctgccccaggccaccgtgaccccccccagaaaggaggagagaatggacagcgccagaccctgcctgcacagacagcaccacctgctgaacgacagaggcagcgaggagccccccggcagcaagggcagcgtgaccctgagcgacctgcccggcttcctgggcgacctggccagcgaggaggacagcatcgagaaggacaaggaggaggccgccatcagcagagagctgagcgagatcaccaccgccgaggccgagcccgtggtgcccagaggcggcttcgacagccccttctacagagacagcctgcccggcagccagagaaagacccacagcgccgccagcagcagccagggcgccagcgtgaaccccgagcccctgcacagcagcctggacaagctgggccccgacacccccaagcaggccttcacccccatcgacctgccctgcggcagcgccgacgagagccccgccggcgacagagagtgccagaccagcctggagaccagcatcttcacccccagcccctgcaagatccccccccccaccagagtgggcttcggcagcggccagccccccccctacgaccacctgttcgaggtggccctgcccaagaccgcccaccacttcgtgatcagaaagaccgaggagctgctgaagaaggccaagggcaacaccgaggaggacggcgtgcccagcaccagccccatggaggtgctggacagactgatccagcagggcgccgacgcccacagcaaggagctgaacaagctgcccctgcccagcaagagcgtggactggacccacttcggcggcagcccccccagcgacgagatcagaaccctgagagaccagctgctgctgctgcacaaccagctgctgtacgagagattcaagagacagcagcacgccctgagaaacagaagactgctgagaaaggtgatcaaggccgccgccctggaggagcacaacgccgccatgaaggaccagctgaagctgcaggagaaggacatccagatgtggaaggtgagcctgcagaaggagcaggccagatacaaccagctgcaggagcagagagacaccatggtgaccaagctgcacagccagatcagacagctgcagcacgacagagaggagttctacaaccagagccaggagctgcagaccaagctggaggactgcagaaacatgatcgccgagctgagaatcgagctgaagaaggccaacaacaaggtgtgccacaccgagctgctgctgagccaggtgagccagaagctgagcaacagcgagagcgtgcagcagcagatggagttcctgaacagacagctgctggtgctgggcgaggtgaacgagctgtacctggagcagctgcagaacaagcacagcgacaccaccaaggaggtggagatgatgaaggccgcctacagaaaggagctggagaagaacagaagccacgtgctgcagcagacccagagactggacaccagccagaagagaatcctggagctggagagccacctggccaagaaggaccacctgctgctggagcagaagaagtacctggaggacgtgaagctgcaggccagaggccagctgcaggccgccgagagcagatacgaggcccagaagagaatcacccaggtgttcgagctggagatcctggacctgtacggcagactggagaaggacggcctgctgaagaagctggaggaggagaaggccgaggccgccgaggccgccgaggagagactggactgctgcaacgacggctgcagcgacagcatggtgggccacaacgaggaggccagcggccacaacggcgagaccaagacccccagacccagcagcgccagaggcagcagcggcagcagaggcggcggcggcagcagcagcagcagcagcgagctgagcacccccgagaagcccccccaccagagagccggccccttcagcagcagatgggagaccaccatgggcgaggccagcgccagcatccccaccaccgtgggcagcctgcccagcagcaagagcttcctgggcatgaaggccagagagctgttcagaaacaagagcgagagccagtgcgacgaggacggcatgaccagcagcctgagcgagagcctgaagaccgagctgggcaaggacctgggcgtggaggccaagatccccctgaacctggacggcccccaccccagcccccccacccccgacagcgtgggccagctgcacatcatggactacaacgagacccaccacgagcacagctag

SEQ ID NO: 13348 - DNA, 2397 bp, synthetic construct
  misc_feature 1..2397: note = Description of Artificial Sequence: Synthetic coding sequence
  source 1..2397: mol_type = other DNA
atggccctgcacagcccccagtacatcttcggcgacttcagccccgacgagttcaaccagttcttcgtgacccccagaagcagcgtggagctgcccccctacagcggcaccgtgctgtgcggcacccaggccgtggacaagctgcccgacggccaggagtaccagagaatcgagttcggcgtggacgaggtgatcgagcccagcgacaccctgcccagaacccccagctacagcatcagcagcaccctgaacccccaggcccccgagttcatcctgggctgcaccgccagcaagatcacccccgacggcatcaccaaggaggccagctacggcagcatcgactgccagtaccccggcagcgccctggccctggacggcagcagcaacgtggaggccgaggtgctggagaacgacggcgtgagcggcggcctgggccagagagagagaaagaagaagaagaagagaccccccggctactacagctacctgaaggacggcggcgacgacagcatcagcaccgaggccctggtgaacggccacgccaacagcgccgtgcccaacagcgtgagcgccgaggacgccgagttcatgggcgacatgccccccagcgtgacccccagaacctgcaacagcccccagaacagcaccgacagcgtgagcgacatcgtgcccgacagccccttccccggcgccctgggcagcgacaccagaaccgccggccagcccgagggcggccccggcgccgacttcggccagagctgcttccccgccgaggccggcagagacaccctgagcagaaccgccggcgcccagccctgcgtgggcaccgacaccaccgagaacctgggcgtggccaacggccagatcctggagagcagcggcgagggcaccgccaccaacggcgtggagctgcacaccaccgagagcatcgacctggaccccaccaagcccgagagcgccagcccccccgccgacggcaccggcagcgccagcggcaccctgcccgtgagccagcccaagagctgggccagcctgttccacgacagcaagcccagcagcagcagccccgtggcctacgtggagaccaagtacagcccccccgccatcagccccctggtgagcgagaagcaggtggaggtgaaggagggcctggtgcccgtgagcgaggaccccgtggccatcaagatcgccgagctgctggagaacgtgaccctgatccacaagcccgtgagcctgcagcccagaggcctgatcaacaagggcaactggtgctacatcaacgccaccctgcaggccctggtggcctgcccccccatgtaccacctgatgaagttcatccccctgtacagcaaggtgcagagaccctgcaccagcacccccatgatcgacagcttcgtgagactgatgaacgagttcaccaacatgcccgtgccccccaagcccagacaggccctgggcgacaagatcgtgagagacatcagacccggcgccgccttcgagcccacctacatctacagactgctgaccgtgaacaagagcagcctgagcgagaagggcagacaggaggacgccgaggagtacctgggcttcatcctgaacggcctgcacgaggagatgctgaacctgaagaagctgctgagccccagcaacgagaagctgaccatcagcaacggccccaagaaccacagcgtgaacgaggaggagcaggaggagcagggcgagggcagcgaggacgagtgggagcaggtgggccccagaaacaagaccagcgtgaccagacaggccgacttcgtgcagacccccatcaccggcatcttcggcggccacatcagaagcgtggtgtaccagcagagcagcaaggagagcgccaccctgcagcccttcttcaccctgcagctggacatccagagcgacaagatcagaaccgtgcaggacgccctggagagcctggtggccagagagagcgtgcagggctacaccaccaagaccaagcaggaggtggagatcagcagaagagtgaccctggagaagctgccccccgtgctggtgctgcacctgaagagattcgtgtacgagaagaccggcggctgccagaagctgatcaagaacatcgagtaccccgtggacctggagatcagcaaggagctgctgagccccggcgtgaagaacaagaacttcaagtgccacagaacctacagactgttcgccgtggtgtaccaccacggcaacagcgccaccggcggccactacaccaccgacgtgttccagatcggcctgaacggctggctgagaatcgacgaccagaccgtgaaggtgatcaaccagtaccaggtggtgaagcccaccgccgagagaaccgcctacctgctgtactacagaagagtggacctgctgtag

SEQ ID NO: 13349 - DNA, 5355 bp, synthetic construct
  misc_feature 1..5355: note = Description of Artificial Sequence: Synthetic coding sequence
  source 1..5355: mol_type = other DNA
atggccaagcccaccagcaaggacagcggcctgaaggagaagttcaagatcctgctgggcctgggcacccccagacccaaccccagaagcgccgagggcaagcagaccgagttcatcatcaccgccgagatcctgagagagctgagcatggagtgcggcctgaacaacagaatcagaatgatcggccagatctgcgaggtggccaagaccaagaagttcgaggagcacgccgtggaggccctgtggaaggccgtggccgacctgctgcagcccgagagacccctggaggccagacacgccgtgctggccctgctgaaggccatcgtgcagggccagggcgagagactgggcgtgctgagagccctgttcttcaaggtgatcaaggactaccccagcaacgaggacctgcacgagagactggaggtgttcaaggccctgaccgacaacggcagacacatcacctacctggaggaggagctggccgacttcgtgctgcagtggatggacgtgggcctgagcagcgagttcctgctggtgctggtgaacctggtgaagttcaacagctgctacctggacgagtacatcgccagaatggtgcagatgatctgcctgctgtgcgtgagaaccgccagcagcgtggacatcgaggtgagcctgcaggtgctggacgccgtggtgtgctacaactgcctgcccgccgagagcctgcccctgttcatcgtgaccctgtgcagaaccatcaacgtgaaggagctgtgcgagccctgctggaagctgatgagaaacctgctgggcacccacctgggccacagcgccatctacaacatgtgccacctgatggaggacagagcctacatggaggacgcccccctgctgagaggcgccgtgttcttcgtgggcatggccctgtggggcgcccacagactgtacagcctgagaaacagccccaccagcgtgctgcccagcttctaccaggccatggcctgccccaacgaggtggtgagctacgagatcgtgctgagcatcaccagactgatcaagaagtacagaaaggagctgcaggtggtggcctgggacatcctgctgaacatcatcgagagactgctgcagcagctgcagaccctggacagccccgagctgagaaccatcgtgcacgacctgctgaccaccgtggaggagctgtgcgaccagaacgagttccacggcagccaggagagatacttcgagctggtggagagatgcgccgaccagagacccgagagcagcctgctgaacctgatcagctacagagcccagagcatccaccccgccaaggacggctggatccagaacctgcaggccctgatggagagattcttcagaagcgagagcagaggcgccgtgagaatcaaggtgctggacgtgctgagcttcgtgctgctgatcaacagacagttctacgaggaggagctgatcaacagcgtggtgatcagccagctgagccacatccccgaggacaaggaccaccaggtgagaaagctggccacccagctgctggtggacctggccgagggctgccacacccaccacttcaacagcctgctggacatcatcgagaaggtgatggccagaagcctgagccccccccccgagctggaggagagagacgtggccgcctacagcgccagcctggaggacgtgaagaccgccgtgctgggcctgctggtgatcctgcagaccaagctgtacaccctgcccgccagccacgccaccagagtgtacgagatgctggtgagccacatccagctgcactacaagcacagctacaccctgcccatcgccagcagcatcagactgcaggccttcgacttcctgctgctgctgagagccgacagcctgcacagactgggcctgcccaacaaggacggcgtggtgagattcagcccctactgcgtgtgcgactacatggagcccgagagaggcagcgagaagaagaccagcggccccctgagcccccccaccggcccccccggccccgcccccgccggccccgccgtgagactgggcagcgtgccctacagcctgctgttcagagtgctgctgcagtgcctgaagcaggagagcgactggaaggtgctgaagctggtgctgggcagactgcccgagagcctgagatacaaggtgctgatcttcaccagcccctgcagcgtggaccagctgtgcagcgccctgtgcagcatgctgagcggccccaagaccctggagagactgagaggcgcccccgagggcttcagcagaaccgacctgcacctggccgtggtgcccgtgctgaccgccctgatcagctaccacaactacctggacaagaccaagcagagagagatggtgtactgcctggagcagggcctgatccacagatgcgccagccagtgcgtggtggccctgagcatctgcagcgtggagatgcccgacatcatcatcaaggccctgcccgtgctggtggtgaagctgacccacatcagcgccaccgccagcatggccgtgcccctgctggagttcctgagcaccctggccagactgccccacctgtacagaaacttcgccgccgagcagtacgccagcgtgttcgccatcagcctgccctacaccaaccccagcaagttcaaccagtacatcgtgtgcctggcccaccacgtgatcgccatgtggttcatcagatgcagactgcccttcagaaaggacttcgtgcccttcatcaccaagggcctgagaagcaacgtgctgctgagcttcgacgacacccccgagaaggacagcttcagagccagaagcaccagcctgaacgagagacccaagagcctgagaatcgccagaccccccaagcagggcctgaacaacagcccccccgtgaaggagttcaaggagagcagcgccgccgaggccttcagatgcagaagcatcagcgtgagcgagcacgtggtgagaagcagaatccagaccagcctgaccagcgccagcctgggcagcgccgacgagaacagcgtggcccaggccgacgacagcctgaagaacctgcacctggagctgaccgagacctgcctggacatgatggccagatacgtgttcagcaacttcaccgccgtgcccaagagaagccccgtgggcgagttcctgctggccggcggcagaaccaagacctggctggtgggcaacaagctggtgaccgtgaccaccagcgtgggcaccggcaccagaagcctgctgggcctggacagcggcgagctgcagagcggccccgagagcagcagcagccccggcgtgcacgtgagacagaccaaggaggcccccgccaagctggagagccaggccggccagcaggtgagcagaggcgccagagacagagtgagaagcatgagcggcggccacggcctgagagtgggcgccctggacgtgcccgccagccagttcctgggcagcgccaccagccccggccccagaaccgcccccgccgccaagcccgagaaggccagcgccggcaccagagtgcccgtgcaggagaagaccaacctggccgcctacgtgcccctgctgacccagggctgggccgagatcctggtgagaagacccaccggcaacaccagctggctgatgagcctggagaaccccctgagccccttcagcagcgacatcaacaacatgcccctgcaggagctgagcaacgccctgatggccgccgagagattcaaggagcacagagacaccgccctgtacaagagcctgagcgtgcccgccgccagcaccgccaagcccccccccctgcccagaagcaacaccgacagcgccgtggtgatggaggagggcagccccggcgaggtgcccgtgctggtggagccccccggcctggaggacgtggaggccgccctgggcatggacagaagaaccgacgcctacagcagaagcagcagcgtgagcagccaggaggagaagagcctgcacgccgaggagctggtgggcagaggcatccccatcgagagagtggtgagcagcgagggcggcagacccagcgtggacctgagcttccagcccagccagcccctgagcaagagcagcagcagccccgagctgcagaccctgcaggacatcctgggcgaccccggcgacaaggccgacgtgggcagactgagccccgaggtgaaggccagaagccagagcggcaccctggacggcgagagcgccgcctggagcgccagcggcgaggacagcagaggccagcccgagggccccctgcccagcagcagccccagaagccccagcggcctgagacccagaggctacaccatcagcgacagcgcccccagcagaagaggcaagagagtggagagagacgccctgaagagcagagccaccgccagcaacgccgagaaggtgcccggcatcaaccccagcttcgtgttcctgcagctgtaccacagccccttcttcggcgacgagagcaacaagcccatcctgctgcccaacgagagccagagcttcgagagaagcgtgcagctgctggaccagatccccagctacgacacccacaagatcgccgtgctgtacgtgggcgagggccagagcaacagcgagctggccatcctgagcaacgagcacggcagctacagatacaccgagttcctgaccggcctgggcagactgatcgagctgaaggactgccagcccgacaaggtgtacctgggcggcctggacgtgtgcggcgaggacggccagttcacctactgctggcacgacgacatcatgcaggccgtgttccacatcgccaccctgatgcccaccaaggacgtggacaagcacagatgcgacaagaagagacacctgggcaacgacttcgtgagcatcgtgtacaacgacagcggcgaggacttcaagctgggcaccatcaagggccagttcaacttcgtgcacgtgatcgtgacccccctggactacgagtgcaacctggtgagcctgcagtgcagaaaggacatggagggcctggtggacaccagcgtggccaagatcgtgagcgacagaaacctgcccttcgtggccagacagatggccctgcacgccaacatggccagccaggtgcaccacagcagaagcaaccccaccgacatctaccccagcaagtggatcgccagactgagacacatcaagagactgagacagagaatctgcgaggaggccgcctacagcaaccccagcctgcccctggtgcacccccccagccacagcaaggcccccgcccagacccccgccgagcccacccccggctacgaggtgggccagagaaagagactgatcagcagcgtggaggacttcaccgagttcgtgtag

SEQ ID NO: 13350 - DNA, 5295 bp, synthetic construct
  misc_feature 1..5295: note = Description of Artificial Sequence: Synthetic coding sequence
  source 1..5295: mol_type = other DNA
atggccaagcccaccagcaaggacagcggcctgaaggagaagttcaagatcctgctgggcctgggcacccccagacccaaccccagaagcgccgagggcaagcagaccgagttcatcatcaccgccgagatcctgagagagctgagcatggagtgcggcctgaacaacagaatcagaatgatcggccagatctgcgaggtggccaagaccaagaagttcgaggagcacgccgtggaggccctgtggaaggccgtggccgacctgctgcagcccgagagacccctggaggccagacacgccgtgctggccctgctgaaggccatcgtgcagggccagggcgagagactgggcgtgctgagagccctgttcttcaaggtgatcaaggactaccccagcaacgaggacctgcacgagagactggaggtgttcaaggccctgaccgacaacggcagacacatcacctacctggaggaggagctggccgacttcgtgctgcagtggatggacgtgggcctgagcagcgagttcctgctggtgctggtgaacctggtgaagttcaacagctgctacctggacgagtacatcgccagaatggtgcagatgatctgcctgctgtgcgtgagaaccgccagcagcgtggacatcgaggtgagcctgcaggtgctggacgccgtggtgtgctacaactgcctgcccgccgagagcctgcccctgttcatcgtgaccctgtgcagaaccatcaacgtgaaggagctgtgcgagccctgctggaagctgatgagaaacctgctgggcacccacctgggccacagcgccatctacaacatgtgccacctgatggaggacagagcctacatggaggacgcccccctgctgagaggcgccgtgttcttcgtgggcatggccctgtggggcgcccacagactgtacagcctgagaaacagccccaccagcgtgctgcccagcttctaccaggccatggcctgccccaacgaggtggtgagctacgagatcgtgctgagcatcaccagactgatcaagaagtacagaaaggagctgcaggtggtggcctgggacatcctgctgaacatcatcgagagactgctgcagcagctgcagaccctggacagccccgagctgagaaccatcgtgcacgacctgctgaccaccgtggaggagctgtgcgaccagaacgagttccacggcagccaggagagatacttcgagctggtggagagatgcgccgaccagagacccgagagcagcctgctgaacctgatcagctacagagcccagagcatccaccccgccaaggacggctggatccagaacctgcaggccctgatggagagattcttcagaagcgagagcagaggcgccgtgagaatcaaggtgctggacgtgctgagcttcgtgctgctgatcaacagacagttctacgaggaggagctgatcaacagcgtggtgatcagccagctgagccacatccccgaggacaaggaccaccaggtgagaaagctggccacccagctgctggtggacctggccgagggctgccacacccaccacttcaacagcctgctggacatcatcgagaaggtgatggccagaagcctgagccccccccccgagctggaggagagagacgtggccgcctacagcgccagcctggaggacgtgaagaccgccgtgctgggcctgctggtgatcctgcagaccaagctgtacaccctgcccgccagccacgccaccagagtgtacgagatgctggtgagccacatccagctgcactacaagcacagctacaccctgcccatcgccagcagcatcagactgcaggccttcgacttcctgctgctgctgagagccgacagcctgcacagactgggcctgcccaacaaggacggcgtggtgagattcagcccctactgcgtgtgcgactacatggagcccgagagaggcagcgagaagaagaccagcggccccctgagcccccccaccggcccccccggccccgcccccgccggccccgccgtgagactgggcagcgtgccctacagcctgctgttcagagtgctgctgcagtgcctgaagcaggagagcgactggaaggtgctgaagctggtgctgggcagactgcccgagagcctgagatacaaggtgctgatcttcaccagcccctgcagcgtggaccagctgtgcagcgccctgtgcagcatgctgagcggccccaagaccctggagagactgagaggcgcccccgagggcttcagcagaaccgacctgcacctggccgtggtgcccgtgctgaccgccctgatcagctaccacaactacctggacaagaccaagcagagagagatggtgtactgcctggagcagggcctgatccacagatgcgccagccagtgcgtggtggccctgagcatctgcagcgtggagatgcccgacatcatcatcaaggccctgcccgtgctggtggtgaagctgacccacatcagcgccaccgccagcatggccgtgcccctgctggagttcctgagcaccctggccagactgccccacctgtacagaaacttcgccgccgagcagtacgccagcgtgttcgccatcagcctgccctacaccaaccccagcaagttcaaccagtacatcgtgtgcctggcccaccacgtgatcgccatgtggttcatcagatgcagactgcccttcagaaaggacttcgtgcccttcatcaccaagggcctgagaagcaacgtgctgctgagcttcgacgacacccccgagaaggacagcttcagagccagaagcaccagcctgaacgagagacccaagagcagaatccagaccagcctgaccagcgccagcctgggcagcgccgacgagaacagcgtggcccaggccgacgacagcctgaagaacctgcacctggagctgaccgagacctgcctggacatgatggccagatacgtgttcagcaacttcaccgccgtgcccaagagaagccccgtgggcgagttcctgctggccggcggcagaaccaagacctggctggtgggcaacaagctggtgaccgtgaccaccagcgtgggcaccggcaccagaagcctgctgggcctggacagcggcgagctgcagagcggccccgagagcagcagcagccccggcgtgcacgtgagacagaccaaggaggcccccgccaagctggagagccaggccggccagcaggtgagcagaggcgccagagacagagtgagaagcatgagcggcggccacggcctgagagtgggcgccctggacgtgcccgccagccagttcctgggcagcgccaccagccccggccccagaaccgcccccgccgccaagcccgagaaggccagcgccggcaccagagtgcccgtgcaggagaagaccaacctggccgcctacgtgcccctgctgacccagggctgggccgagatcctggtgagaagacccaccggcaacaccagctggctgatgagcctggagaaccccctgagccccttcagcagcgacatcaacaacatgcccctgcaggagctgagcaacgccctgatggccgccgagagattcaaggagcacagagacaccgccctgtacaagagcctgagcgtgcccgccgccagcaccgccaagcccccccccctgcccagaagcaacaccgtggccagcttcagcagcctgtaccagagcagctgccagggccagctgcacagaagcgtgagctgggccgacagcgccgtggtgatggaggagggcagccccggcgaggtgcccgtgctggtggagccccccggcctggaggacgtggaggccgccctgggcatggacagaagaaccgacgcctacagcagaagcagcagcgtgagcagccaggaggagaagagcctgcacgccgaggagctggtgggcagaggcatccccatcgagagagtggtgagcagcgagggcggcagacccagcgtggacctgagcttccagcccagccagcccctgagcaagagcagcagcagccccgagctgcagaccctgcaggacatcctgggcgaccccggcgacaaggccgacgtgggcagactgagccccgaggtgaaggccagaagccagagcggcaccctggacggcgagagcgccgcctggagcgccagcggcgaggacagcagaggccagcccgagggccccctgcccagcagcagccccagaagccccagcggcctgagacccagaggctacaccatcagcgacagcgcccccagcagaagaggcaagagagtggagagagacgccctgaagagcagagccaccgccagcaacgccgagaaggtgcccggcatcaaccccagcttcgtgttcctgcagctgtaccacagccccttcttcggcgacgagagcaacaagcccatcctgctgcccaacgagagccagagcttcgagagaagcgtgcagctgctggaccagatccccagctacgacacccacaagatcgccgtgctgtacgtgggcgagggccagagcaacagcgagctggccatcctgagcaacgagcacggcagctacagatacaccgagttcctgaccggcctgggcagactgatcgagctgaaggactgccagcccgacaaggtgtacctgggcggcctggacgtgtgcggcgaggacggccagttcacctactgctggcacgacgacatcatgcaggccgtgttccacatcgccaccctgatgcccaccaaggacgtggacaagcacagatgcgacaagaagagacacctgggcaacgacttcgtgagcatcgtgtacaacgacagcggcgaggacttcaagctgggcaccatcaagggccagttcaacttcgtgcacgtgatcgtgacccccctggactacgagtgcaacctggtgagcctgcagtgcagaaaggacatggagggcctggtggacaccagcgtggccaagatcgtgagcgacagaaacctgcccttcgtggccagacagatggccctgcacgccaacatggccagccaggtgcaccacagcagaagcaaccccaccgacatctaccccagcaagtggatcgccagactgagacacatcaagagactgagacagagaatctgcgaggaggccgcctacagcaaccccagcctgcccctggtgcacccccccagccacagcaaggcccccgcccagacccccgccgagcccacccccggctacgaggtgggccagagaaagagactgatcagcagcgtggaggacttcaccgagttcgtgtag

SEQ ID NO: 13351 - DNA, 5079 bp, synthetic construct
  misc_feature 1..5079: note = Description of Artificial Sequence: Synthetic coding sequence
  source 1..5079: mol_type = other DNA
atggagtgcggcctgaacaacagaatcagaatgatcggccagatctgcgaggtggccaagaccaagaagttcgaggagcacgccgtggaggccctgtggaaggccgtggccgacctgctgcagcccgagagacccctggaggccagacacgccgtgctggccctgctgaaggccatcgtgcagggccagggcgagagactgggcgtgctgagagccctgttcttcaaggtgatcaaggactaccccagcaacgaggacctgcacgagagactggaggtgttcaaggccctgaccgacaacggcagacacatcacctacctggaggaggagctggccgacttcgtgctgcagtggatggacgtgggcctgagcagcgagttcctgctggtgctggtgaacctggtgaagttcaacagctgctacctggacgagtacatcgccagaatggtgcagatgatctgcctgctgtgcgtgagaaccgccagcagcgtggacatcgaggtgagcctgcaggtgctggacgccgtggtgtgctacaactgcctgcccgccgagagcctgcccctgttcatcgtgaccctgtgcagaaccatcaacgtgaaggagctgtgcgagccctgctggaagctgatgagaaacctgctgggcacccacctgggccacagcgccatctacaacatgtgccacctgatggaggacagagcctacatggaggacgcccccctgctgagaggcgccgtgttcttcgtgggcatggccctgtggggcgcccacagactgtacagcctgagaaacagccccaccagcgtgctgcccagcttctaccaggccatggcctgccccaacgaggtggtgagctacgagatcgtgctgagcatcaccagactgatcaagaagtacagaaaggagctgcaggtggtggcctgggacatcctgctgaacatcatcgagagactgctgcagcagctgcagaccctggacagccccgagctgagaaccatcgtgcacgacctgctgaccaccgtggaggagctgtgcgaccagaacgagttccacggcagccaggagagatacttcgagctggtggagagatgcgccgaccagagacccgagagcagcctgctgaacctgatcagctacagagcccagagcatccaccccgccaaggacggctggatccagaacctgcaggccctgatggagagattcttcagaagcgagagcagaggcgccgtgagaatcaaggtgctggacgtgctgagcttcgtgctgctgatcaacagacagttctacgaggaggagctgatcaacagcgtggtgatcagccagctgagccacatccccgaggacaaggaccaccaggtgagaaagctggccacccagctgctggtggacctggccgagggctgccacacccaccacttcaacagcctgctggacatcatcgagaaggtgatggccagaagcctgagccccccccccgagctggaggagagagacgtggccgcctacagcgccagcctggaggacgtgaagaccgccgtgctgggcctgctggtgatcctgcagaccaagctgtacaccctgcccgccagccacgccaccagagtgtacgagatgctggtgagccacatccagctgcactacaagcacagctacaccctgcccatcgccagcagcatcagactgcaggccttcgacttcctgctgctgctgagagccgacagcctgcacagactgggcctgcccaacaaggacggcgtggtgagattcagcccctactgcgtgtgcgactacatggagcccgagagaggcagcgagaagaagaccagcggccccctgagcccccccaccggcccccccggccccgcccccgccggccccgccgtgagactgggcagcgtgccctacagcctgctgttcagagtgctgctgcagtgcctgaagcaggagagcgactggaaggtgctgaagctggtgctgggcagactgcccgagagcctgagatacaaggtgctgatcttcaccagcccctgcagcgtggaccagctgtgcagcgccctgtgcagcatgctgagcggccccaagaccctggagagactgagaggcgcccccgagggcttcagcagaaccgacctgcacctggccgtggtgcccgtgctgaccgccctgatcagctaccacaactacctggacaagaccaagcagagagagatggtgtactgcctggagcagggcctgatccacagatgcgccagccagtgcgtggtggccctgagcatctgcagcgtggagatgcccgacatcatcatcaaggccctgcccgtgctggtggtgaagctgacccacatcagcgccaccgccagcatggccgtgcccctgctggagttcctgagcaccctggccagactgccccacctgtacagaaacttcgccgccgagcagtacgccagcgtgttcgccatcagcctgccctacaccaaccccagcaagttcaaccagtacatcgtgtgcctggcccaccacgtgatcgccatgtggttcatcagatgcagactgcccttcagaaaggacttcgtgcccttcatcaccaagggcctgagaagcaacgtgctgctgagcttcgacgacacccccgagaaggacagcttcagagccagaagcaccagcctgaacgagagacccaagagcagaatccagaccagcctgaccagcgccagcctgggcagcgccgacgagaacagcgtggcccaggccgacgacagcctgaagaacctgcacctggagctgaccgagacctgcctggacatgatggccagatacgtgttcagcaacttcaccgccgtgcccaagagaagccccgtgggcgagttcctgctggccggcggcagaaccaagacctggctggtgggcaacaagctggtgaccgtgaccaccagcgtgggcaccggcaccagaagcctgctgggcctggacagcggcgagctgcagagcggccccgagagcagcagcagccccggcgtgcacgtgagacagaccaaggaggcccccgccaagctggagagccaggccggccagcaggtgagcagaggcgccagagacagagtgagaagcatgagcggcggccacggcctgagagtgggcgccctggacgtgcccgccagccagttcctgggcagcgccaccagccccggccccagaaccgcccccgccgccaagcccgagaaggccagcgccggcaccagagtgcccgtgcaggagaagaccaacctggccgcctacgtgcccctgctgacccagggctgggccgagatcctggtgagaagacccaccggcaacaccagctggctgatgagcctggagaaccccctgagccccttcagcagcgacatcaacaacatgcccctgcaggagctgagcaacgccctgatggccgccgagagattcaaggagcacagagacaccgccctgtacaagagcctgagcgtgcccgccgccagcaccgccaagcccccccccctgcccagaagcaacaccgacagcgccgtggtgatggaggagggcagccccggcgaggtgcccgtgctggtggagccccccggcctggaggacgtggaggccgccctgggcatggacagaagaaccgacgcctacagcagaagcagcagcgtgagcagccaggaggagaagagcctgcacgccgaggagctggtgggcagaggcatccccatcgagagagtggtgagcagcgagggcggcagacccagcgtggacctgagcttccagcccagccagcccctgagcaagagcagcagcagccccgagctgcagaccctgcaggacatcctgggcgaccccggcgacaaggccgacgtgggcagactgagccccgaggtgaaggccagaagccagagcggcaccctggacggcgagagcgccgcctggagcgccagcggcgaggacagcagaggccagcccgagggccccctgcccagcagcagccccagaagccccagcggcctgagacccagaggctacaccatcagcgacagcgcccccagcagaagaggcaagagagtggagagagacgccctgaagagcagagccaccgccagcaacgccgagaaggtgcccggcatcaaccccagcttcgtgttcctgcagctgtaccacagccccttcttcggcgacgagagcaacaagcccatcctgctgcccaacgagagccagagcttcgagagaagcgtgcagctgctggaccagatccccagctacgacacccacaagatcgccgtgctgtacgtgggcgagggccagagcaacagcgagctggccatcctgagcaacgagcacggcagctacagatacaccgagttcctgaccggcctgggcagactgatcgagctgaaggactgccagcccgacaaggtgtacctgggcggcctggacgtgtgcggcgaggacggccagttcacctactgctggcacgacgacatcatgcaggccgtgttccacatcgccaccctgatgcccaccaaggacgtggacaagcacagatgcgacaagaagagacacctgggcaacgacttcgtgagcatcgtgtacaacgacagcggcgaggacttcaagctgggcaccatcaagggccagttcaacttcgtgcacgtgatcgtgacccccctggactacgagtgcaacctggtgagcctgcagtgcagaaaggacatggagggcctggtggacaccagcgtggccaagatcgtgagcgacagaaacctgcccttcgtggccagacagatggccctgcacgccaacatggccagccaggtgcaccacagcagaagcaaccccaccgacatctaccccagcaagtggatcgccagactgagacacatcaagagactgagacagagaatctgcgaggaggccgcctacagcaaccccagcctgcccctggtgcacccccccagccacagcaaggcccccgcccagacccccgccgagcccacccccggctacgaggtgggccagagaaagagactgatcagcagcgtggaggacttcaccgagttcgtgtag

SEQ ID NO: 13352 - DNA, 5226 bp, synthetic construct
  misc_feature 1..5226: note = Description of Artificial Sequence: Synthetic coding sequence
  source 1..5226: mol_type = other DNA
atggccaagcccaccagcaaggacagcggcctgaaggagaagttcaagatcctgctgggcctgggcacccccagacccaaccccagaagcgccgagggcaagcagaccgagttcatcatcaccgccgagatcctgagagagctgagcatggagtgcggcctgaacaacagaatcagaatgatcggccagatctgcgaggtggccaagaccaagaagttcgaggagcacgccgtggaggccctgtggaaggccgtggccgacctgctgcagcccgagagacccctggaggccagacacgccgtgctggccctgctgaaggccatcgtgcagggccagggcgagagactgggcgtgctgagagccctgttcttcaaggtgatcaaggactaccccagcaacgaggacctgcacgagagactggaggtgttcaaggccctgaccgacaacggcagacacatcacctacctggaggaggagctggccgacttcgtgctgcagtggatggacgtgggcctgagcagcgagttcctgctggtgctggtgaacctggtgaagttcaacagctgctacctggacgagtacatcgccagaatggtgcagatgatctgcctgctgtgcgtgagaaccgccagcagcgtggacatcgaggtgagcctgcaggtgctggacgccgtggtgtgctacaactgcctgcccgccgagagcctgcccctgttcatcgtgaccctgtgcagaaccatcaacgtgaaggagctgtgcgagccctgctggaagctgatgagaaacctgctgggcacccacctgggccacagcgccatctacaacatgtgccacctgatggaggacagagcctacatggaggacgcccccctgctgagaggcgccgtgttcttcgtgggcatggccctgtggggcgcccacagactgtacagcctgagaaacagccccaccagcgtgctgcccagcttctaccaggccatggcctgccccaacgaggtggtgagctacgagatcgtgctgagcatcaccagactgatcaagaagtacagaaaggagctgcaggtggtggcctgggacatcctgctgaacatcatcgagagactgctgcagcagctgcagaccctggacagccccgagctgagaaccatcgtgcacgacctgctgaccaccgtggaggagctgtgcgaccagaacgagttccacggcagccaggagagatacttcgagctggtggagagatgcgccgaccagagacccgagagcagcctgctgaacctgatcagctacagagcccagagcatccaccccgccaaggacggctggatccagaacctgcaggccctgatggagagattcttcagaagcgagagcagaggcgccgtgagaatcaaggtgctggacgtgctgagcttcgtgctgctgatcaacagacagttctacgaggaggagctgatcaacagcgtggtgatcagccagctgagccacatccccgaggacaaggaccaccaggtgagaaagctggccacccagctgctggtggacctggccgagggctgccacacccaccacttcaacagcctgctggacatcatcgagaaggtgatggccagaagcctgagccccccccccgagctggaggagagagacgtggccgcctacagcgccagcctggaggacgtgaagaccgccgtgctgggcctgctggtgatcctgcagaccaagctgtacaccctgcccgccagccacgccaccagagtgtacgagatgctggtgagccacatccagctgcactacaagcacagctacaccctgcccatcgccagcagcatcagactgcaggccttcgacttcctgctgctgctgagagccgacagcctgcacagactgggcctgcccaacaaggacggcgtggtgagattcagcccctactgcgtgtgcgactacatggagcccgagagaggcagcgagaagaagaccagcggccccctgagcccccccaccggcccccccggccccgcccccgccggccccgccgtgagactgggcagcgtgccctacagcctgctgttcagagtgctgctgcagtgcctgaagcaggagagcgactggaaggtgctgaagctggtgctgggcagactgcccgagagcctgagatacaaggtgctgatcttcaccagcccctgcagcgtggaccagctgtgcagcgccctgtgcagcatgctgagcggccccaagaccctggagagactgagaggcgcccccgagggcttcagcagaaccgacctgcacctggccgtggtgcccgtgctgaccgccctgatcagctaccacaactacctggacaagaccaagcagagagagatggtgtactgcctggagcagggcctgatccacagatgcgccagccagtgcgtggtggccctgagcatctgcagcgtggagatgcccgacatcatcatcaaggccctgcccgtgctggtggtgaagctgacccacatcagcgccaccgccagcatggccgtgcccctgctggagttcctgagcaccctggccagactgccccacctgtacagaaacttcgccgccgagcagtacgccagcgtgttcgccatcagcctgccctacaccaaccccagcaagttcaaccagtacatcgtgtgcctggcccaccacgtgatcgccatgtggttcatcagatgcagactgcccttcagaaaggacttcgtgcccttcatcaccaagggcctgagaagcaacgtgctgctgagcttcgacgacacccccgagaaggacagcttcagagccagaagcaccagcctgaacgagagacccaagagcagaatccagaccagcctgaccagcgccagcctgggcagcgccgacgagaacagcgtggcccaggccgacgacagcctgaagaacctgcacctggagctgaccgagacctgcctggacatgatggccagatacgtgttcagcaacttcaccgccgtgcccaagagaagccccgtgggcgagttcctgctggccggcggcagaaccaagacctggctggtgggcaacaagctggtgaccgtgaccaccagcgtgggcaccggcaccagaagcctgctgggcctggacagcggcgagctgcagagcggccccgagagcagcagcagccccggcgtgcacgtgagacagaccaaggaggcccccgccaagctggagagccaggccggccagcaggtgagcagaggcgccagagacagagtgagaagcatgagcggcggccacggcctgagagtgggcgccctggacgtgcccgccagccagttcctgggcagcgccaccagccccggccccagaaccgcccccgccgccaagcccgagaaggccagcgccggcaccagagtgcccgtgcaggagaagaccaacctggccgcctacgtgcccctgctgacccagggctgggccgagatcctggtgagaagacccaccggcaacaccagctggctgatgagcctggagaaccccctgagccccttcagcagcgacatcaacaacatgcccctgcaggagctgagcaacgccctgatggccgccgagagattcaaggagcacagagacaccgccctgtacaagagcctgagcgtgcccgccgccagcaccgccaagcccccccccctgcccagaagcaacaccgacagcgccgtggtgatggaggagggcagccccggcgaggtgcccgtgctggtggagccccccggcctggaggacgtggaggccgccctgggcatggacagaagaaccgacgcctacagcagaagcagcagcgtgagcagccaggaggagaagagcctgcacgccgaggagctggtgggcagaggcatccccatcgagagagtggtgagcagcgagggcggcagacccagcgtggacctgagcttccagcccagccagcccctgagcaagagcagcagcagccccgagctgcagaccctgcaggacatcctgggcgaccccggcgacaaggccgacgtgggcagactgagccccgaggtgaaggccagaagccagagcggcaccctggacggcgagagcgccgcctggagcgccagcggcgaggacagcagaggccagcccgagggccccctgcccagcagcagccccagaagccccagcggcctgagacccagaggctacaccatcagcgacagcgcccccagcagaagaggcaagagagtggagagagacgccctgaagagcagagccaccgccagcaacgccgagaaggtgcccggcatcaaccccagcttcgtgttcctgcagctgtaccacagccccttcttcggcgacgagagcaacaagcccatcctgctgcccaacgagagccagagcttcgagagaagcgtgcagctgctggaccagatccccagctacgacacccacaagatcgccgtgctgtacgtgggcgagggccagagcaacagcgagctggccatcctgagcaacgagcacggcagctacagatacaccgagttcctgaccggcctgggcagactgatcgagctgaaggactgccagcccgacaaggtgtacctgggcggcctggacgtgtgcggcgaggacggccagttcacctactgctggcacgacgacatcatgcaggccgtgttccacatcgccaccctgatgcccaccaaggacgtggacaagcacagatgcgacaagaagagacacctgggcaacgacttcgtgagcatcgtgtacaacgacagcggcgaggacttcaagctgggcaccatcaagggccagttcaacttcgtgcacgtgatcgtgacccccctggactacgagtgcaacctggtgagcctgcagtgcagaaaggacatggagggcctggtggacaccagcgtggccaagatcgtgagcgacagaaacctgcccttcgtggccagacagatggccctgcacgccaacatggccagccaggtgcaccacagcagaagcaaccccaccgacatctaccccagcaagtggatcgccagactgagacacatcaagagactgagacagagaatctgcgaggaggccgcctacagcaaccccagcctgcccctggtgcacccccccagccacagcaaggcccccgcccagacccccgccgagcccacccccggctacgaggtgggccagagaaagagactgatcagcagcgtggaggacttcaccgagttcgtgtag

SEQ ID NO: 13353 - DNA, 5115 bp, synthetic construct
  misc_feature 1..5115: note = Description of Artificial Sequence: Synthetic coding sequence
  source 1..5115: mol_type = other DNA
atggccaagcccaccagcaaggacagcggcctgaaggagaagttcaagatcctgctgggcctgggcacccccagacccaaccccagaagcgccgagggcaagcagaccgagttcatcatcaccgccgagatcctgagagagctgagcatggagtgcggcctgaacaacagaatcagaatgatcggccagatctgcgaggtggccaagaccaagaagttcgaggagggcgagagactgggcgtgctgagagccctgttcttcaaggtgatcaaggactaccccagcaacgaggacctgcacgagagactggaggtgttcaaggccctgaccgacaacggcagacacatcacctacctggaggaggagctggccgacttcgtgctgcagtggatggacgtgggcctgagcagcgagttcctgctggtgctggtgaacctggtgaagttcaacagctgctacctggacgagtacatcgccagaatggtgcagatgatctgcctgctgtgcgtgagaaccgccagcagcgtggacatcgaggtgagcctgcaggtgctggacgccgtggtgtgctacaactgcctgcccgccgagagcctgcccctgttcatcgtgaccctgtgcagaaccatcaacgtgaaggagctgtgcgagccctgctggaagctgatgagaaacctgctgggcacccacctgggccacagcgccatctacaacatgtgccacctgatggaggacagagcctacatggaggacgcccccctgctgagaggcgccgtgttcttcgtgggcatggccctgtggggcgcccacagactgtacagcctgagaaacagccccaccagcgtgctgcccagcttctaccaggccatggcctgccccaacgaggtggtgagctacgagatcgtgctgagcatcaccagactgatcaagaagtacagaaaggagctgcaggtggtggcctgggacatcctgctgaacatcatcgagagactgctgcagcagctgcagaccctggacagccccgagctgagaaccatcgtgcacgacctgctgaccaccgtggaggagctgtgcgaccagaacgagttccacggcagccaggagagatacttcgagctggtggagagatgcgccgaccagagacccgagagcagcctgctgaacctgatcagctacagagcccagagcatccaccccgccaaggacggctggatccagaacctgcaggccctgatggagagattcttcagaagcgagagcagaggcgccgtgagaatcaaggtgctggacgtgctgagcttcgtgctgctgatcaacagacagttctacgaggaggagctgatcaacagcgtggtgatcagccagctgagccacatccccgaggacaaggaccaccaggtgagaaagctggccacccagctgctggtggacctggccgagggctgccacacccaccacttcaacagcctgctggacatcatcgagaaggtgatggccagaagcctgagccccccccccgagctggaggagagagacgtggccgcctacagcgccagcctggaggacgtgaagaccgccgtgctgggcctgctggtgatcctgcagaccaagctgtacaccctgcccgccagccacgccaccagagtgtacgagatgctggtgagccacatccagctgcactacaagcacagctacaccctgcccatcgccagcagcatcagactgcaggccttcgacttcctgctgctgctgagagccgacagcctgcacagactgggcctgcccaacaaggacggcgtggtgagattcagcccctactgcgtgtgcgactacatggagcccgagagaggcagcgagaagaagaccagcggccccctgagcccccccaccggcccccccggccccgcccccgccggccccgccgtgagactgggcagcgtgccctacagcctgctgttcagagtgctgctgcagtgcctgaagcaggagagcgactggaaggtgctgaagctggtgctgggcagactgcccgagagcctgagatacaaggtgctgatcttcaccagcccctgcagcgtggaccagctgtgcagcgccctgtgcagcatgctgagcggccccaagaccctggagagactgagaggcgcccccgagggcttcagcagaaccgacctgcacctggccgtggtgcccgtgctgaccgccctgatcagctaccacaactacctggacaagaccaagcagagagagatggtgtactgcctggagcagggcctgatccacagatgcgccagccagtgcgtggtggccctgagcatctgcagcgtggagatgcccgacatcatcatcaaggccctgcccgtgctggtggtgaagctgacccacatcagcgccaccgccagcatggccgtgcccctgctggagttcctgagcaccctggccagactgccccacctgtacagaaacttcgccgccgagcagtacgccagcgtgttcgccatcagcctgccctacaccaaccccagcaagttcaaccagtacatcgtgtgcctggcccaccacgtgatcgccatgtggttcatcagatgcagactgcccttcagaaaggacttcgtgcccttcatcaccaagggcctgagaagcaacgtgctgctgagcttcgacgacacccccgagaaggacagcttcagagccagaagcaccagcctgaacgagagacccaagagcagaatccagaccagcctgaccagcgccagcctgggcagcgccgacgagaacagcgtggcccaggccgacgacagcctgaagaacctgcacctggagctgaccgagacctgcctggacatgatggccagatacgtgttcagcaacttcaccgccgtgcccaagagaagccccgtgggcgagttcctgctggccggcggcagaaccaagacctggctggtgggcaacaagctggtgaccgtgaccaccagcgtgggcaccggcaccagaagcctgctgggcctggacagcggcgagctgcagagcggccccgagagcagcagcagccccggcgtgcacgtgagacagaccaaggaggcccccgccaagctggagagccaggccggccagcaggtgagcagaggcgccagagacagagtgagaagcatgagcggcggccacggcctgagagtgggcgccctggacgtgcccgccagccagttcctgggcagcgccaccagccccggccccagaaccgcccccgccgccaagcccgagaaggccagcgccggcaccagagtgcccgtgcaggagaagaccaacctggccgcctacgtgcccctgctgacccagggctgggccgagatcctggtgagaagacccaccggcaacaccagctggctgatgagcctggagaaccccctgagccccttcagcagcgacatcaacaacatgcccctgcaggagctgagcaacgccctgatggccgccgagagattcaaggagcacagagacaccgccctgtacaagagcctgagcgtgcccgccgccagcaccgccaagcccccccccctgcccagaagcaacaccgacagcgccgtggtgatggaggagggcagccccggcgaggtgcccgtgctggtggagccccccggcctggaggacgtggaggccgccctgggcatggacagaagaaccgacgcctacagcagaagcagcagcgtgagcagccaggaggagaagagcctgcacgccgaggagctggtgggcagaggcatccccatcgagagagtggtgagcagcgagggcggcagacccagcgtggacctgagcttccagcccagccagcccctgagcaagagcagcagcagccccgagctgcagaccctgcaggacatcctgggcgaccccggcgacaaggccgacgtgggcagactgagccccgaggtgaaggccagaagccagagcggcaccctggacggcgagagcgccgcctggagcgccagcggcgaggacagcagaggccagcccgagggccccctgcccagcagcagccccagaagccccagcggcctgagacccagaggctacaccatcagcgacagcgcccccagcagaagaggcaagagagtggagagagacgccctgaagagcagagccaccgccagcaacgccgagaaggtgcccggcatcaaccccagcttcgtgttcctgcagctgtaccacagccccttcttcggcgacgagagcaacaagcccatcctgctgcccaacgagagccagagcttcgagagaagcgtgcagctgctggaccagatccccagctacgacacccacaagatcgccgtgctgtacgtgggcgagggccagagcaacagcgagctggccatcctgagcaacgagcacggcagctacagatacaccgagttcctgaccggcctgggcagactgatcgagctgaaggactgccagcccgacaaggtgtacctgggcggcctggacgtgtgcggcgaggacggccagttcacctactgctggcacgacgacatcatgcaggccgtgttccacatcgccaccctgatgcccaccaaggacgtggacaagcacagatgcgacaagaagagacacctgggcaacgacttcgtgagcatcgtgtacaacgacagcggcgaggacttcaagctgggcaccatcaagggccagttcaacttcgtgcacgtgatcgtgacccccctggactacgagtgcaacctggtgagcctgcagtgcagaaaggacatggagggcctggtggacaccagcgtggccaagatcgtgagcgacagaaacctgcccttcgtggccagacagatggccctgcacgccaacatggccagccaggtgcaccacagcagaagcaaccccaccgacatctaccccagcaagtggatcgccagactgagacacatcaagagactgagacagagaatctgcgaggaggccgcctacagcaaccccagcctgcccctggtgcacccccccagccacagcaaggcccccgcccagacccccgccgagcccacccccggctacgaggtgggccagagaaagagactgatcagcagcgtggaggacttcaccgagttcgtgtag

SEQ ID NO: 13354 - DNA, 516 bp, synthetic construct
  misc_feature 1..516: note = Description of Artificial Sequence: Synthetic coding sequence
  source 1..516: mol_type = other DNA
ttccccagagacctgagcctgatcagccccctggcccaggccgtgagaagcagcagcagaacccccagcgacaagcccgtggcccacgtggtggccaacccccaggccgagggccagctgcagtggctgaacagaagagccaacgccctgctggccaacggcgtggagctgagagacaaccagctggtggtgcccagcgagggcctgtacctgatctacagccaggtgctgttcaagggccagggctgccccagcacccacgtgctgctgacccacaccatcagcagaatcgccgtgagctaccagaccaaggtgaacctgctgagcgccatcaagagcccctgccagagagagacccccgagggcgccgaggccaagccctggtacgagcccatctacctgggcggcgtgttccagctggagaagggcgacagactgagcgccgagatcaacagacccgactacctggacttcgccgagagcggccaggtgtacttcggcatcatcgccctgtag

SEQ ID NO: 13355 - DNA, 306 bp, synthetic construct
  misc_feature 1..306: note = Description of Artificial Sequence: Synthetic coding sequence
  source 1..306: mol_type = other DNA
atggccatgatggaggtgcagggcggccccagcctgggccagacctgcgtgctgatcgtgatcttcaccgtgctgctgcagagcctgtgcgtggccgtgacctacgtgtacttcaccaacgagctgaagcagatgcaggacaagtacagcaagagcggcatcgcctgcttcctgaaggaggacgacagctactgggaccccaacgacgaggagagcatgaacagcccctgctggcaggtgaagtggcagctgagacagctggtgagaaagacccccagaatgaagagactgtgggccgccaagtag

SEQ ID NO: 13356 - DNA, 846 bp, synthetic construct
  misc_feature 1..846: note = Description of Artificial Sequence: Synthetic coding sequence
  source 1..846: mol_type = other DNA
atggccatgatggaggtgcagggcggccccagcctgggccagacctgcgtgctgatcgtgatcttcaccgtgctgctgcagagcctgtgcgtggccgtgacctacgtgtacttcaccaacgagctgaagcagatgcaggacaagtacagcaagagcggcatcgcctgcttcctgaaggaggacgacagctactgggaccccaacgacgaggagagcatgaacagcccctgctggcaggtgaagtggcagctgagacagctggtgagaaagatgatcctgagaaccagcgaggagaccatcagcaccgtgcaggagaagcagcagaacatcagccccctggtgagagagagaggcccccagagagtggccgcccacatcaccggcaccagaggcagaagcaacaccctgagcagccccaacagcaagaacgagaaggccctgggcagaaagatcaacagctgggagagcagcagaagcggccacagcttcctgagcaacctgcacctgagaaacggcgagctggtgatccacgagaagggcttctactacatctacagccagacctacttcagattccaggaggagatcaaggagaacaccaagaacgacaagcagatggtgcagtacatctacaagtacaccagctaccccgaccccatcctgctgatgaagagcgccagaaacagctgctggagcaaggacgccgagtacggcctgtacagcatctaccagggcggcatcttcgagctgaaggagaacgacagaatcttcgtgagcgtgaccaacgagcacctgatcgacatggaccacgaggccagcttcttcggcgccttcctggtgggctag

SEQ ID NO: 13357 - DNA, 858 bp, synthetic construct
  misc_feature 1..858: note = Description of Artificial Sequence: Synthetic coding sequence
  source 1..858: mol_type = other DNA
atggacgacagcaccgagagagagcagagcagactgaccagctgcctgaagaagagagaggagatgaagctgaaggagtgcgtgagcatcctgcccagaaaggagagccccagcgtgagaagcagcaaggacggcaagctgctggccgccaccctgctgctggccctgctgagctgctgcctgaccgtggtgagcttctaccaggtggccgccctgcagggcgacctggccagcctgagagccgagctgcagggccaccacgccgagaagctgcccgccggcgccggcgcccccaaggccggcctggaggaggcccccgccgtgaccgccggcctgaagatcttcgagccccccgcccccggcgagggcaacagcagccagaacagcagaaacaagagagccgtgcagggccccgaggagaccgtgacccaggactgcctgcagctgatcgccgacagcgagacccccaccatccagaagggcagctacaccttcgtgccctggctgctgagcttcaagagaggcagcgccctggaggagaaggagaacaagatcctggtgaaggagaccggctacttcttcatctacggccaggtgctgtacaccgacaagacctacgccatgggccacctgatccagagaaagaaggtgcacgtgttcggcgacgagctgagcctggtgaccctgttcagatgcatccagaacatgcccgagaccctgcccaacaacagctgctacagcgccggcatcgccaagctggaggagggcgacgagctgcagctggccatccccagagagaacgcccagatcagcctggacggcgacgtgaccttcttcggcgccctgaagctgctgtag

SEQ ID NO: 13358 - DNA, 801 bp, synthetic construct
  misc_feature 1..801: note = Description of Artificial Sequence: Synthetic coding sequence
  source 1..801: mol_type = other DNA
atggacgacagcaccgagagagagcagagcagactgaccagctgcctgaagaagagagaggagatgaagctgaaggagtgcgtgagcatcctgcccagaaaggagagccccagcgtgagaagcagcaaggacggcaagctgctggccgccaccctgctgctggccctgctgagctgctgcctgaccgtggtgagcttctaccaggtggccgccctgcagggcgacctggccagcctgagagccgagctgcagggccaccacgccgagaagctgcccgccggcgccggcgcccccaaggccggcctggaggaggcccccgccgtgaccgccggcctgaagatcttcgagccccccgcccccggcgagggcaacagcagccagaacagcagaaacaagagagccgtgcagggccccgaggagaccggcagctacaccttcgtgccctggctgctgagcttcaagagaggcagcgccctggaggagaaggagaacaagatcctggtgaaggagaccggctacttcttcatctacggccaggtgctgtacaccgacaagacctacgccatgggccacctgatccagagaaagaaggtgcacgtgttcggcgacgagctgagcctggtgaccctgttcagatgcatccagaacatgcccgagaccctgcccaacaacagctgctacagcgccggcatcgccaagctggaggagggcgacgagctgcagctggccatccccagagagaacgcccagatcagcctggacggcgacgtgaccttcttcggcgccctgaagctgctgtag

SEQ ID NO: 13359 - DNA, 495 bp, synthetic construct
  misc_feature 1..495: note = Description of Artificial Sequence: Synthetic coding sequence
  source 1..495: mol_type = other DNA
atggacgacagcaccgagagagagcagagcagactgaccagctgcctgaagaagagagaggagatgaagctgaaggagtgcgtgagcatcctgcccagaaaggagagccccagcgtgagaagcagcaaggacggcaagctgctggccgccaccctgctgctggccctgctgagctgctgcctgaccgtggtgagcttctaccaggtggccgccctgcagggcgacctggccagcctgagagccgagctgcagggccaccacgccgagaagctgcccgccggcgccggcgcccccaaggccggcctggaggaggcccccgccgtgaccgccggcctgaagatcttcgagccccccgcccccggcgagggcaacagcagccagaacagcagaaacaagagagccgtgcagggccccgaggagaccgtgacccaggactgcctgcagctgatcgccgacagcgagacccccaccatccagaagggcttcatctactag

SEQ ID NO: 13360 - DNA, 2700 bp, synthetic construct
  misc_feature 1..2700: note = Description of Artificial Sequence: Synthetic coding sequence
  source 1..2700: mol_type = other DNA
atgcccaccctgggctggctgcccgagaacagagacatcagcgaggaccagagcagcgccgagcagacccaggccctggccagccaggccagccagttcctggccaaggtggagagcttcgagagactgatccaggccggcagactgatgccccaggaccaggtgaagggcttccagagactgaaggccgcccacgccgccctggaggaggagtacctgaaggcctgcagagagcagcaccccgcccagcccctggccggcagcaagggcacccccggcagattcgaccccagaagagagctggaggccgagatctacagactgggcagctgcctggaggagctgaaggagcacatcgaccagacccagcaggagcccgagccccccggcagcgacagcgccctggacagcacccccgccctgccctgcctgcaccagcccacccacctgcccgcccccagcggccaggcccccatgcccgccatcaagaccagctgccccgagcccgccaccaccaccgccgccgccagcaccggcccctgccccctgcacgtgaacgtggaggtgagcagcggcaacagcgaggtggaggacagaccccaggaccccctggccagactgagacacaaggagctgcagatggagcaggtgtaccacggcctgatggagagatacctgagcgtgaagagcctgcccgaggccatgagaatggaggaggaggaggagggcgaggaggaggaggaggaggagggcggcggcgacagcctggaggtggacggcgtggccgccacccccggcaaggccgaggccaccagagtgctgcccagacagtgccccgtgcaggccgagaagagccacggcgcccccctggaggaggccaccgagaagatggtgagcatgaagccccccggcttccaggccagcctggccagagacggccacatgagcggcctgggcaaggccgaggccgccccccccggccccggcgtgcccccccacccccccggcaccaagagcgccgccagccaccagagcagcatgaccagcctggagggcagcggcatcagcgagagactgccccagaagcccctgcacagaggcggcggcccccacctggaggagacctggatggccagccccgagaccgacagcggcttcgtgggcagcgagaccagcagagtgagccccctgacccagacccccgagcacagactgagccacatcagcaccgccggcaccctggcccagcccttcgccgccagcgtgcccagagacggcgccagctaccccaaggccagaggcagcctgatccccagaagagccaccgagcccagcacccccagaagccaggcccagagatacctgagcagccccagcggccccctgagacagagagcccccaacttcagcctggagagaaccctggccgccgagatggccgtgcccggcagcgagttcgagggccacaagagaatcagcgagcagcccctgcccaacaagaccatcagccccccccccgcccccgcccccgccgccgcccccctgccctgcggccccaccgagaccatccccagcttcctgctgaccagagccggcagagaccaggccatctgcgagctgcaggaggaggtgagcagactgagactgagactggaggacagcctgcaccagcccctgcagggcagccccaccagacccgccagcgccttcgacagacccgccagaaccagaggcagacccgccgacagccccgccacctggggcagccactacggcagcaagagcaccgagagactgcccggcgagcccagaggcgaggagcagatcgtgccccccggcagacagagagccagaagcagcagcgtgcccagagaggtgctgagactgagcctgagcagcgagagcgagctgcccagcctgcccctgttcagcgagaagagcaagaccaccaaggacagcccccaggccgccagagacggcaagagaggcgtgggcagcgccggctggcccgacagagtgaccttcagaggccagtacaccggccacgagtaccacgtgctgagccccaaggccgtgcccaagggcaacggcaccgtgagctgcccccactgcagacccatcagaacccaggacgccggcggcgccgtgaccggcgaccccctgggccccccccccgccgacaccctgcagtgccccctgtgcggccaggtgggcagcccccccgaggccgacggccccggcagcgccaccagcggcgccgagaaggccaccaccagaagaaaggccagcagcacccccagccccaagcagagaagcaagcaggccggcagcagccccagacccccccccggcctgtggtacctggccaccgccccccccgcccccgccccccccgccttcgcctacatcagcagcgtgcccatcatgccctacccccccgccgccgtgtactacgcccccgccggccccaccagcgcccagcccgccgccaagtggccccccaccgccagccccccccccgccagaagacacagacacagcatccagctggacctgggcgacctggaggagctgaacaaggccctgagcagagccgtgcaggccgccgagagcgtgagaagcaccaccagacagatgagaagcagcctgagcgccgacctgagacaggcccacagcctgagaggcagctgcctgttctag

SEQ ID NO: 13361 - DNA, 1569 bp, synthetic construct
  misc_feature 1..1569: note = Description of Artificial Sequence: Synthetic coding sequence
  source 1..1569: mol_type = other DNA
atggccctgctgcccagagccctgagcgccggcgccggccccagctggagaagagccgccagagccttcagaggcttcctgctgctgctgcccgagcccgccgccctgaccagagccctgagcagagccatggcctgcagacaggagccccagccccagggccccccccccgccgccggcgccgtggccagctacgactacctggtgatcggcggcggcagcggcggcctggccagcgccagaagagccgccgagctgggcgccagagccgccgtggtggagagccacaagctgggcggcacctgcgtgaacgtgggctgcgtgcccaagaaggtgatgtggaacaccgccgtgcacagcgagttcatgcacgaccacgccgactacggcttccccagctgcgagggcaagttcaactggagagtgatcaaggagaagagagacgcctacgtgagcagactgaacgccatctaccagaacaacctgaccaagagccacatcgagatcatcagaggccacgccgccttcaccagcgaccccaagcccaccatcgaggtgagcggcaagaagtacaccgccccccacatcctgatcgccaccggcggcatgcccagcaccccccacgagagccagatccccggcgccagcctgggcatcaccagcgacggcttcttccagctggaggagctgcccggcagaagcgtgatcgtgggcgccggctacatcgccgtggagatggccggcatcctgagcgccctgggcagcaagaccagcctgatgatcagacacgacaaggtgctgagaagcttcgacagcatgatcagcaccaactgcaccgaggagctggagaacgccggcgtggaggtgctgaagttcagccaggtgaaggaggtgaagaagaccctgagcggcctggaggtgagcatggtgaccgccgtgcccggcagactgcccgtgatgaccatgatccccgacgtggactgcctgctgtgggccatcggcagagtgcccaacaccaaggacctgagcctgaacaagctgggcatccagaccgacgacaagggccacatcatcgtggacgagttccagaacaccaacgtgaagggcatctacgccgtgggcgacgtgtgcggcaaggccctgctgacccccgtggccatcgccgccggcagaaagctggcccacagactgttcgagtacaaggaggacagcaagctggactacaacaacatccccaccgtggtgttcagccacccccccatcggcaccgtgggcctgaccgaggacgaggccatccacaagtacggcatcgagaacgtgaagacctacagcaccagcttcacccccatgtaccacgccgtgaccaagagaaagaccaagtgcgtgatgaagatggtgtgcgccaacaaggaggagaaggtggtgggcatccacatgcagggcctgggctgcgacgagatgctgcagggcttcgccgtggccgtgaagatgggcgccaccaaggccgacttcgacaacaccgtggccatccaccccaccagcagcgaggagctggtgaccctgagatag

SEQ ID NO: 13362 - DNA, 1323 bp, synthetic construct
  misc_feature 1..1323: note = Description of Artificial Sequence: Synthetic coding sequence
  source 1..1323: mol_type = other DNA
atggagcagagaggccagaacgcccccgccgccagcggcgccagaaagagacacggccccggccccagagaggccagaggcgccagacccggccccagagtgcccaagaccctggtgctggtggtggccgccgtgctgctgctggtgagcgccgagagcgccctgatcacccagcaggacctggccccccagcagagagccgccccccagcagaagagaagcagccccagcgagggcctgtgcccccccggccaccacatcagcgaggacggcagagactgcatcagctgcaagtacggccaggactacagcacccactggaacgacctgctgttctgcctgagatgcaccagatgcgacagcggcgaggtggagctgagcccctgcaccaccaccagaaacaccgtgtgccagtgcgaggagggcaccttcagagaggaggacagccccgagatgtgcagaaagtgcagaaccggctgccccagaggcatggtgaaggtgggcgactgcaccccctggagcgacatcgagtgcgtgcacaaggagagcggcaccaagcacagcggcgaggtgcccgccgtggaggagaccgtgaccagcagccccggcacccccgccagcccctgcagcctgagcggcatcatcatcggcgtgaccgtggccgccgtggtgctgatcgtggccgtgttcgtgtgcaagagcctgctgtggaagaaggtgctgccctacctgaagggcatctgcagcggcggcggcggcgaccccgagagagtggacagaagcagccagagacccggcgccgaggacaacgtgctgaacgagatcgtgagcatcctgcagcccacccaggtgcccgagcaggagatggaggtgcaggagcccgccgagcccaccggcgtgaacatgctgagccccggcgagagcgagcacctgctggagcccgccgaggccgagagaagccagagaagaagactgctggtgcccgccaacgagggcgaccccaccgagaccctgagacagtgcttcgacgacttcgccgacctggtgcccttcgacagctgggagcccctgatgagaaagctgggcctgatggacaacgagatcaaggtggccaaggccgaggccgccggccacagagacaccctgtacaccatgctgatcaagtgggtgaacaagaccggcagagacgccagcgtgcacaccctgctggacgccctggagaccctgggcgagagactggccaagcagaagatcgaggaccacctgctgagcagcggcaagttcatgtacctggagggcaacgccgacagcgccatgagctag

SEQ ID NO: 13363 - DNA, 1236 bp, synthetic construct
  misc_feature 1..1236: note = Description of Artificial Sequence: Synthetic coding sequence
  source 1..1236: mol_type = other DNA
atggagcagagaggccagaacgcccccgccgccagcggcgccagaaagagacacggccccggccccagagaggccagaggcgccagacccggccccagagtgcccaagaccctggtgctggtggtggccgccgtgctgctgctggtgagcgccgagagcgccctgatcacccagcaggacctggccccccagcagagagccgccccccagcagaagagaagcagccccagcgagggcctgtgcccccccggccaccacatcagcgaggacggcagagactgcatcagctgcaagtacggccaggactacagcacccactggaacgacctgctgttctgcctgagatgcaccagatgcgacagcggcgaggtggagctgagcccctgcaccaccaccagaaacaccgtgtgccagtgcgaggagggcaccttcagagaggaggacagccccgagatgtgcagaaagtgcagaaccggctgccccagaggcatggtgaaggtgggcgactgcaccccctggagcgacatcgagtgcgtgcacaaggagagcggcatcatcatcggcgtgaccgtggccgccgtggtgctgatcgtggccgtgttcgtgtgcaagagcctgctgtggaagaaggtgctgccctacctgaagggcatctgcagcggcggcggcggcgaccccgagagagtggacagaagcagccagagacccggcgccgaggacaacgtgctgaacgagatcgtgagcatcctgcagcccacccaggtgcccgagcaggagatggaggtgcaggagcccgccgagcccaccggcgtgaacatgctgagccccggcgagagcgagcacctgctggagcccgccgaggccgagagaagccagagaagaagactgctggtgcccgccaacgagggcgaccccaccgagaccctgagacagtgcttcgacgacttcgccgacctggtgcccttcgacagctgggagcccctgatgagaaagctgggcctgatggacaacgagatcaaggtggccaaggccgaggccgccggccacagagacaccctgtacaccatgctgatcaagtgggtgaacaagaccggcagagacgccagcgtgcacaccctgctggacgccctggagaccctgggcgagagactggccaagcagaagatcgaggaccacctgctgagcagcggcaagttcatgtacctggagggcaacgccgacagcgccatgagctag

SEQ ID NO: 13364 - DNA, 783 bp, synthetic construct
  misc_feature 1..783: note = Description of Artificial Sequence: Synthetic coding sequence
  source 1..783: mol_type = other DNA
atgtgcagaaagtgcagaaccggctgccccagaggcatggtgaaggtgggcgactgcaccccctggagcgacatcgagtgcgtgcacaaggagagcggcatcatcatcggcgtgaccgtggccgccgtggtgctgatcgtggccgtgttcgtgtgcaagagcctgctgtggaagaaggtgctgccctacctgaagggcatctgcagcggcggcggcggcgaccccgagagagtggacagaagcagccagagacccggcgccgaggacaacgtgctgaacgagatcgtgagcatcctgcagcccacccaggtgcccgagcaggagatggaggtgcaggagcccgccgagcccaccggcgtgaacatgctgagccccggcgagagcgagcacctgctggagcccgccgaggccgagagaagccagagaagaagactgctggtgcccgccaacgagggcgaccccaccgagaccctgagacagtgcttcgacgacttcgccgacctggtgcccttcgacagctgggagcccctgatgagaaagctgggcctgatggacaacgagatcaaggtggccaaggccgaggccgccggccacagagacaccctgtacaccatgctgatcaagtgggtgaacaagaccggcagagacgccagcgtgcacaccctgctggacgccctggagaccctgggcgagagactggccaagcagaagatcgaggaccacctgctgagcagcggcaagttcatgtacctggagggcaacgccgacagcgccatgagctag

SEQ ID NO: 13365 - DNA, 1161 bp, synthetic construct
  misc_feature 1..1161: note = Description of Artificial Sequence: Synthetic coding sequence
  source 1..1161: mol_type = other DNA
atgggcctgtggggccagagcgtgcccaccgccagcagcgccagagccggcagataccccggcgccagaaccgccagcggcaccagaccctggctgctggaccccaagatcctgaagttcgtggtgttcatcgtggccgtgctgctgcccgtgagagtggacagcgccaccatccccagacaggacgaggtgccccagcagaccgtggccccccagcagcagagaagaagcctgaaggaggaggagtgccccgccggcagccacagaagcgagtacaccggcgcctgcaacccctgcaccgagggcgtggactacaccatcgccagcaacaacctgcccagctgcctgctgtgcaccgtgtgcaagagcggccagaccaacaagagcagctgcaccaccaccagagacaccgtgtgccagtgcgagaagggcagcttccaggacaagaacagccccgagatgtgcagaacctgcagaaccggctgccccagaggcatggtgaaggtgagcaactgcacccccagaagcgacatcaagtgcaagaacgagagcgccgccagcagcaccggcaagacccccgccgccgaggagaccgtgaccaccatcctgggcatgctggccagcccctaccactacctgatcatcatcgtggtgctggtgatcatcctggccgtggtggtggtgggcttcagctgcagaaagaagttcatcagctacctgaagggcatctgcagcggcggcggcggcggccccgagagagtgcacagagtgctgttcagaagaagaagctgccccagcagagtgcccggcgccgaggacaacgccagaaacgagaccctgagcaacagatacctgcagcccacccaggtgagcgagcaggagatccagggccaggagctggccgagctgaccggcgtgaccgtggagctgcccgaggagccccagagactgctggagcaggccgaggccgagggctgccagagaagaagactgctggtgcccgtgaacgacgccgacagcgccgacatcagcaccctgctggacgccagcgccaccctggaggagggccacgccaaggagaccatccaggaccagctggtgggcagcgagaagctgttctacgaggaggacgaggccggcagcgccaccagctgcctgtag

SEQ ID NO: 13366 - DNA, 1368 bp, synthetic construct
  misc_feature 1..1368: note = Description of Artificial Sequence: Synthetic coding sequence
  source 1..1368: mol_type = other DNA
atgggcctgagcaccgtgcccgacctgctgctgcccctggtgctgctggagctgctggtgggcatctaccccagcggcgtgatcggcctggtgccccacctgggcgacagagagaagagagacagcgtgtgcccccagggcaagtacatccacccccagaacaacagcatctgctgcaccaagtgccacaagggcacctacctgtacaacgactgccccggccccggccaggacaccgactgcagagagtgcgagagcggcagcttcaccgccagcgagaaccacctgagacactgcctgagctgcagcaagtgcagaaaggagatgggccaggtggagatcagcagctgcaccgtggacagagacaccgtgtgcggctgcagaaagaaccagtacagacactactggagcgagaacctgttccagtgcttcaactgcagcctgtgcctgaacggcaccgtgcacctgagctgccaggagaagcagaacaccgtgtgcacctgccacgccggcttcttcctgagagagaacgagtgcgtgagctgcagcaactgcaagaagagcctggagtgcaccaagctgtgcctgccccagatcgagaacgtgaagggcaccgaggacagcggcaccaccgtgctgctgcccctggtgatcttcttcggcctgtgcctgctgagcctgctgttcatcggcctgatgtacagataccagagatggaagagcaagctgtacagcatcgtgtgcggcaagagcacccccgagaaggagggcgagctggagggcaccaccaccaagcccctggcccccaaccccagcttcagccccacccccggcttcacccccaccctgggcttcagccccgtgcccagcagcaccttcaccagcagcagcacctacacccccggcgactgccccaacttcgccgcccccagaagagaggtggcccccccctaccagggcgccgaccccatcctggccaccgccctggccagcgaccccatccccaaccccctgcagaagtgggaggacagcgcccacaagccccagagcctggacaccgacgaccccgccaccctgtacgccgtggtggagaacgtgccccccctgagatggaaggagttcgtgagaagactgggcctgagcgaccacgagatcgacagactggagctgcagaacggcagatgcctgagagaggcccagtacagcatgctggccacctggagaagaagaacccccagaagagaggccaccctggagctgctgggcagagtgctgagagacatggacctgctgggctgcctggaggacatcgaggaggccctgtgcggccccgccgccctgccccccgcccccagcctgctgagatag

SEQ ID NO: 13367 - DNA, 657 bp, synthetic construct
  misc_feature 1..657: note = Description of Artificial Sequence: Synthetic coding sequence
  source 1..657: mol_type = other DNA
atgggcctgagcaccgtgcccgacctgctgctgcccctggtgctgctggagctgctggtgggcatctaccccagcggcgtgatcggcctggtgccccacctgggcgacagagagaagagagacagcgtgtgcccccagggcaagtacatccacccccagaacaacagcatctgctgcaccaagtgccacaagggcacctacctgtacaacgactgccccggccccggccaggacaccgactgcagagagtgcgagagcggcagcttcaccgccagcgagaaccacctgagacactgcctgagctgcagcaagtgcagaaaggagatgggccaggtggagatcagcagctgcaccgtggacagagacaccgtgtgcggctgcagaaagaaccagtacagacactactggagcgagaacctgttccagtgcttcaactgcagcctgtgcctgaacggcaccgtgcacctgagctgccaggagaagcagaacaccgtgtgcacctgccacgccggcttcttcctgagagagaacgagtgcgtgagctgcagcaaggtgctgctgtgcagacccggctggaacgccgtggccagaagcagactgaccgccaccagcgccagccagatccaggccatcctgctgctgcagccccccaagtag

SEQ ID NO: 13368 - DNA, 1386 bp, synthetic construct
  misc_feature 1..1386: note = Description of Artificial Sequence: Synthetic coding sequence
  source 1..1386: mol_type = other DNA
atggcccccgtggccgtgtgggccgccctggccgtgggcctggagctgtgggccgccgcccacgccctgcccgcccaggtggccttcaccccctacgcccccgagcccggcagcacctgcagactgagagagtactacgaccagaccgcccagatgtgctgcagcaagtgcagccccggccagcacgccaaggtgttctgcaccaagaccagcgacaccgtgtgcgacagctgcgaggacagcacctacacccagctgtggaactgggtgcccgagtgcctgagctgcggcagcagatgcagcagcgaccaggtggagacccaggcctgcaccagagagcagaacagaatctgcacctgcagacccggctggtactgcgccctgagcaagcaggagggctgcagactgtgcgcccccctgagaaagtgcagacccggcttcggcgtggccagacccggcaccgagaccagcgacgtggtgtgcaagccctgcgcccccggcaccttcagcaacaccaccagcagcaccgacatctgcagaccccaccagatctgcaacgtggtggccatccccggcaacgccagcatggacgccgtgtgcaccagcaccagccccaccagaagcatggcccccggcgccgtgcacctgccccagcccgtgagcaccagaagccagcacacccagcccacccccgagcccagcaccgcccccagcaccagcttcctgctgcccatgggccccagcccccccgccgagggcagcaccggcgacttcgccctgcccgtgggcctgatcgtgggcgtgaccgccctgggcctgctgatcatcggcgtggtgaactgcgtgatcatgacccaggtgaagaagaagcccctgtgcctgcagagagaggccaaggtgccccacctgcccgccgacaaggccagaggcacccagggccccgagcagcagcacctgctgatcaccgcccccagcagcagcagcagcagcctggagagcagcgccagcgccctggacagaagagcccccaccagaaaccagccccaggcccccggcgtggaggccagcggcgccggcgaggccagagccagcaccggcagcagcgacagcagccccggcggccacggcacccaggtgaacgtgacctgcatcgtgaacgtgtgcagcagcagcgaccacagcagccagtgcagcagccaggccagcagcaccatgggcgacaccgacagcagccccagcgagagccccaaggacgagcaggtgcccttcagcaaggaggagtgcgccttcagaagccagctggagacccccgagaccctgctgggcagcaccgaggagaagcccctgcccctgggcgtgcccgacgccggcatgaagcccagctag

SEQ ID NO: 13369 - DNA, 807 bp, synthetic construct
  misc_feature 1..807: note = Description of Artificial Sequence: Synthetic coding sequence
  source 1..807: mol_type = other DNA
atggcccccgtggccgtgtgggccgccctggccgtgggcctggagctgtgggccgccgcccacgccctgcccgcccaggtggccttcaccccctacgcccccgagcccggcagcacctgcagactgagagagtactacgaccagaccgcccagatgtgctgcagcaagtgcagccccggccagcacgccaaggtgttctgcaccaagaccagcgacaccgtgtgcgacagctgcgaggacagcacctacacccagctgtggaactgggtgcccgagtgcctgagctgcggcagcagatgcagcagcgaccaggtggagacccaggcctgcaccagagagcagaacagaatctgcacctgcagacccggctggtactgcgccctgagcaagcaggagggctgcagactgtgcgcccccctgagaaagtgcagacccggcttcggcgtggccagacccggcaccgagaccagcgacgtggtgtgcaagccctgcgcccccggcaccttcagcaacaccaccagcagcaccgacatctgcagaccccaccagatctgcaacgtggtggccatccccggcaacgccagcatggacgccgtgtgcaccagcaccagccccaccagaagcatggcccccggcgccgtgcacctgccccagcccgtgagcaccagaagccagcacacccagcccacccccgagcccagcaccgcccccagcaccagcttcctgctgcccatgggccccagcccccccgccgagggcagcaccggcgacttcgccctgcccgtggtgagcctgagcagcagctag

SEQ ID NO: 13370 - DNA, 468 bp, synthetic construct
  misc_feature 1..468: note = Description of Artificial Sequence: Synthetic coding sequence
  source 1..468: mol_type = other DNA
atggcccccgtggccgtgtgggccgccctggccgtgggcctggagctgtgggccgccgcccacgccctgcccgcccaggtggccttcaccccctacgcccccgagcccggcagcacctgcagactgagagagtactacgaccagaccgcccagatgtgctgcagcaagtgcagccccggccagcacgccaaggtgttctgcaccaagaccagcgacaccgtgtgcgacagctgcgaggacagcacctacacccagctgtggaactgggtgcccgagtgcctgagctgcggcagcagatgcagcagcgaccaggtggagacccaggcctgcaccagagagcagaacagaatctgcacctgcagacccggctggtactgcgccctgagcaagcaggagggctgcagactgtgcgcccccctgagaaagtgcagacccggcttcggcgtggccagacccgacctgagctag

SEQ ID NO: 13371 - DNA, 114 bp, synthetic construct
  misc_feature 1..114: note = Description of Artificial Sequence: Synthetic coding sequence
  source 1..114: mol_type = other DNA
atggcccccgtggccgtgtgggccgccctggccgtgggcctggagctgtgggccgccgcccacgccctgcccgcccaggtggaccccggccccctgttcccccaccccggctag

SEQ ID NO: 13372 - DNA, 1968 bp, synthetic construct
  misc_feature 1..1968: note = Description of Artificial Sequence: Synthetic coding sequence
  source 1..1968: mol_type = other DNA
atgggcaccagccccagcagcagcaccgccctggccagctgcagcagaatcgccagaagagccaccgccaccatgatcgccggcagcctgctgctgctgggcttcctgagcaccaccaccgcccagcccgagcagaaggccagcaacctgatcggcacctacagacacgtggacagagccaccggccaggtgctgacctgcgacaagtgccccgccggcacctacgtgagcgagcactgcaccaacaccagcctgagagtgtgcagcagctgccccgtgggcaccttcaccagacacgagaacggcatcgagaagtgccacgactgcagccagccctgcccctggcccatgatcgagaagctgccctgcgccgccctgaccgacagagagtgcacctgcccccccggcatgttccagagcaacgccacctgcgccccccacaccgtgtgccccgtgggctggggcgtgagaaagaagggcaccgagaccgaggacgtgagatgcaagcagtgcgccagaggcaccttcagcgacgtgcccagcagcgtgatgaagtgcaaggcctacaccgactgcctgagccagaacctggtggtgatcaagcccggcaccaaggagaccgacaacgtgtgcggcaccctgcccagcttcagcagcagcaccagccccagccccggcaccgccatcttccccagacccgagcacatggagacccacgaggtgcccagcagcacctacgtgcccaagggcatgaacagcaccgagagcaacagcagcgccagcgtgagacccaaggtgctgagcagcatccaggagggcaccgtgcccgacaacaccagcagcgccagaggcaaggaggacgtgaacaagaccctgcccaacctgcaggtggtgaaccaccagcagggcccccaccacagacacatcctgaagctgctgcccagcatggaggccaccggcggcgagaagagcagcacccccatcaagggccccaagagaggccaccccagacagaacctgcacaagcacttcgacatcaacgagcacctgccctggatgatcgtgctgttcctgctgctggtgctggtggtgatcgtggtgtgcagcatcagaaagagcagcagaaccctgaagaagggccccagacaggaccccagcgccatcgtggagaaggccggcctgaagaagagcatgacccccacccagaacagagagaagtggatctactactgcaacggccacggcatcgacatcctgaagctggtggccgcccaggtgggcagccagtggaaggacatctaccagttcctgtgcaacgccagcgagagagaggtggccgccttcagcaacggctacaccgccgaccacgagagagcctacgccgccctgcagcactggaccatcagaggccccgaggccagcctggcccagctgatcagcgccctgagacagcacagaagaaacgacgtggtggagaagatcagaggcctgatggaggacaccacccagctggagaccgacaagctggccctgcccatgagccccagccccctgagccccagccccatccccagccccaacgccaagctggagaacagcgccctgctgaccgtggagcccagcccccaggacaagaacaagggcttcttcgtggacgagagcgagcccctgctgagatgcgacagcaccagcagcggcagcagcgccctgagcagaaacggcagcttcatcaccaaggagaagaaggacaccgtgctgagacaggtgagactggacccctgcgacctgcagcccatcttcgacgacatgctgcacttcctgaaccccgaggagctgagagtgatcgaggagatcccccaggccgaggacaagctggacagactgttcgagatcatcggcgtgaagagccaggaggccagccagaccctgctggacagcgtgtacagccacctgcccgacctgctgtag

SEQ ID NO: 13373 - DNA, 1035 bp, synthetic construct
  misc_feature 1..1035: note = Description of Artificial Sequence: Synthetic coding sequence
  source 1..1035: mol_type = other DNA
agctgctgcagaccctggagacccctgggcgccagaagccccgccagacccagcagacccaagagaggccaccccagacagaacctgcacaagcacttcgacatcaacgagcacctgccctggatgatcgtgctgttcctgctgctggtgctggtggtgatcgtggtgtgcagcatcagaaagagcagcagaaccctgaagaagggccccagacaggaccccagcgccatcgtggagaaggccggcctgaagaagagcatgacccccacccagaacagagagaagtggatctactactgcaacggccacggcatcgacatcctgaagctggtggccgcccaggtgggcagccagtggaaggacatctaccagttcctgtgcaacgccagcgagagagaggtggccgccttcagcaacggctacaccgccgaccacgagagagcctacgccgccctgcagcactggaccatcagaggccccgaggccagcctggcccagctgatcagcgccctgagacagcacagaagaaacgacgtggtggagaagatcagaggcctgatggaggacaccacccagctggagaccgacaagctggccctgcccatgagccccagccccctgagccccagccccatccccagccccaacgccaagctggagaacagcgccctgctgaccgtggagcccagcccccaggacaagaacaagggcttcttcgtggacgagagcgagcccctgctgagatgcgacagcaccagcagcggcagcagcgccctgagcagaaacggcagcttcatcaccaaggagaagaaggacaccgtgctgagacaggtgagactggacccctgcgacctgcagcccatcttcgacgacatgctgcacttcctgaaccccgaggagctgagagtgatcgaggagatcccccaggccgaggacaagctggacagactgttcgagatcatcggcgtgaagagccaggaggccagccagaccctgctggacagcgtgtacagccacctgcccgacctgctgtag

SEQ ID NO: 13374 - DNA, 1119 bp, synthetic construct
  misc_feature 1..1119: note = Description of Artificial Sequence: Synthetic coding sequence
  source 1..1119: mol_type = other DNA
atggagcagagacccagaggctgcgccgccgtggccgccgccctgctgctggtgctgctgggcgccagagcccagggcggcaccagaagccccagatgcgactgcgccggcgacttccacaagaagatcggcctgttctgctgcagaggctgccccgccgccagccaggtggccctggagaactgcagcgccgtggccgacaccagatgcggctgcaagcccggctggttcgtggagtgccaggtgagccagtgcgtgagcagcagccccttctactgccagccctgcctggactgcggcgccctgcacagacacaccagactgctgtgcagcagaagagacaccgactgcggcacctgcctgcccggcttctacgagcacggcgacggctgcgtgagctgccccaccagcaccctgggcagctgccccgagagatgcgccgccgtgtgcggctggagacagatgttctgggtgcaggtgctgctggccggcctggtggtgcccctgctgctgggcgccaccctgacctacacctacagacactgctggccccacaagcccctggtgaccgccgacgaggccggcatggaggccctgacccccccccccgccacccacctgagccccctggacagcgcccacaccctgctggccccccccgacagcagcgagaagatctgcaccgtgcagctggtgggcaacagctggacccccggctaccccgagacccaggaggccctgtgcccccaggtgacctggagctgggaccagctgcccagcagagccctgggccccgccgccgcccccaccctgagccccgagagccccgccggcagccccgccatgatgctgcagcccggcccccagctgtacgacgtgatggacgccgtgcccgccagaagatggaaggagttcgtgagaaccctgggcctgagagaggccgagatcgaggccgtggaggtggagatcggcagattcagagaccagcagtacgagatgctgaagagatggagacagcagcagcccgccggcctgggcgccgtgtacgccgccctggagagaatgggcctggacggctgcgtggaggacctgagaagcagactgcagagaggcccctag

SEQ ID NO: 13375 - DNA, 705 bp, synthetic construct
  misc_feature 1..705: note = Description of Artificial Sequence: Synthetic coding sequence
  source 1..705: mol_type = other DNA
atggagcagagacccagaggctgcgccgccgtggccgccgccctgctgctggtgctgctgggcgccagagcccagggcggcaccagaagccccagatgcgactgcgccggcgacttccacaagaagatcggcctgttctgctgcagaggctgccccgccgacgaggccggcatggaggccctgacccccccccccgccacccacctgagccccctggacagcgcccacaccctgctggccccccccgacagcagcgagaagatctgcaccgtgcagctggtgggcaacagctggacccccggctaccccgagacccaggaggccctgtgcccccaggtgacctggagctgggaccagctgcccagcagagccctgggccccgccgccgcccccaccctgagccccgagagccccgccggcagccccgccatgatgctgcagcccggcccccagctgtacgacgtgatggacgccgtgcccgccagaagatggaaggagttcgtgagaaccctgggcctgagagaggccgagatcgaggccgtggaggtggagatcggcagattcagagaccagcagtacgagatgctgaagagatggagacagcagcagcccgccggcctgggcgccgtgtacgccgccctggagagaatgggcctggacggctgcgtggaggacctgagaagcagactgcagagaggcccctag

SEQ ID NO: 13376 - DNA, 1143 bp, synthetic construct
  misc_feature 1..1143: note = Description of Artificial Sequence: Synthetic coding sequence
  source 1..1143: mol_type = other DNA
atggagcagagacccagaggctgcgccgccgtggccgccgccctgctgctggtgctgctgggcgccagagcccagggcggcaccagaagccccagatgcgactgcgccggcgacttccacaagaagatcggcctgttctgctgcagaggctgccccgccggccactacctgaaggccccctgcaccgagccctgcggcaacagcacctgcctggtgtgcccccaggacaccttcctggcctgggagaaccaccacaacagcgagtgcgccagatgccaggcctgcgacgagcaggccagccaggtggccctggagaactgcagcgccgtggccgacaccagatgcggctgcaagcccggctggttcgtggagtgccaggtgagccagtgcgtgagcagcagccccttctactgccagccctgcctggactgcggcgccctgcacagacacaccagactgctgtgcagcagaagagacaccgactgcggcacctgcctgcccggcttctacgagcacggcgacggctgcgtgagctgccccaccagcaccctgggcagctgccccgagagatgcgccgccgtgtgcggctggagacagaacgaggccggcatggaggccctgacccccccccccgccacccacctgagccccctggacagcgcccacaccctgctggccccccccgacagcagcgagaagatctgcaccgtgcagctggtgggcaacagctggacccccggctaccccgagacccaggaggccctgtgcccccaggtgacctggagctgggaccagctgcccagcagagccctgggccccgccgccgcccccaccctgagccccgagagccccgccggcagccccgccatgatgctgcagcccggcccccagctgtacgacgtgatggacgccgtgcccgccagaagatggaaggagttcgtgagaaccctgggcctgagagaggccgagatcgaggccgtggaggtggagatcggcagattcagagaccagcagtacgagatgctgaagagatggagacagcagcagcccgccggcctgggcgccgtgtacgccgccctggagagaatgggcctggacggctgcgtggaggacctgagaagcagactgcagagaggcccctag

SEQ ID NO: 13377 - DNA, 1254 bp, synthetic construct
  misc_feature 1..1254: note = Description of Artificial Sequence: Synthetic coding sequence
  source 1..1254: mol_type = other DNA
atggagcagagacccagaggctgcgccgccgtggccgccgccctgctgctggtgctgctgggcgccagagcccagggcggcaccagaagccccagatgcgactgcgccggcgacttccacaagaagatcggcctgttctgctgcagaggctgccccgccggccactacctgaaggccccctgcaccgagccctgcggcaacagcacctgcctggtgtgcccccaggacaccttcctggcctgggagaaccaccacaacagcgagtgcgccagatgccaggcctgcgacgagcaggccagccaggtggccctggagaactgcagcgccgtggccgacaccagatgcggctgcaagcccggctggttcgtggagtgccaggtgagccagtgcgtgagcagcagccccttctactgccagccctgcctggactgcggcgccctgcacagacacaccagactgctgtgcagcagaagagacaccgactgcggcacctgcctgcccggcttctacgagcacggcgacggctgcgtgagctgccccaccagcaccctgggcagctgccccgagagatgcgccgccgtgtgcggctggagacagatgttctgggtgcaggtgctgctggccggcctggtggtgcccctgctgctgggcgccaccctgacctacacctacagacactgctggccccacaagcccctggtgaccgccgacgaggccggcatggaggccctgacccccccccccgccacccacctgagccccctggacagcgcccacaccctgctggccccccccgacagcagcgagaagatctgcaccgtgcagctggtgggcaacagctggacccccggctaccccgagacccaggaggccctgtgcccccaggtgacctggagctgggaccagctgcccagcagagccctgggccccgccgccgcccccaccctgagccccgagagccccgccggcagccccgccatgatgctgcagcccggcccccagctgtacgacgtgatggacgccgtgcccgccagaagatggaaggagttcgtgagaaccctgggcctgagagaggccgagatcgaggccgtggaggtggagatcggcagattcagagaccagcagtacgagatgctgaagagatggagacagcagcagcccgccggcctgggcgccgtgtacgccgccctggagagaatgggcctggacggctgcgtggaggacctgagaagcagactgcagagaggcccctag

SEQ ID NO: 13378 - DNA, 1281 bp, synthetic construct
  misc_feature 1..1281: note = Description of Artificial Sequence: Synthetic coding sequence
  source 1..1281: mol_type = other DNA
atggagcagagacccagaggctgcgccgccgtggccgccgccctgctgctggtgctgctgggcgccagagcccagggcggcaccagaagccccagatgcgactgcgccggcgacttccacaagaagatcggcctgttctgctgcagaggctgccccgccggccactacctgaaggccccctgcaccgagccctgcggcaacagcacctgcctggtgtgcccccaggacaccttcctggcctgggagaaccaccacaacagcgagtgcgccagatgccaggcctgcgacgagcaggccagccaggtggccctggagaactgcagcgccgtggccgacaccagatgcggctgcaagcccggctggttcgtggagtgccaggtgagccagtgcgtgagcagcagccccttctactgccagccctgcctggactgcggcgccctgcacagacacaccagactgctgtgcagcagaagagacaccgactgcggcacctgcctgcccggcttctacgagcacggcgacggctgcgtgagctgccccacccccccccccagcctggccggcgccccctggggcgccgtgcagagcgccgtgcccctgagcgtggccggcggcagagtgggcgtgttctgggtgcaggtgctgctggccggcctggtggtgcccctgctgctgggcgccaccctgacctacacctacagacactgctggccccacaagcccctggtgaccgccgacgaggccggcatggaggccctgacccccccccccgccacccacctgagccccctggacagcgcccacaccctgctggccccccccgacagcagcgagaagatctgcaccgtgcagctggtgggcaacagctggacccccggctaccccgagacccaggaggccctgtgcccccaggtgacctggagctgggaccagctgcccagcagagccctgggccccgccgccgcccccaccctgagccccgagagccccgccggcagccccgccatgatgctgcagcccggcccccagctgtacgacgtgatggacgccgtgcccgccagaagatggaaggagttcgtgagaaccctgggcctgagagaggccgagatcgaggccgtggaggtggagatcggcagattcagagaccagcagtacgagatgctgaagagatggagacagcagcagcccgccggcctgggcgccgtgtacgccgccctggagagaatgggcctggacggctgcgtggaggacctgagaagcagactgcagagaggcccctag

SEQ ID NO: 13379 - DNA, 768 bp, synthetic construct
  misc_feature 1..768: note = Description of Artificial Sequence: Synthetic coding sequence
  source 1..768: mol_type = other DNA
atgggcaacagctgctacaacatcgtggccaccctgctgctggtgctgaacttcgagagaaccagaagcctgcaggacccctgcagcaactgccccgccggcaccttctgcgacaacaacagaaaccagatctgcagcccctgcccccccaacagcttcagcagcgccggcggccagagaacctgcgacatctgcagacagtgcaagggcgtgttcagaaccagaaaggagtgcagcagcaccagcaacgccgagtgcgactgcacccccggcttccactgcctgggcgccggctgcagcatgtgcgagcaggactgcaagcagggccaggagctgaccaagaagggctgcaaggactgctgcttcggcaccttcaacgaccagaagagaggcatctgcagaccctggaccaactgcagcctggacggcaagagcgtgctggtgaacggcaccaaggagagagacgtggtgtgcggccccagccccgccgacctgagccccggcgccagcagcgtgaccccccccgcccccgccagagagcccggccacagcccccagatcatcagcttcttcctggccctgaccagcaccgccctgctgttcctgctgttcttcctgaccctgagattcagcgtggtgaagagaggcagaaagaagctgctgtacatcttcaagcagcccttcatgagacccgtgcagaccacccaggaggaggacggctgcagctgcagattccccgaggaggaggagggcggctgcgagctgtag

SEQ ID NO: 13380 - DNA, 5919 bp, synthetic construct
  misc_feature 1..5919: note = Description of Artificial Sequence: Synthetic coding sequence
  source 1..5919: mol_type = other DNA
atggaccccaccggcagccagctggacagcgacttcagccagcaggacaccccctgcctgatcatcgaggacagccagcccgagagccaggtgctggaggacgacagcggcagccacttcagcatgctgagcagacacctgcccaacctgcagacccacaaggagaaccccgtgctggacgtggtgagcaaccccgagcagaccgccggcgaggagagaggcgacggcaacagcggcttcaacgagcacctgaaggagaacaaggtggccgaccccgtggacagcagcaacctggacacctgcggcagcatcagccaggtgatcgagcagctgccccagcccaacagaaccagcagcgtgctgggcatgagcgtggagagcgcccccgccgtggaggaggagaagggcgaggagctggagcagaaggagaaggagaaggaggaggacaccagcggcaacaccacccacagcctgggcgccgaggacaccgccagcagccagctgggcttcggcgtgctggagctgagccagagccaggacgtggaggagaacaccgtgccctacgaggtggacaaggagcagctgcagagcgtgaccaccaacagcggctacaccagactgagcgacgtggacgccaacaccgccatcaagcacgaggagcagagcaacgaggacatccccatcgccgagcagagcagcaaggacatccccgtgaccgcccagcccagcaaggacgtgcacgtggtgaaggagcagaaccccccccccgccagaagcgaggacatgcccttcagccccaaggccagcgtggccgccatggaggccaaggagcagctgagcgcccaggagctgatggagagcggcctgcagatccagaagagccccgagcccgaggtgctgagcacccaggaggacctgttcgaccagagcaacaagaccgtgagcagcgacggctgcagcacccccagcagagaggagggcggctgcagcctggccagcacccccgccaccaccctgcacctgctgcagctgagcggccagagaagcctggtgcaggacagcctgagcaccaacagcagcgacctggtggcccccagccccgacgccttcagaagcacccccttcatcgtgcccagcagccccaccgagcaggagggcagacaggacaagcccatggacaccagcgtgctgagcgaggagggcggcgagcccttccagaagaagctgcagagcggcgagcccgtggagctggagaacccccccctgctgcccgagagcaccgtgagcccccaggccagcacccccatcagccagagcacccccgtgttcccccccggcagcctgcccatccccagccagccccagttcagccacgacatcttcatccccagccccagcctggaggagcagagcaacgacggcaagaaggacggcgacatgcacagcagcagcctgaccgtggagtgcagcaagaccagcgagatcgagcccaagaacagccccgaggacctgggcctgagcctgaccggcgacagctgcaagctgatgctgagcaccagcgagtacagccagagccccaagatggagagcctgagcagccacagaatcgacgaggacggcgagaacacccagatcgaggacaccgagcccatgagccccgtgctgaacagcaagttcgtgcccgccgagaacgacagcatcctgatgaaccccgcccaggacggcgaggtgcagctgagccagaacgacgacaagaccaagggcgacgacaccgacaccagagacgacatcagcatcctggccaccggctgcaagggcagagaggagaccgtggccgaggacgtgtgcatcgacctgacctgcgacagcggcagccaggccgtgcccagccccgccaccagaagcgaggccctgagcagcgtgctggaccaggaggaggccatggagatcaaggagcaccaccccgaggagggcagcagcggcagcgaggtggaggagatccccgagaccccctgcgagagccagggcgaggagctgaaggaggagaacatggagagcgtgcccctgcacctgagcctgaccgagacccagagccagggcctgtgcctgcagaaggagatgcccaagaaggagtgcagcgaggccatggaggtggagaccagcgtgatcagcatcgacagcccccagaagctggccatcctggaccaggagctggagcacaaggagcaggaggcctgggaggaggccaccagcgaggacagcagcgtggtgatcgtggacgtgaaggagcccagccccagagtggacgtgagctgcgagcccctggagggcgtggagaagtgcagcgacagccagagctgggaggacatcgcccccgagatcgagccctgcgccgagaacagactggacaccaaggaggagaagagcgtggagtacgagggcgacctgaagagcggcaccgccgagaccgagcccgtggagcaggacagcagccagcccagcctgcccctggtgagagccgacgaccccctgagactggaccaggagctgcagcagccccagacccaggagaagaccagcaacagcctgaccgaggacagcaagatggccaacgccaagcagctgagcagcgacgccgaggcccagaagctgggcaagcccagcgcccacgccagccagagcttctgcgagagcagcagcgagacccccttccacttcaccctgcccaaggagggcgacatcatcccccccctgaccggcgccaccccccccctgatcggccacctgaagctggagcccaagagacacagcacccccatcggcatcagcaactaccccgagagcaccatcgccaccagcgacgtgatgagcgagagcatggtggagacccacgaccccatcctgggcagcggcaagggcgacagcggcgccgcccccgacgtggacgacaagctgtgcctgagaatgaagctggtgagccccgagaccgaggccagcgaggagagcctgcagttcaacctggagaagcccgccaccggcgagagaaagaacggcagcaccgccgtggccgagagcgtggccagcccccagaagaccatgagcgtgctgagctgcatctgcgaggccagacaggagaacgaggccagaagcgaggacccccccaccacccccatcagaggcaacctgctgcacttccccagcagccagggcgaggaggagaaggagaagctggagggcgaccacaccatcagacagagccagcagcccatgaagcccatcagccccgtgaaggaccccgtgagccccgccagccagaagatggtgatccagggccccagcagcccccagggcgaggccatggtgaccgacgtgctggaggaccagaaggagggcagaagcaccaacaaggagaaccccagcaaggccctgatcgagagacccagccagaacaacatcggcatccagaccatggagtgcagcctgagagtgcccgagaccgtgagcgccgccacccagaccatcaagaacgtgtgcgagcagggcaccagcaccgtggaccagaacttcggcaagcaggacgccaccgtgcagaccgagagaggcagcggcgagaagcccgtgagcgcccccggcgacgacaccgagagcctgcacagccagggcgaggaggagttcgacatgccccagcccccccacggccacgtgctgcacagacacatgagaaccatcagagaggtgagaaccctggtgaccagagtgatcaccgacgtgtactacgtggacggcaccgaggtggagagaaaggtgaccgaggagaccgaggagcccatcgtggagtgccaggagtgcgagaccgaggtgagccccagccagaccggcggcagcagcggcgacctgggcgacatcagcagcttcagcagcaaggccagcagcctgcacagaaccagcagcggcaccagcctgagcgccatgcacagcagcggcagcagcggcaagggcgccggccccctgagaggcaagaccagcggcaccgagcccgccgacttcgccctgcccagcagcagaggcggccccggcaagctgagccccagaaagggcgtgagccagaccggcacccccgtgtgcgaggaggacggcgacgccggcctgggcatcagacagggcggcaaggcccccgtgacccccagaggcagaggcagaagaggcagaccccccagcagaaccaccggcaccagagagaccgccgtgcccggccccctgggcatcgaggacatcagccccaacctgagccccgacgacaagagcttcagcagagtggtgcccagagtgcccgacagcaccagaagaaccgacgtgggcgccggcgccctgagaagaagcgacagccccgagatccccttccaggccgccgccggccccagcgacggcctggacgccagcagccccggcaacagcttcgtgggcctgagagtggtggccaagtggagcagcaacggctacttctacagcggcaagatcaccagagacgtgggcgccggcaagtacaagctgctgttcgacgacggctacgagtgcgacgtgctgggcaaggacatcctgctgtgcgaccccatccccctggacaccgaggtgaccgccctgagcgaggacgagtacttcagcgccggcgtggtgaagggccacagaaaggagagcggcgagctgtactacagcatcgagaaggagggccagagaaagtggtacaagagaatggccgtgatcctgagcctggagcagggcaacagactgagagagcagtacggcctgggcccctacgaggccgtgacccccctgaccaaggccgccgacatcagcctggacaacctggtggagggcaagagaaagagaagaagcaacgtgagcagccccgccacccccaccgccagcagcagcagcagcaccacccccaccagaaagatcaccgagagccccagagccagcatgggcgtgctgagcggcaagagaaagctgatcaccagcgaggaggagagaagccccgccaagagaggcagaaagagcgccaccgtgaagcccggcgccgtgggcgccggcgagttcgtgagcccctgcgagagcggcgacaacaccggcgagcccagcgccctggaggagcagagaggccccctgcccctgaacaagaccctgttcctgggctacgccttcctgctgaccatggccaccaccagcgacaagctggccagcagaagcaagctgcccgacggccccaccggcagcagcgaggaggaggaggagttcctggagatcccccccttcaacaagcagtacaccgagagccagctgagagccggcgccggctacatcctggaggacttcaacgaggcccagtgcaacaccgcctaccagtgcctgctgatcgccgaccagcactgcagaaccagaaagtacttcctgtgcctggccagcggcatcccctgcgtgagccacgtgtgggtgcacgacagctgccacgccaaccagctgcagaactacagaaactacctgctgcccgccggctacagcctggaggagcagagaatcctggactggcagcccagagagaaccccttccagaacctgaaggtgctgctggtgagcgaccagcagcagaacttcctggagctgtggagcgagatcctgatgaccggcggcgccgccagcgtgaagcagcaccacagcagcgcccacaacaaggacatcgccctgggcgtgttcgacgtggtggtgaccgaccccagctgccccgccagcgtgctgaagtgcgccgaggccctgcagctgcccgtggtgagccaggagtgggtgatccagtgcctgatcgtgggcgagagaatcggcttcaagcagcaccccaagtacaagcacgactacgtgagccactag

SEQ ID NO: 13381 - DNA, 5784 bp, synthetic construct
  misc_feature 1..5784: note = Description of Artificial Sequence: Synthetic coding sequence
  source 1..5784: mol_type = other DNA
atgcccggcgagcagatggaccccaccggcagccagctggacagcgacttcagccagcaggacaccccctgcctgatcatcgaggacagccagcccgagagccaggtgctggaggacgacagcggcagccacttcagcatgctgagcagacacctgcccaacctgcagacccacaaggagaaccccgtgctggacgtggtgagcaaccccgagcagaccgccggcgaggagagaggcgacggcaacagcggcttcaacgagcacctgaaggagaacaaggtggccgaccccgtggacagcagcaacctggacacctgcggcagcatcagccaggtgatcgagcagctgccccagcccaacagaaccagcagcgtgctgggcatgagcgtggagagcgcccccgccgtggaggaggagaagggcgaggagctggagcagaaggagaaggagaaggaggaggacaccagcggcaacaccacccacagcctgggcgccgaggacaccgccagcagccagctgggcttcggcgtgctggagctgagccagagccaggacgtggaggagaacaccgtgccctacgaggtggacaaggagcagctgcagagcgtgaccaccaacagcggctacaccagactgagcgacgtggacgccaacaccgccatcaagcacgaggagcagagcaacgaggacatccccatcgccgagcagagcagcaaggacatccccgtgaccgcccagcccagcaaggacgtgcacgtggtgaaggagcagaaccccccccccgccagaagcgaggacatgcccttcagccccaaggccagcgtggccgccatggaggccaaggagcagctgagcgcccaggagctgatggagagcggcctgcagatccagaagagccccgagcccgaggtgctgagcacccaggaggacctgttcgaccagagcaacaagaccgtgagcagcgacggctgcagcacccccagcagagaggagggcggctgcagcctggccagcacccccgccaccaccctgcacctgctgcagctgagcggccagagaagcctggtgcaggacagcctgagcaccaacagcagcgacctggtggcccccagccccgacgccttcagaagcacccccttcatcgtgcccagcagccccaccgagcaggagggcagacaggacaagcccatggacaccagcgtgctgagcgaggagggcggcgagcccttccagaagaagctgcagagcggcgagcccgtggagctggagaacccccccctgctgcccgagagcaccgtgagcccccaggccagcacccccatcagccagagcacccccgtgttcccccccggcagcctgcccatccccagccagccccagttcagccacgacatcttcatccccagccccagcctggaggagcagagcaacgacggcaagaaggacggcgacatgcacagcagcagcctgaccgtggagtgcagcaagaccagcgagatcgagcccaagaacagccccgaggacctgggcctgagcctgaccggcgacagctgcaagctgatgctgagcaccagcgagtacagccagagccccaagatggagagcctgagcagccacagaatcgacgaggacggcgagaacacccagatcgaggacaccgagcccatgagccccgtgctgaacagcaagttcgtgcccgccgagaacgacagcatcctgatgaaccccgcccaggacggcgaggtgcagctgagccagaacgacgacaagaccaagggcgacgacaccgacaccagagacgacatcagcatcctggccaccggctgcaagggcagagaggagaccgtggccgaggacgtgtgcatcgacctgacctgcgacagcggcagccaggccgtgcccagccccgccaccagaagcgaggccctgagcagcgtgctggaccaggaggaggccatggagatcaaggagcaccaccccgaggagggcagcagcggcagcgaggtggaggagatccccgagaccccctgcgagagccagggcgaggagctgaaggaggagaacatggagagcgtgcccctgcacctgagcctgaccgagacccagagccagggcctgtgcctgcagaaggagatgcccaagaaggagtgcagcgaggccatggaggtggagaccagcgtgatcagcatcgacagcccccagaagctggccatcctggaccaggagctggagcacaaggagcaggaggcctgggaggaggccaccagcgaggacagcagcgtggtgatcgtggacgtgaaggagcccagccccagagtggacgtgagctgcgagcccctggagggcgtggagaagtgcagcgacagccagagctgggaggacatcgcccccgagatcgagccctgcgccgagaacagactggacaccaaggaggagaagagcgtggagtacgagggcgacctgaagagcggcaccgccgagaccgagcccgtggagcaggacagcagccagcccagcctgcccctggtgagagccgacgaccccctgagactggaccaggagctgcagcagccccagacccaggagaagaccagcaacagcctgaccgaggacagcaagatggccaacgccaagcagctgagcagcgacgccgaggcccagaagctgggcaagcccagcgcccacgccagccagagcttctgcgagagcagcagcgagacccccttccacttcaccctgcccaaggagggcgacatcatcccccccctgaccggcgccaccccccccctgatcggccacctgaagctggagcccaagagacacagcacccccatcggcatcagcaactaccccgagagcaccatcgccaccagcgacgtgatgagcgagagcatggtggagacccacgaccccatcctgggcagcggcaagggcgacagcggcgccgcccccgacgtggacgacaagctgtgcctgagaatgaagctggtgagccccgagaccgaggccagcgaggagagcctgcagttcaacctggagaagcccgccaccggcgagagaaagaacggcagcaccgccgtggccgagagcgtggccagcccccagaagaccatgagcgtgctgagctgcatctgcgaggccagacaggagaacgaggccagaagcgaggacccccccaccacccccatcagaggcaacctgctgcacttccccagcagccagggcgaggaggagaaggagaagctggagggcgaccacaccatcagacagagccagcagcccatgaagcccatcagccccgtgaaggaccccgtgagccccgccagccagaagatggtgatccagggccccagcagcccccagggcgaggccatggtgaccgacgtgctggaggaccagaaggagggcagaagcaccaacaaggagaaccccagcaaggccctgatcgagagacccagccagaacaacatcggcatccagaccatggagtgcagcctgagagtgcccgagaccgtgagcgccgccacccagaccatcaagaacgtgtgcgagcagggcaccagcaccgtggaccagaacttcggcaagcaggacgccaccgtgcagaccgagagaggcagcggcgagaagcccgtgagcgcccccggcgacgacaccgagagcctgcacagccagggcgaggaggagttcgacatgccccagcccccccacggccacgtgctgcacagacacatgagaaccatcagagaggtgagaaccctggtgaccagagtgatcaccgacgtgtactacgtggacggcaccgaggtggagagaaaggtgaccgaggagaccgaggagcccatcgtggagtgccaggagtgcgagaccgaggtgagccccagccagaccggcggcagcagcggcgacctgggcgacatcagcagcttcagcagcaaggccagcagcctgcacagaaccagcagcggcaccagcctgagcgccatgcacagcagcggcagcagcggcaagggcgccggccccctgagaggcaagaccagcggcaccgagcccgccgacttcgccctgcccagcagcagaggcggccccggcaagctgagagagaccgccgtgcccggccccctgggcatcgaggacatcagccccaacctgagccccgacgacaagagcttcagcagagtggtgcccagagtgcccgacagcaccagaagaaccgacgtgggcgccggcgccctgagaagaagcgacagccccgagatccccttccaggccgccgccggccccagcgacggcctggacgccagcagccccggcaacagcttcgtgggcctgagagtggtggccaagtggagcagcaacggctacttctacagcggcaagatcaccagagacgtgggcgccggcaagtacaagctgctgttcgacgacggctacgagtgcgacgtgctgggcaaggacatcctgctgtgcgaccccatccccctggacaccgaggtgaccgccctgagcgaggacgagtacttcagcgccggcgtggtgaagggccacagaaaggagagcggcgagctgtactacagcatcgagaaggagggccagagaaagtggtacaagagaatggccgtgatcctgagcctggagcagggcaacagactgagagagcagtacggcctgggcccctacgaggccgtgacccccctgaccaaggccgccgacatcagcctggacaacctggtggagggcaagagaaagagaagaagcaacgtgagcagccccgccacccccaccgccagcagcagcagcagcaccacccccaccagaaagatcaccgagagccccagagccagcatgggcgtgctgagcggcaagagaaagctgatcaccagcgaggaggagagaagccccgccaagagaggcagaaagagcgccaccgtgaagcccggcgccgtgggcgccggcgagttcgtgagcccctgcgagagcggcgacaacaccggcgagcccagcgccctggaggagcagagaggccccctgcccctgaacaagaccctgttcctgggctacgccttcctgctgaccatggccaccaccagcgacaagctggccagcagaagcaagctgcccgacggccccaccggcagcagcgaggaggaggaggagttcctggagatcccccccttcaacaagcagtacaccgagagccagctgagagccggcgccggctacatcctggaggacttcaacgaggcccagtgcaacaccgcctaccagtgcctgctgatcgccgaccagcactgcagaaccagaaagtacttcctgtgcctggccagcggcatcccctgcgtgagccacgtgtgggtgcacgacagctgccacgccaaccagctgcagaactacagaaactacctgctgcccgccggctacagcctggaggagcagagaatcctggactggcagcccagagagaaccccttccagaacctgaaggtgctgctggtgagcgaccagcagcagaacttcctggagctgtggagcgagatcctgatgaccggcggcgccgccagcgtgaagcagcaccacagcagcgcccacaacaaggacatcgccctgggcgtgttcgacgtggtggtgaccgaccccagctgccccgccagcgtgctgaagtgcgccgaggccctgcagctgcccgtggtgagccaggagtgggtgatccagtgcctgatcgtgggcgagagaatcggcttcaagcagcaccccaagtacaagcacgactacgtgagccactag

SEQ ID NO: 13382 - DNA, 5934 bp, synthetic construct
  misc_feature 1..5934: note = Description of Artificial Sequence: Synthetic coding sequence
  source 1..5934: mol_type = other DNA
atgcccggcgagcagatggaccccaccggcagccagctggacagcgacttcagccagcaggacaccccctgcctgatcatcgaggacagccagcccgagagccaggtgctggaggacgacagcggcagccacttcagcatgctgagcagacacctgcccaacctgcagacccacaaggagaaccccgtgctggacgtggtgagcaaccccgagcagaccgccggcgaggagagaggcgacggcaacagcggcttcaacgagcacctgaaggagaacaaggtggccgaccccgtggacagcagcaacctggacacctgcggcagcatcagccaggtgatcgagcagctgccccagcccaacagaaccagcagcgtgctgggcatgagcgtggagagcgcccccgccgtggaggaggagaagggcgaggagctggagcagaaggagaaggagaaggaggaggacaccagcggcaacaccacccacagcctgggcgccgaggacaccgccagcagccagctgggcttcggcgtgctggagctgagccagagccaggacgtggaggagaacaccgtgccctacgaggtggacaaggagcagctgcagagcgtgaccaccaacagcggctacaccagactgagcgacgtggacgccaacaccgccatcaagcacgaggagcagagcaacgaggacatccccatcgccgagcagagcagcaaggacatccccgtgaccgcccagcccagcaaggacgtgcacgtggtgaaggagcagaaccccccccccgccagaagcgaggacatgcccttcagccccaaggccagcgtggccgccatggaggccaaggagcagctgagcgcccaggagctgatggagagcggcctgcagatccagaagagccccgagcccgaggtgctgagcacccaggaggacctgttcgaccagagcaacaagaccgtgagcagcgacggctgcagcacccccagcagagaggagggcggctgcagcctggccagcacccccgccaccaccctgcacctgctgcagctgagcggccagagaagcctggtgcaggacagcctgagcaccaacagcagcgacctggtggcccccagccccgacgccttcagaagcacccccttcatcgtgcccagcagccccaccgagcaggagggcagacaggacaagcccatggacaccagcgtgctgagcgaggagggcggcgagcccttccagaagaagctgcagagcggcgagcccgtggagctggagaacccccccctgctgcccgagagcaccgtgagcccccaggccagcacccccatcagccagagcacccccgtgttcccccccggcagcctgcccatccccagccagccccagttcagccacgacatcttcatccccagccccagcctggaggagcagagcaacgacggcaagaaggacggcgacatgcacagcagcagcctgaccgtggagtgcagcaagaccagcgagatcgagcccaagaacagccccgaggacctgggcctgagcctgaccggcgacagctgcaagctgatgctgagcaccagcgagtacagccagagccccaagatggagagcctgagcagccacagaatcgacgaggacggcgagaacacccagatcgaggacaccgagcccatgagccccgtgctgaacagcaagttcgtgcccgccgagaacgacagcatcctgatgaaccccgcccaggacggcgaggtgcagctgagccagaacgacgacaagaccaagggcgacgacaccgacaccagagacgacatcagcatcctggccaccggctgcaagggcagagaggagaccgtggccgaggacgtgtgcatcgacctgacctgcgacagcggcagccaggccgtgcccagccccgccaccagaagcgaggccctgagcagcgtgctggaccaggaggaggccatggagatcaaggagcaccaccccgaggagggcagcagcggcagcgaggtggaggagatccccgagaccccctgcgagagccagggcgaggagctgaaggaggagaacatggagagcgtgcccctgcacctgagcctgaccgagacccagagccagggcctgtgcctgcagaaggagatgcccaagaaggagtgcagcgaggccatggaggtggagaccagcgtgatcagcatcgacagcccccagaagctggccatcctggaccaggagctggagcacaaggagcaggaggcctgggaggaggccaccagcgaggacagcagcgtggtgatcgtggacgtgaaggagcccagccccagagtggacgtgagctgcgagcccctggagggcgtggagaagtgcagcgacagccagagctgggaggacatcgcccccgagatcgagccctgcgccgagaacagactggacaccaaggaggagaagagcgtggagtacgagggcgacctgaagagcggcaccgccgagaccgagcccgtggagcaggacagcagccagcccagcctgcccctggtgagagccgacgaccccctgagactggaccaggagctgcagcagccccagacccaggagaagaccagcaacagcctgaccgaggacagcaagatggccaacgccaagcagctgagcagcgacgccgaggcccagaagctgggcaagcccagcgcccacgccagccagagcttctgcgagagcagcagcgagacccccttccacttcaccctgcccaaggagggcgacatcatcccccccctgaccggcgccaccccccccctgatcggccacctgaagctggagcccaagagacacagcacccccatcggcatcagcaactaccccgagagcaccatcgccaccagcgacgtgatgagcgagagcatggtggagacccacgaccccatcctgggcagcggcaagggcgacagcggcgccgcccccgacgtggacgacaagctgtgcctgagaatgaagctggtgagccccgagaccgaggccagcgaggagagcctgcagttcaacctggagaagcccgccaccggcgagagaaagaacggcagcaccgccgtggccgagagcgtggccagcccccagaagaccatgagcgtgctgagctgcatctgcgaggccagacaggagaacgaggccagaagcgaggacccccccaccacccccatcagaggcaacctgctgcacttccccagcagccagggcgaggaggagaaggagaagctggagggcgaccacaccatcagacagagccagcagcccatgaagcccatcagccccgtgaaggaccccgtgagccccgccagccagaagatggtgatccagggccccagcagcccccagggcgaggccatggtgaccgacgtgctggaggaccagaaggagggcagaagcaccaacaaggagaaccccagcaaggccctgatcgagagacccagccagaacaacatcggcatccagaccatggagtgcagcctgagagtgcccgagaccgtgagcgccgccacccagaccatcaagaacgtgtgcgagcagggcaccagcaccgtggaccagaacttcggcaagcaggacgccaccgtgcagaccgagagaggcagcggcgagaagcccgtgagcgcccccggcgacgacaccgagagcctgcacagccagggcgaggaggagttcgacatgccccagcccccccacggccacgtgctgcacagacacatgagaaccatcagagaggtgagaaccctggtgaccagagtgatcaccgacgtgtactacgtggacggcaccgaggtggagagaaaggtgaccgaggagaccgaggagcccatcgtggagtgccaggagtgcgagaccgaggtgagccccagccagaccggcggcagcagcggcgacctgggcgacatcagcagcttcagcagcaaggccagcagcctgcacagaaccagcagcggcaccagcctgagcgccatgcacagcagcggcagcagcggcaagggcgccggccccctgagaggcaagaccagcggcaccgagcccgccgacttcgccctgcccagcagcagaggcggccccggcaagctgagccccagaaagggcgtgagccagaccggcacccccgtgtgcgaggaggacggcgacgccggcctgggcatcagacagggcggcaaggcccccgtgacccccagaggcagaggcagaagaggcagaccccccagcagaaccaccggcaccagagagaccgccgtgcccggccccctgggcatcgaggacatcagccccaacctgagccccgacgacaagagcttcagcagagtggtgcccagagtgcccgacagcaccagaagaaccgacgtgggcgccggcgccctgagaagaagcgacagccccgagatccccttccaggccgccgccggccccagcgacggcctggacgccagcagccccggcaacagcttcgtgggcctgagagtggtggccaagtggagcagcaacggctacttctacagcggcaagatcaccagagacgtgggcgccggcaagtacaagctgctgttcgacgacggctacgagtgcgacgtgctgggcaaggacatcctgctgtgcgaccccatccccctggacaccgaggtgaccgccctgagcgaggacgagtacttcagcgccggcgtggtgaagggccacagaaaggagagcggcgagctgtactacagcatcgagaaggagggccagagaaagtggtacaagagaatggccgtgatcctgagcctggagcagggcaacagactgagagagcagtacggcctgggcccctacgaggccgtgacccccctgaccaaggccgccgacatcagcctggacaacctggtggagggcaagagaaagagaagaagcaacgtgagcagccccgccacccccaccgccagcagcagcagcagcaccacccccaccagaaagatcaccgagagccccagagccagcatgggcgtgctgagcggcaagagaaagctgatcaccagcgaggaggagagaagccccgccaagagaggcagaaagagcgccaccgtgaagcccggcgccgtgggcgccggcgagttcgtgagcccctgcgagagcggcgacaacaccggcgagcccagcgccctggaggagcagagaggccccctgcccctgaacaagaccctgttcctgggctacgccttcctgctgaccatggccaccaccagcgacaagctggccagcagaagcaagctgcccgacggccccaccggcagcagcgaggaggaggaggagttcctggagatcccccccttcaacaagcagtacaccgagagccagctgagagccggcgccggctacatcctggaggacttcaacgaggcccagtgcaacaccgcctaccagtgcctgctgatcgccgaccagcactgcagaaccagaaagtacttcctgtgcctggccagcggcatcccctgcgtgagccacgtgtgggtgcacgacagctgccacgccaaccagctgcagaactacagaaactacctgctgcccgccggctacagcctggaggagcagagaatcctggactggcagcccagagagaaccccttccagaacctgaaggtgctgctggtgagcgaccagcagcagaacttcctggagctgtggagcgagatcctgatgaccggcggcgccgccagcgtgaagcagcaccacagcagcgcccacaacaaggacatcgccctgggcgtgttcgacgtggtggtgaccgaccccagctgccccgccagcgtgctgaagtgcgccgaggccctgcagctgcccgtggtgagccaggagtgggtgatccagtgcctgatcgtgggcgagagaatcggcttcaagcagcaccccaagtacaagcacgactacgtgagccactag

SEQ ID NO: 13383 - DNA, 5928 bp, synthetic construct
  misc_feature 1..5928: note = Description of Artificial Sequence: Synthetic coding sequence
  source 1..5928: mol_type = other DNA
atgcccggcgagcagatggaccccaccggcagccagctggacagcgacttcagccagcaggacaccccctgcctgatcatcgaggacagccagcccgagagccaggtgctggaggacgacagcggcagccacttcagcatgctgagcagacacctgcccaacctgcagacccacaaggagaaccccgtgctggacgtggtgagcaaccccgagcagaccgccggcgaggagagaggcgacggcaacagcggcttcaacgagcacctgaaggagaacaaggtggccgaccccgtggacagcagcaacctggacacctgcggcagcatcagccaggtgatcgagcagctgccccagcccaacagaaccagcagcgtgctgggcatgagcgtggagagcgcccccgccgtggaggaggagaagggcgaggagctggagcagaaggagaaggagaaggaggaggacaccagcggcaacaccacccacagcctgggcgccgaggacaccgccagcagccagctgggcttcggcgtgctggagctgagccagagccaggacgtggaggagaacaccgtgccctacgaggtggacaaggagcagctgcagagcgtgaccaccaacagcggctacaccagactgagcgacgtggacgccaacaccgccatcaagcacgaggagcagagcaacgaggacatccccatcgccgagcagagcagcaaggacatccccgtgaccgcccagcccagcaaggacgtgcacgtggtgaaggagcagaaccccccccccgccagaagcgaggacatgcccttcagccccaaggccagcgtggccgccatggaggccaaggagcagctgagcgcccaggagctgatggagagcggcctgcagatccagaagagccccgagcccgaggtgctgagcacccaggaggacctgttcgaccagagcaacaagaccgtgagcagcgacggctgcagcacccccagcagagaggagggcggctgcagcctggccagcacccccgccaccaccctgcacctgctgcagctgagcggccagagaagcctggtgcaggacagcctgagcaccaacagcagcgacctggtggcccccagccccgacgccttcagaagcacccccttcatcgtgcccagcagccccaccgagcaggagggcagacaggacaagcccatggacaccagcgtgctgagcgaggagggcggcgagcccttccagaagaagctgcagagcggcgagcccgtggagctggagaacccccccctgctgcccgagagcaccgtgagcccccaggccagcacccccatcagccagagcacccccgtgttcccccccggcagcctgcccatccccagccagccccagttcagccacgacatcttcatccccagccccagcctggaggagcagagcaacgacggcaagaaggacggcgacatgcacagcagcagcctgaccgtggagtgcagcaagaccagcgagatcgagcccaagaacagccccgaggacctgggcctgagcctgaccggcgacagctgcaagctgatgctgagcaccagcgagtacagccagagccccaagatggagagcctgagcagccacagaatcgacgaggacggcgagaacacccagatcgaggacaccgagcccatgagccccgtgctgaacagcaagttcgtgcccgccgagaacgacagcatcctgatgaaccccgcccaggacggcgaggtgcagctgagccagaacgacgacaagaccaagggcgacgacaccgacaccagagacgacatcagcatcctggccaccggctgcaagggcagagaggagaccgtggccgaggacgtgtgcatcgacctgacctgcgacagcggcagccaggccgtgcccagccccgccaccagaagcgaggccctgagcagcgtgctggaccaggaggaggccatggagatcaaggagcaccaccccgaggagggcagcagcggcagcgaggtggaggagatccccgagaccccctgcgagagccagggcgaggagctgaaggaggagaacatggagagcgtgcccctgcacctgagcctgaccgagacccagagccagggcctgtgcctgcagaaggagatgcccaagaaggagtgcagcgaggccatggaggtggagaccagcgtgatcagcatcgacagcccccagaagctggccatcctggaccaggagctggagcacaaggagcaggaggcctgggaggaggccaccagcgaggacagcagcgtggtgatcgtggacgtgaaggagcccagccccagagtggacgtgagctgcgagcccctggagggcgtggagaagtgcagcgacagccagagctgggaggacatcgcccccgagatcgagccctgcgccgagaacagactggacaccaaggaggagaagagcgtggagtacgagggcgacctgaagagcggcaccgccgagaccgagcccgtggagcaggacagcagccagcccagcctgcccctggtgagagccgacgaccccctgagactggaccaggagctgcagcagccccagacccaggagaagaccagcaacagcctgaccgaggacagcaagatggccaacgccaagcagctgagcagcgacgccgaggcccagaagctgggcaagcccagcgcccacgccagccagagcttctgcgagagcagcagcgagacccccttccacttcaccctgcccaaggagggcgacatcatcccccccctgaccggcgccaccccccccctgatcggccacctgaagctggagcccaagagacacagcacccccatcggcatcagcaactaccccgagagcaccatcgccaccagcgacgtgatgagcgagagcatggtggagacccacgaccccatcctgggcagcggcaagggcgacagcggcgccgcccccgacgtggacgacaagctgtgcctgagaatgaagctggtgagccccgagaccgaggccagcgaggagagcctgcagttcaacctggagaagcccgccaccggcgagagaaagaacggcagcaccgccgtggccgagagcgtggccagcccccagaagaccatgagcgtgctgagctgcatctgcgaggccagacaggagaacgaggccagaagcgaggacccccccaccacccccatcagaggcaacctgctgcacttccccagcagccagggcgaggaggagaaggagaagctggagggcgaccacaccatcagacagagccagcagcccatgaagcccatcagccccgtgaaggaccccgtgagccccgccagccagaagatggtgatccagggccccagcagcccccagggcgaggccatggtgaccgacgtgctggaggaccagaaggagggcagaagcaccaacaaggagaaccccagcaaggccctgatcgagagacccagccagaacaacatcggcatccagaccatggagtgcagcctgagagtgcccgagaccgtgagcgccgccacccagaccatcaagaacgtgtgcgagcagggcaccagcaccgtggaccagaacttcggcaagcaggacgccaccgtgcagaccgagagaggcagcggcgagaagcccgtgagcgcccccggcgacgacaccgagagcctgcacagccagggcgaggaggagttcgacatgccccagcccccccacggccacgtgctgcacagacacatgagaaccatcagagaggtgagaaccctggtgaccagagtgatcaccgacgtgtactacgtggacggcaccgaggtggagagaaaggtgaccgaggagaccgaggagcccatcgtggagtgccaggagtgcgagaccgaggtgagccccagccagaccggcggcagcagcggcgacctgggcgacatcagcagcttcagcagcaaggccagcagcctgcacagaaccagcagcggcaccagcctgagcgccatgcacagcagcggcagcagcggcaagggcgccggccccctgagaggcaagaccagcggcaccgagcccgccgacttcgccctgcccagcagcagaggcggccccggcaagctgagccccagaaagggcgtgagccagaccggcacccccgtgtgcgaggaggacggcgacgccggcctgggcatcagacagggcggcaaggcccccgtgacccccagaggcagaggcagaagaggcagaccccccagcagaaccaccggcaccagagagaccgccgtgcccggccccctgggcatcgaggacatcagccccaacctgagccccgacgacaagagcttcagcagagtggtgcccagagtgcccgacagcaccagaagaaccgacgtgggcgccggcgccctgagaagaagcgacagccccgagatccccttccaggccgccgccggccccagcgacggcctggacgccagcagccccggcaacagcttcgtgggcctgagagtggtggccaagtggagcagcaacggctacttctacagcggcaagatcaccagagacgtgggcgccggcaagtacaagctgctgttcgacgacggctacgagtgcgacgtgctgggcaaggacatcctgctgtgcgaccccatccccctggacaccgaggtgaccgccctgagcgaggacgagtacttcagcgccggcgtggtgaagggccacagaaaggagagcggcgagctgtactacagcatcgagaaggagggccagagaaagtggtacaagagaatggccgtgatcctgagcctggagcagggcaacagactgagagagcagtacggcctgggcccctacgaggccgtgacccccctgaccaaggccgccgacatcagcctggacaacctggtggagggcaagagaaagagaagaagcaacgtgagcagccccgccacccccaccgccagcagcagcagcagcaccacccccaccagaaagatcaccgagagccccagagccagcatgggcgtgctgagcggcaagagaaagctgatcaccagcgaggaggagagaagccccgccaagagaggcagaaagagcgccaccgtgaagcccgtgggcgccggcgagttcgtgagcccctgcgagagcggcgacaacaccggcgagcccagcgccctggaggagcagagaggccccctgcccctgaacaagaccctgttcctgggctacgccttcctgctgaccatggccaccaccagcgacaagctggccagcagaagcaagctgcccgacggccccaccggcagcagcgaggaggaggaggagttcctggagatcccccccttcaacaagcagtacaccgagagccagctgagagccggcgccggctacatcctggaggacttcaacgaggcccagtgcaacaccgcctaccagtgcctgctgatcgccgaccagcactgcagaaccagaaagtacttcctgtgcctggccagcggcatcccctgcgtgagccacgtgtgggtgcacgacagctgccacgccaaccagctgcagaactacagaaactacctgctgcccgccggctacagcctggaggagcagagaatcctggactggcagcccagagagaaccccttccagaacctgaaggtgctgctggtgagcgaccagcagcagaacttcctggagctgtggagcgagatcctgatgaccggcggcgccgccagcgtgaagcagcaccacagcagcgcccacaacaaggacatcgccctgggcgtgttcgacgtggtggtgaccgaccccagctgccccgccagcgtgctgaagtgcgccgaggccctgcagctgcccgtggtgagccaggagtgggtgatccagtgcctgatcgtgggcgagagaatcggcttcaagcagcaccccaagtacaagcacgactacgtgagccactag

SEQ ID NO: 13384 - DNA, 1623 bp, synthetic construct
  misc_feature 1..1623: note = Description of Artificial Sequence: Synthetic coding sequence
  source 1..1623: mol_type = other DNA
atggcccagagcaccgccaccagccccgacggcggcaccaccttcgagcacctgtggagcagcctggagcccgacagcacctacttcgacctgccccagagcagcagaggcaacaacgaggtggtgggcggcaccgacagcagcatggacgtgttccacctggagggcatgaccaccagcgtgatggcccagttcaacctgctgagcagcaccatggaccagatgagcagcagagccgccagcgccagcccctacacccccgagcacgccgccagcgtgcccacccacagcccctacgcccagcccagcagcaccttcgacaccatgagccccgcccccgtgatccccagcaacaccgactaccccggcccccaccacttcgaggtgaccttccagcagagcagcaccgccaagagcgccacctggacctacagccccctgctgaagaagctgtactgccagatcgccaagacctgccccatccagatcaaggtgagcaccccccccccccccggcaccgccatcagagccatgcccgtgtacaagaaggccgagcacgtgaccgacgtggtgaagagatgccccaaccacgagctgggcagagacttcaacgagggccagagcgcccccgccagccacctgatcagagtggagggcaacaacctgagccagtacgtggacgaccccgtgaccggcagacagagcgtggtggtgccctacgagcccccccaggtgggcaccgagttcaccaccatcctgtacaacttcatgtgcaacagcagctgcgtgggcggcatgaacagaagacccatcctgatcatcatcaccctggagatgagagacggccaggtgctgggcagaagaagcttcgagggcagaatctgcgcctgccccggcagagacagaaaggccgacgaggaccactacagagagcagcaggccctgaacgagagcagcgccaagaacggcgccgccagcaagagagccttcaagcagagcccccccgccgtgcccgccctgggcgccggcgtgaagaagagaagacacggcgacgaggacacctactacctgcaggtgagaggcagagagaacttcgagatcctgatgaagctgaaggagagcctggagctgatggagctggtgccccagcccctggtggacagctacagacagcagcagcagctgctgcagagacccttcctgaccggcctgggctgccccaactgcatcgagtacttcaccagccagggcctgcagagcatctaccacctgcagaacctgaccatcgaggacctgggcgccctgaagatccccgagcagtacagaatgaccatctggagaggcctgcaggacctgaagcagggccacgactacagcaccgcccagcagctgctgagaagcagcaacgccgccaccatcagcatcggcggcagcggcgagctgcagagacagagagtgatggaggccgtgcacttcagagtgagacacaccatcaccatccccaacagaggcggccccggcggcggccccgacgagtgggccgacttcggcttcgacctgcccgactgcaaggccagaaagcagcccatcaaggaggagttcaccgaggccgagatccactag

SEQ ID NO: 13385 - DNA, 1500 bp, synthetic construct
  misc_feature 1..1500: note = Description of Artificial Sequence: Synthetic coding sequence
  source 1..1500: mol_type = other DNA
atggcccagagcaccgccaccagccccgacggcggcaccaccttcgagcacctgtggagcagcctggagcccgacagcacctacttcgacctgccccagagcagcagaggcaacaacgaggtggtgggcggcaccgacagcagcatggacgtgttccacctggagggcatgaccaccagcgtgatggcccagttcaacctgctgagcagcaccatggaccagatgagcagcagagccgccagcgccagcccctacacccccgagcacgccgccagcgtgcccacccacagcccctacgcccagcccagcagcaccttcgacaccatgagccccgcccccgtgatccccagcaacaccgactaccccggcccccaccacttcgaggtgaccttccagcagagcagcaccgccaagagcgccacctggacctacagccccctgctgaagaagctgtactgccagatcgccaagacctgccccatccagatcaaggtgagcaccccccccccccccggcaccgccatcagagccatgcccgtgtacaagaaggccgagcacgtgaccgacgtggtgaagagatgccccaaccacgagctgggcagagacttcaacgagggccagagcgcccccgccagccacctgatcagagtggagggcaacaacctgagccagtacgtggacgaccccgtgaccggcagacagagcgtggtggtgccctacgagcccccccaggtgggcaccgagttcaccaccatcctgtacaacttcatgtgcaacagcagctgcgtgggcggcatgaacagaagacccatcctgatcatcatcaccctggagatgagagacggccaggtgctgggcagaagaagcttcgagggcagaatctgcgcctgccccggcagagacagaaaggccgacgaggaccactacagagagcagcaggccctgaacgagagcagcgccaagaacggcgccgccagcaagagagccttcaagcagagcccccccgccgtgcccgccctgggcgccggcgtgaagaagagaagacacggcgacgaggacacctactacctgcaggtgagaggcagagagaacttcgagatcctgatgaagctgaaggagagcctggagctgatggagctggtgccccagcccctggtggacagctacagacagcagcagcagctgctgcagagacccagccacctgcagccccccagctacggccccgtgctgagccccatgaacaaggtgcacggcggcatgaacaagctgcccagcgtgaaccagctggtgggccagccccccccccacagcagcgccgccacccccaacctgggccccgtgggccccggcatgctgaacaaccacggccacgccgtgcccgccaacggcgagatgagcagcagccacagcgcccagagcatggtgagcggcagccactgcacccccccccccccctaccacgccgaccccagcctggtgagaacctggggcccctag

SEQ ID NO: 13386 - DNA, 1668 bp, synthetic construct
  misc_feature 1..1668: note = Description of Artificial Sequence: Synthetic coding sequence
  source 1..1668: mol_type = other DNA
atggcccagagcaccgccaccagccccgacggcggcaccaccttcgagcacctgtggagcagcctggagcccgacagcacctacttcgacctgccccagagcagcagaggcaacaacgaggtggtgggcggcaccgacagcagcatggacgtgttccacctggagggcatgaccaccagcgtgatggcccagttcaacctgctgagcagcaccatggaccagatgagcagcagagccgccagcgccagcccctacacccccgagcacgccgccagcgtgcccacccacagcccctacgcccagcccagcagcaccttcgacaccatgagccccgcccccgtgatccccagcaacaccgactaccccggcccccaccacttcgaggtgaccttccagcagagcagcaccgccaagagcgccacctggacctacagccccctgctgaagaagctgtactgccagatcgccaagacctgccccatccagatcaaggtgagcaccccccccccccccggcaccgccatcagagccatgcccgtgtacaagaaggccgagcacgtgaccgacgtggtgaagagatgccccaaccacgagctgggcagagacttcaacgagggccagagcgcccccgccagccacctgatcagagtggagggcaacaacctgagccagtacgtggacgaccccgtgaccggcagacagagcgtggtggtgccctacgagcccccccaggtgggcaccgagttcaccaccatcctgtacaacttcatgtgcaacagcagctgcgtgggcggcatgaacagaagacccatcctgatcatcatcaccctggagatgagagacggccaggtgctgggcagaagaagcttcgagggcagaatctgcgcctgccccggcagagacagaaaggccgacgaggaccactacagagagcagcaggccctgaacgagagcagcgccaagaacggcgccgccagcaagagagccttcaagcagagcccccccgccgtgcccgccctgggcgccggcgtgaagaagagaagacacggcgacgaggacacctactacctgcaggtgagaggcagagagaacttcgagatcctgatgaagctgaaggagagcctggagctgatggagctggtgccccagcccctggtggacagctacagacagcagcagcagctgctgcagagaccccccagagacgcccagcagccctggcccagaagcgccagccagagaagagacgagcagcagccccagagacccgtgcacggcctgggcgtgcccctgcacagcgccacccccctgcccagaagaccccagcccagacaggacctgggcgccctgaagatccccgagcagtacagaatgaccatctggagaggcctgcaggacctgaagcagggccacgactacagcaccgcccagcagctgctgagaagcagcaacgccgccaccatcagcatcggcggcagcggcgagctgcagagacagagagtgatggaggccgtgcacttcagagtgagacacaccatcaccatccccaacagaggcggccccggcggcggccccgacgagtgggccgacttcggcttcgacctgcccgactgcaaggccagaaagcagcccatcaaggaggagttcaccgaggccgagatccactag

SEQ ID NO: 13387 - DNA, 1281 bp, synthetic construct
  misc_feature 1..1281: note = Description of Artificial Sequence: Synthetic coding sequence
  source 1..1281: mol_type = other DNA
atgctgtacgtgggcgaccccgccagacacctggccaccgcccagttcaacctgctgagcagcaccatggaccagatgagcagcagagccgccagcgccagcccctacacccccgagcacgccgccagcgtgcccacccacagcccctacgcccagcccagcagcaccttcgacaccatgagccccgcccccgtgatccccagcaacaccgactaccccggcccccaccacttcgaggtgaccttccagcagagcagcaccgccaagagcgccacctggacctacagccccctgctgaagaagctgtactgccagatcgccaagacctgccccatccagatcaaggtgagcaccccccccccccccggcaccgccatcagagccatgcccgtgtacaagaaggccgagcacgtgaccgacgtggtgaagagatgccccaaccacgagctgggcagagacttcaacgagggccagagcgcccccgccagccacctgatcagagtggagggcaacaacctgagccagtacgtggacgaccccgtgaccggcagacagagcgtggtggtgccctacgagcccccccaggtgggcaccgagttcaccaccatcctgtacaacttcatgtgcaacagcagctgcgtgggcggcatgaacagaagacccatcctgatcatcatcaccctggagatgagagacggccaggtgctgggcagaagaagcttcgagggcagaatctgcgcctgccccggcagagacagaaaggccgacgaggaccactacagagagcagcaggccctgaacgagagcagcgccaagaacggcgccgccagcaagagagccttcaagcagagcccccccgccgtgcccgccctgggcgccggcgtgaagaagagaagacacggcgacgaggacacctactacctgcaggtgagaggcagagagaacttcgagatcctgatgaagctgaaggagagcctggagctgatggagctggtgccccagcccctggtggacagctacagacagcagcagcagctgctgcagagaccccccagagacgcccagcagccctggcccagaagcgccagccagagaagagacgagcagcagccccagagacccgtgcacggcctgggcgtgcccctgcacagcgccacccccctgcccagaagaccccagcccagacagttcttcaacagaatcggcgtgagcaagctgcacagagtgttccacctgcccagagtgaccgagcacctgccccccgccgagcccgaccactag

SEQ ID NO: 13388 - DNA, 1353 bp, synthetic construct
  misc_feature 1..1353: note = Description of Artificial Sequence: Synthetic coding sequence
  source 1..1353: mol_type = other DNA
atgctgtacgtgggcgaccccgccagacacctggccaccgcccagttcaacctgctgagcagcaccatggaccagatgagcagcagagccgccagcgccagcccctacacccccgagcacgccgccagcgtgcccacccacagcccctacgcccagcccagcagcaccttcgacaccatgagccccgcccccgtgatccccagcaacaccgactaccccggcccccaccacttcgaggtgaccttccagcagagcagcaccgccaagagcgccacctggacctacagccccctgctgaagaagctgtactgccagatcgccaagacctgccccatccagatcaaggtgagcaccccccccccccccggcaccgccatcagagccatgcccgtgtacaagaaggccgagcacgtgaccgacgtggtgaagagatgccccaaccacgagctgggcagagacttcaacgagggccagagcgcccccgccagccacctgatcagagtggagggcaacaacctgagccagtacgtggacgaccccgtgaccggcagacagagcgtggtggtgccctacgagcccccccaggtgggcaccgagttcaccaccatcctgtacaacttcatgtgcaacagcagctgcgtgggcggcatgaacagaagacccatcctgatcatcatcaccctggagatgagagacggccaggtgctgggcagaagaagcttcgagggcagaatctgcgcctgccccggcagagacagaaaggccgacgaggaccactacagagagcagcaggccctgaacgagagcagcgccaagaacggcgccgccagcaagagagccttcaagcagagcccccccgccgtgcccgccctgggcgccggcgtgaagaagagaagacacggcgacgaggacacctactacctgcaggtgagaggcagagagaacttcgagatcctgatgaagctgaaggagagcctggagctgatggagctggtgccccagcccctggtggacagctacagacagcagcagcagctgctgcagagacccagccacctgcagccccccagctacggccccgtgctgagccccatgaacaaggtgcacggcggcatgaacaagctgcccagcgtgaaccagctggtgggccagccccccccccacagcagcgccgccacccccaacctgggccccgtgggccccggcatgctgaacaaccacggccacgccgtgcccgccaacggcgagatgagcagcagccacagcgcccagagcatggtgagcggcagccactgcacccccccccccccctaccacgccgaccccagcctggtgagaacctggggcccctag

SEQ ID NO: 13389 - DNA, 1764 bp, synthetic construct
  misc_feature 1..1764: note = Description of Artificial Sequence: Synthetic coding sequence
  source 1..1764: mol_type = other DNA
atgctgtacgtgggcgaccccgccagacacctggccaccgcccagttcaacctgctgagcagcaccatggaccagatgagcagcagagccgccagcgccagcccctacacccccgagcacgccgccagcgtgcccacccacagcccctacgcccagcccagcagcaccttcgacaccatgagccccgcccccgtgatccccagcaacaccgactaccccggcccccaccacttcgaggtgaccttccagcagagcagcaccgccaagagcgccacctggacctacagccccctgctgaagaagctgtactgccagatcgccaagacctgccccatccagatcaaggtgagcaccccccccccccccggcaccgccatcagagccatgcccgtgtacaagaaggccgagcacgtgaccgacgtggtgaagagatgccccaaccacgagctgggcagagacttcaacgagggccagagcgcccccgccagccacctgatcagagtggagggcaacaacctgagccagtacgtggacgaccccgtgaccggcagacagagcgtggtggtgccctacgagcccccccaggtgggcaccgagttcaccaccatcctgtacaacttcatgtgcaacagcagctgcgtgggcggcatgaacagaagacccatcctgatcatcatcaccctggagatgagagacggccaggtgctgggcagaagaagcttcgagggcagaatctgcgcctgccccggcagagacagaaaggccgacgaggaccactacagagagcagcaggccctgaacgagagcagcgccaagaacggcgccgccagcaagagagccttcaagcagagcccccccgccgtgcccgccctgggcgccggcgtgaagaagagaagacacggcgacgaggacacctactacctgcaggtgagaggcagagagaacttcgagatcctgatgaagctgaaggagagcctggagctgatggagctggtgccccagcccctggtggacagctacagacagcagcagcagctgctgcagagacccagccacctgcagccccccagctacggccccgtgctgagccccatgaacaaggtgcacggcggcatgaacaagctgcccagcgtgaaccagctggtgggccagccccccccccacagcagcgccgccacccccaacctgggccccgtgggccccggcatgctgaacaaccacggccacgccgtgcccgccaacggcgagatgagcagcagccacagcgcccagagcatggtgagcggcagccactgcacccccccccccccctaccacgccgaccccagcctggtgagcttcctgaccggcctgggctgccccaactgcatcgagtacttcaccagccagggcctgcagagcatctaccacctgcagaacctgaccatcgaggacctgggcgccctgaagatccccgagcagtacagaatgaccatctggagaggcctgcaggacctgaagcagggccacgactacagcaccgcccagcagctgctgagaagcagcaacgccgccaccatcagcatcggcggcagcggcgagctgcagagacagagagtgatggaggccgtgcacttcagagtgagacacaccatcaccatccccaacagaggcggccccggcggcggccccgacgagtgggccgacttcggcttcgacctgcccgactgcaaggccagaaagcagcccatcaaggaggagttcaccgaggccgagatccactag

SEQ ID NO: 13390 - DNA, 1698 bp, synthetic construct
  misc_feature 1..1698: note = Description of Artificial Sequence: Synthetic coding sequence
  source 1..1698: mol_type = other DNA
atggaccagatgagcagcagagccgccagcgccagcccctacacccccgagcacgccgccagcgtgcccacccacagcccctacgcccagcccagcagcaccttcgacaccatgagccccgcccccgtgatccccagcaacaccgactaccccggcccccaccacttcgaggtgaccttccagcagagcagcaccgccaagagcgccacctggacctacagccccctgctgaagaagctgtactgccagatcgccaagacctgccccatccagatcaaggtgagcaccccccccccccccggcaccgccatcagagccatgcccgtgtacaagaaggccgagcacgtgaccgacgtggtgaagagatgccccaaccacgagctgggcagagacttcaacgagggccagagcgcccccgccagccacctgatcagagtggagggcaacaacctgagccagtacgtggacgaccccgtgaccggcagacagagcgtggtggtgccctacgagcccccccaggtgggcaccgagttcaccaccatcctgtacaacttcatgtgcaacagcagctgcgtgggcggcatgaacagaagacccatcctgatcatcatcaccctggagatgagagacggccaggtgctgggcagaagaagcttcgagggcagaatctgcgcctgccccggcagagacagaaaggccgacgaggaccactacagagagcagcaggccctgaacgagagcagcgccaagaacggcgccgccagcaagagagccttcaagcagagcccccccgccgtgcccgccctgggcgccggcgtgaagaagagaagacacggcgacgaggacacctactacctgcaggtgagaggcagagagaacttcgagatcctgatgaagctgaaggagagcctggagctgatggagctggtgccccagcccctggtggacagctacagacagcagcagcagctgctgcagagacccagccacctgcagccccccagctacggccccgtgctgagccccatgaacaaggtgcacggcggcatgaacaagctgcccagcgtgaaccagctggtgggccagccccccccccacagcagcgccgccacccccaacctgggccccgtgggccccggcatgctgaacaaccacggccacgccgtgcccgccaacggcgagatgagcagcagccacagcgcccagagcatggtgagcggcagccactgcacccccccccccccctaccacgccgaccccagcctggtgagcttcctgaccggcctgggctgccccaactgcatcgagtacttcaccagccagggcctgcagagcatctaccacctgcagaacctgaccatcgaggacctgggcgccctgaagatccccgagcagtacagaatgaccatctggagaggcctgcaggacctgaagcagggccacgactacagcaccgcccagcagctgctgagaagcagcaacgccgccaccatcagcatcggcggcagcggcgagctgcagagacagagagtgatggaggccgtgcacttcagagtgagacacaccatcaccatccccaacagaggcggccccggcggcggccccgacgagtgggccgacttcggcttcgacctgcccgactgcaaggccagaaagcagcccatcaaggaggagttcaccgaggccgagatccactag

SEQ ID NO: 13391 - DNA, 1911 bp, synthetic construct
  misc_feature 1..1911: note = Description of Artificial Sequence: Synthetic coding sequence
  source 1..1911: mol_type = other DNA
atggcccagagcaccgccaccagccccgacggcggcaccaccttcgagcacctgtggagcagcctggagcccgacagcacctacttcgacctgccccagagcagcagaggcaacaacgaggtggtgggcggcaccgacagcagcatggacgtgttccacctggagggcatgaccaccagcgtgatggcccagttcaacctgctgagcagcaccatggaccagatgagcagcagagccgccagcgccagcccctacacccccgagcacgccgccagcgtgcccacccacagcccctacgcccagcccagcagcaccttcgacaccatgagccccgcccccgtgatccccagcaacaccgactaccccggcccccaccacttcgaggtgaccttccagcagagcagcaccgccaagagcgccacctggacctacagccccctgctgaagaagctgtactgccagatcgccaagacctgccccatccagatcaaggtgagcaccccccccccccccggcaccgccatcagagccatgcccgtgtacaagaaggccgagcacgtgaccgacgtggtgaagagatgccccaaccacgagctgggcagagacttcaacgagggccagagcgcccccgccagccacctgatcagagtggagggcaacaacctgagccagtacgtggacgaccccgtgaccggcagacagagcgtggtggtgccctacgagcccccccaggtgggcaccgagttcaccaccatcctgtacaacttcatgtgcaacagcagctgcgtgggcggcatgaacagaagacccatcctgatcatcatcaccctggagatgagagacggccaggtgctgggcagaagaagcttcgagggcagaatctgcgcctgccccggcagagacagaaaggccgacgaggaccactacagagagcagcaggccctgaacgagagcagcgccaagaacggcgccgccagcaagagagccttcaagcagagcccccccgccgtgcccgccctgggcgccggcgtgaagaagagaagacacggcgacgaggacacctactacctgcaggtgagaggcagagagaacttcgagatcctgatgaagctgaaggagagcctggagctgatggagctggtgccccagcccctggtggacagctacagacagcagcagcagctgctgcagagacccagccacctgcagccccccagctacggccccgtgctgagccccatgaacaaggtgcacggcggcatgaacaagctgcccagcgtgaaccagctggtgggccagccccccccccacagcagcgccgccacccccaacctgggccccgtgggccccggcatgctgaacaaccacggccacgccgtgcccgccaacggcgagatgagcagcagccacagcgcccagagcatggtgagcggcagccactgcacccccccccccccctaccacgccgaccccagcctggtgagcttcctgaccggcctgggctgccccaactgcatcgagtacttcaccagccagggcctgcagagcatctaccacctgcagaacctgaccatcgaggacctgggcgccctgaagatccccgagcagtacagaatgaccatctggagaggcctgcaggacctgaagcagggccacgactacagcaccgcccagcagctgctgagaagcagcaacgccgccaccatcagcatcggcggcagcggcgagctgcagagacagagagtgatggaggccgtgcacttcagagtgagacacaccatcaccatccccaacagaggcggccccggcggcggccccgacgagtgggccgacttcggcttcgacctgcccgactgcaaggccagaaagcagcccatcaaggaggagttcaccgaggccgagatccactag

SEQ ID NO: 13392 - DNA, 1053 bp, synthetic construct
  misc_feature 1..1053: note = Description of Artificial Sequence: Synthetic coding sequence
  source 1..1053: mol_type = other DNA
atgggcgccggcgccagcgccgaggagaagcacagcagagagctggagaagaagctgaaggaggacgccgagaaggacgccagaaccgtgaagctgctgctgctgggcgccggcgagagcggcaagagcaccatcgtgaagcagatgaagatcatccaccaggacggctacagcctggaggagtgcctggagttcatcgccatcatctacggcaacaccctgcagagcatcctggccatcgtgagagccatgaccaccctgaacatccagtacggcgacagcgccagacaggacgacgccagaaagctgatgcacatggccgacaccatcgaggagggcaccatgcccaaggagatgagcgacatcatccagagactgtggaaggacagcggcatccaggcctgcttcgagagagccagcgagtaccagctgaacgacagcgccggctactacctgagcgacctggagagactggtgacccccggctacgtgcccaccgagcaggacgtgctgagaagcagagtgaagaccaccggcatcatcgagacccagttcagcttcaaggacctgaacttcagaatgttcgacgtgggcggccagagaagcgagagaaagaagtggatccactgcttcgagggcgtgacctgcatcatcttcatcgccgccctgagcgcctacgacatggtgctggtggaggacgacgaggtgaacagaatgcacgagagcctgcacctgttcaacagcatctgcaaccacagatacttcgccaccaccagcatcgtgctgttcctgaacaagaaggacgtgttcttcgagaagatcaagaaggcccacctgagcatctgcttccccgactacgacggccccaacacctacgaggacgccggcaactacatcaaggtgcagttcctggagctgaacatgagaagagacgtgaaggagatctacagccacatgacctgcgccaccgacacccagaacgtgaagttcgtgttcgacgccgtgaccgacatcatcatcaaggagaacctgaaggactgcggcctgttctag

SEQ ID NO: 13393 - DNA, 609 bp, synthetic construct
  misc_feature 1..609: note = Description of Artificial Sequence: Synthetic coding sequence
  source 1..609: mol_type = other DNA
atgatgcaggacgtgagcagcagccccgtgagccccgccgacgacagcctgagcaacagcgaggaggagcccgacagacagcagccccccagcggcaagagaggcggcagaaagagaagaagcagcagaagaagcgccggcggcggcgccggccccggcggcgccgccggcggcggcgtgggcggcggcgacgagcccggcagccccgcccagggcaagagaggcaagaagagcgccggctgcggcggcggcggcggcgccggcggcggcggcggcagcagcagcggcggcggcagcccccagagctacgaggagctgcagacccagagagtgatggccaacgtgagagagagacagagaacccagagcctgaacgaggccttcgccgccctgagaaagatcatccccaccctgcccagcgacaagctgagcaagatccagaccctgaagctggccgccagatacatcgacttcctgtaccaggtgctgcagagcgacgagctggacagcaagatggccagctgcagctacgtggcccacgagagactgagctacgccttcagcgtgtggagaatggagggcgcctggagcatgagcgccagccactag

SEQ ID NO: 13394 - DNA, 741 bp, synthetic construct
  misc_feature 1..741: note = Description of Artificial Sequence: Synthetic coding sequence
  source 1..741: mol_type = other DNA
atgggcgacagagagcagctgctgcagagagccagactggccgagcaggccgagagatacgacgacatggccagcgccatgaaggccgtgaccgagctgaacgagcccctgagcaacgaggacagaaacctgctgagcgtggcctacaagaacgtggtgggcgccagaagaagcagctggagagtgatcagcagcatcgagcagaagaccatggccgacggcaacgagaagaagctggagaaggtgaaggcctacagagagaagatcgagaaggagctggagaccgtgtgcaacgacgtgctgagcctgctggacaagttcctgatcaagaactgcaacgacttccagtacgagagcaaggtgttctacctgaagatgaagggcgactactacagatacctggccgaggtggccagcggcgagaagaagaacagcgtggtggaggccagcgaggccgcctacaaggaggccttcgagatcagcaaggagcagatgcagcccacccaccccatcagactgggcctggccctgaacttcagcgtgttctactacgagatccagaacgcccccgagcaggcctgcctgctggccaagcaggccttcgacgacgccatcgccgagctggacaccctgaacgaggacagctacaaggacagcaccctgatcatgcagctgctgagagacaacctgaccctgtggaccagcgaccagcaggacgaggaggccggcgagggcaactag

SEQ ID NO: 13395 - DNA, 1626 bp, synthetic construct
  misc_feature 1..1626: note = Description of Artificial Sequence: Synthetic coding sequence
  source 1..1626: mol_type = other DNA
atggtgtggagagtgccccccttcctgctgcccatcctgttcctgggcacccactaccagctggacgtgcagctgtaccactgcaccctgctgggccccgccagcccccccgcccacgtgctgctgccccccagcggcccccccgcccccagacacctgcacgcccaggccctgagcgacagcgagatccagctgacctggaagcaccccgaggccctgcccggccccatcagcaagtacgtggtggaggtgcaggtggccggcggcgccggcgaccccctgtggatcgacgtggacagacccgaggagaccagcaccatcatcagaggcctgaacgccagcaccagatacctgttcagaatgagagccagcatccagggcctgggcgactggagcaacaccgtggaggagagcaccctgggcaacggcctgcaggccgagggccccgtgcaggagagcagagccgccgaggagggcctggaccagcagctgatcctggccgtggtgggcagcgtgagcgccacctgcctgaccatcctggccgccctgctgaccctggtgtgcatcagaagaagctgcctgcacagaagaagaaccttcacctaccagagcggcagcggcgaggagaccatcctgcagttcagcagcggcaccctgaccctgaccagaagacccaagctgcagcccgagcccctgagctaccccgtgctggagtgggaggacatcaccttcgaggacctgatcggcgagggcaacttcggccaggtgatcagagccatgatcaagaaggacggcctgaagatgaacgccgccatcaagatgctgaaggagtacgccagcgagaacgaccacagagacttcgccggcgagctggaggtgctgtgcaagctgggccaccaccccaacatcatcaacctgctgggcgcctgcaagaacagaggctacctgtacatcgccatcgagtacgccccctacggcaacctgctggacttcctgagaaagagcagagtgctggagaccgaccccgccttcgccagagagcacggcaccgccagcaccctgagcagcagacagctgctgagattcgccagcgacgccgccaacggcatgcagtacctgagcgagaagcagttcatccacagagacctggccgccagaaacgtgctggtgggcgagaacctggccagcaagatcgccgacttcggcctgagcagaggcgaggaggtgtacgtgaagaagaccatgggcagactgcccgtgagatggatggccatcgagagcctgaactacagcgtgtacaccaccaagagcgacgtgtggagcttcggcgtgctgctgtgggagatcgtgagcctgggcggcaccccctactgcggcatgacctgcgccgagctgtacgagaagctgccccagggctacagaatggagcagcccagaaactgcgacgacgaggtgtacgagctgatgagacagtgctggagagacagaccctacgagagaccccccttcgcccagatcgccctgcagctgggcagaatgctggaggccagaaaggcctacgtgaacatgagcctgttcgagaacttcacctacgccggcatcgacgccaccgccgaggaggcctag

SEQ ID NO: 13396 - DNA, 3417 bp, synthetic construct
  misc_feature 1..3417: note = Description of Artificial Sequence: Synthetic coding sequence
  source 1..3417: mol_type = other DNA
atggtgtggagagtgccccccttcctgctgcccatcctgttcctggccagccacgtgggcgccgccgtggacctgaccctgctggccaacctgagactgaccgacccccagagattcttcctgacctgcgtgagcggcgaggccggcgccggcagaggcagcgacgcctggggcccccccctgctgctggagaaggacgacagaatcgtgagaaccccccccggcccccccctgagactggccagaaacggcagccaccaggtgaccctgagaggcttcagcaagcccagcgacctggtgggcgtgttcagctgcgtgggcggcgccggcgccagaagaaccagagtgatctacgtgcacaacagccccggcgcccacctgctgcccgacaaggtgacccacaccgtgaacaagggcgacaccgccgtgctgagcgccagagtgcacaaggagaagcagaccgacgtgatctggaagagcaacggcagctacttctacaccctggactggcacgaggcccaggacggcagattcctgctgcagctgcccaacgtgcagccccccagcagcggcatctacagcgccacctacctggaggccagccccctgggcagcgccttcttcagactgatcgtgagaggctgcggcgccggcagatggggccccggctgcaccaaggagtgccccggctgcctgcacggcggcgtgtgccacgaccacgacggcgagtgcgtgtgcccccccggcttcaccggcaccagatgcgagcaggcctgcagagagggcagattcggccagagctgccaggagcagtgccccggcatcagcggctgcagaggcctgaccttctgcctgcccgacccctacggctgcagctgcggcagcggctggagaggcagccagtgccaggaggcctgcgcccccggccacttcggcgccgactgcagactgcagtgccagtgccagaacggcggcacctgcgacagattcagcggctgcgtgtgccccagcggctggcacggcgtgcactgcgagaagagcgacagaatcccccagatcctgaacatggccagcgagctggagttcaacctggagaccatgcccagaatcaactgcgccgccgccggcaaccccttccccgtgagaggcagcatcgagctgagaaagcccgacggcaccgtgctgctgagcaccaaggccatcgtggagcccgagaagaccaccgccgagttcgaggtgcccagactggtgctggccgacagcggcttctgggagtgcagagtgagcaccagcggcggccaggacagcagaagattcaaggtgaacgtgaaggtgccccccgtgcccctggccgcccccagactgctgaccaagcagagcagacagctggtggtgagccccctggtgagcttcagcggcgacggccccatcagcaccgtgagactgcactacagaccccaggacagcaccatggactggagcaccatcgtggtggaccccagcgagaacgtgaccctgatgaacctgagacccaagaccggctacagcgtgagagtgcagctgagcagacccggcgagggcggcgagggcgcctggggcccccccaccctgatgaccaccgactgccccgagcccctgctgcagccctggctggagggctggcacgtggagggcaccgacagactgagagtgagctggagcctgcccctggtgcccggccccctggtgggcgacggcttcctgctgagactgtgggacggcaccagaggccaggagagaagagagaacgtgagcagcccccaggccagaaccgccctgctgaccggcctgacccccggcacccactaccagctggacgtgcagctgtaccactgcaccctgctgggccccgccagcccccccgcccacgtgctgctgccccccagcggcccccccgcccccagacacctgcacgcccaggccctgagcgacagcgagatccagctgacctggaagcaccccgaggccctgcccggccccatcagcaagtacgtggtggaggtgcaggtggccggcggcgccggcgaccccctgtggatcgacgtggacagacccgaggagaccagcaccatcatcagaggcctgaacgccagcaccagatacctgttcagaatgagagccagcatccagggcctgggcgactggagcaacaccgtggaggagagcaccctgggcaacggcctgcaggccgagggccccgtgcaggagagcagagccgccgaggagggcctggaccagcagctgatcctggccgtggtgggcagcgtgagcgccacctgcctgaccatcctggccgccctgctgaccctggtgtgcatcagaagaagctgcctgcacagaagaagaaccttcacctaccagagcggcagcggcgaggagaccatcctgcagttcagcagcggcaccctgaccctgaccagaagacccaagctgcagcccgagcccctgagctaccccgtgctggagtgggaggacatcaccttcgaggacctgatcggcgagggcaacttcggccaggtgatcagagccatgatcaagaaggacggcctgaagatgaacgccgccatcaagatgctgaaggagtacgccagcgagaacgaccacagagacttcgccggcgagctggaggtgctgtgcaagctgggccaccaccccaacatcatcaacctgctgggcgcctgcaagaacagaggctacctgtacatcgccatcgagtacgccccctacggcaacctgctggacttcctgagaaagagcagagtgctggagaccgaccccgccttcgccagagagcacggcaccgccagcaccctgagcagcagacagctgctgagattcgccagcgacgccgccaacggcatgcagtacctgagcgagaagcagttcatccacagagacctggccgccagaaacgtgctggtgggcgagaacctggccagcaagatcgccgacttcggcctgagcagaggcgaggaggtgtacgtgaagaagaccatgggcagactgcccgtgagatggatggccatcgagagcctgaactacagcgtgtacaccaccaagagcgacgtgtggagcttcggcgtgctgctgtgggagatcgtgagcctgggcggcaccccctactgcggcatgacctgcgccgagctgtacgagaagctgccccagggctacagaatggagcagcccagaaactgcgacgacgaggtgtacgagctgatgagacagtgctggagagacagaccctacgagagaccccccttcgcccagatcgccctgcagctgggcagaatgctggaggccagaaaggcctacgtgaacatgagcctgttcgagaacttcacctacgccggcatcgacgccaccgccgaggaggcctag

SEQ ID NO: 13397 - DNA, 2352 bp, synthetic construct
  misc_feature 1..2352: note = Description of Artificial Sequence: Synthetic coding sequence
  source 1..2352: mol_type = other DNA
atggccagcgagctggagttcaacctggagaccatgcccagaatcaactgcgccgccgccggcaaccccttccccgtgagaggcagcatcgagctgagaaagcccgacggcaccgtgctgctgagcaccaaggccatcgtggagcccgagaagaccaccgccgagttcgaggtgcccagactggtgctggccgacagcggcttctgggagtgcagagtgagcaccagcggcggccaggacagcagaagattcaaggtgaacgtgaaggtgccccccgtgcccctggccgcccccagactgctgaccaagcagagcagacagctggtggtgagccccctggtgagcttcagcggcgacggccccatcagcaccgtgagactgcactacagaccccaggacagcaccatggactggagcaccatcgtggtggaccccagcgagaacgtgaccctgatgaacctgagacccaagaccggctacagcgtgagagtgcagctgagcagacccggcgagggcggcgagggcgcctggggcccccccaccctgatgaccaccgactgccccgagcccctgctgcagccctggctggagggctggcacgtggagggcaccgacagactgagagtgagctggagcctgcccctggtgcccggccccctggtgggcgacggcttcctgctgagactgtgggacggcaccagaggccaggagagaagagagaacgtgagcagcccccaggccagaaccgccctgctgaccggcctgacccccggcacccactaccagctggacgtgcagctgtaccactgcaccctgctgggccccgccagcccccccgcccacgtgctgctgccccccagcggcccccccgcccccagacacctgcacgcccaggccctgagcgacagcgagatccagctgacctggaagcaccccgaggccctgcccggccccatcagcaagtacgtggtggaggtgcaggtggccggcggcgccggcgaccccctgtggatcgacgtggacagacccgaggagaccagcaccatcatcagaggcctgaacgccagcaccagatacctgttcagaatgagagccagcatccagggcctgggcgactggagcaacaccgtggaggagagcaccctgggcaacggcctgcaggccgagggccccgtgcaggagagcagagccgccgaggagggcctggaccagcagctgatcctggccgtggtgggcagcgtgagcgccacctgcctgaccatcctggccgccctgctgaccctggtgtgcatcagaagaagctgcctgcacagaagaagaaccttcacctaccagagcggcagcggcgaggagaccatcctgcagttcagcagcggcaccctgaccctgaccagaagacccaagctgcagcccgagcccctgagctaccccgtgctggagtgggaggacatcaccttcgaggacctgatcggcgagggcaacttcggccaggtgatcagagccatgatcaagaaggacggcctgaagatgaacgccgccatcaagatgctgaaggagtacgccagcgagaacgaccacagagacttcgccggcgagctggaggtgctgtgcaagctgggccaccaccccaacatcatcaacctgctgggcgcctgcaagaacagaggctacctgtacatcgccatcgagtacgccccctacggcaacctgctggacttcctgagaaagagcagagtgctggagaccgaccccgccttcgccagagagcacggcaccgccagcaccctgagcagcagacagctgctgagattcgccagcgacgccgccaacggcatgcagtacctgagcgagaagcagttcatccacagagacctggccgccagaaacgtgctggtgggcgagaacctggccagcaagatcgccgacttcggcctgagcagaggcgaggaggtgtacgtgaagaagaccatgggcagactgcccgtgagatggatggccatcgagagcctgaactacagcgtgtacaccaccaagagcgacgtgtggagcttcggcgtgctgctgtgggagatcgtgagcctgggcggcaccccctactgcggcatgacctgcgccgagctgtacgagaagctgccccagggctacagaatggagcagcccagaaactgcgacgacgaggtgtacgagctgatgagacagtgctggagagacagaccctacgagagaccccccttcgcccagatcgccctgcagctgggcagaatgctggaggccagaaaggcctacgtgaacatgagcctgttcgagaacttcacctacgccggcatcgacgccaccgccgaggaggcctag

SEQ ID NO: 13398 - DNA, 954 bp, synthetic construct
  misc_feature 1..954: note = Description of Artificial Sequence: Synthetic coding sequence
  source 1..954: mol_type = other DNA
atggtgtggagagtgccccccttcctgctgcccatcctgttcctggccagccacgtgggcgccgccgtggacctgaccctgctggccaacctgagactgaccgacccccagagattcttcctgacctgcgtgagcggcgaggccggcgccggcagaggcagcgacgcctggggcccccccctgctgctggagaaggacgacagaatcgtgagaaccccccccggcccccccctgagactggccagaaacggcagccaccaggtgaccctgagaggcttcagcaagcccagcgacctggtgggcgtgttcagctgcgtgggcggcgccggcgccagaagaaccagagtgatctacgtgcacaacagccccggcgcccacctgctgcccgacaaggtgacccacaccgtgaacaagggcgacaccgccgtgctgagcgccagagtgcacaaggagaagcagaccgacgtgatctggaagagcaacggcagctacttctacaccctggactggcacgaggcccaggacggcagattcctgctgcagctgcccaacgtgcagccccccagcagcggcatctacagcgccacctacctggaggccagccccctgggcagcgccttcttcagactgatcgtgagaggctgcggcgccggcagatggggccccggctgcaccaaggagtgccccggctgcctgcacggcggcgtgtgccacgaccacgacggcgagtgcgtgtgcccccccggcttcaccggcaccagatgcgagcaggcctgcagagagggcagattcggccagagctgccaggagcagtgccccggcatcagcggctgcagaggcctgaccttctgcctgcccgacccctacggctgcagctgcggcagcggctggagaggcagccagtgccaggaggtgcaccagggccactgcggcgccagagaggaccacagctag

SEQ ID NO: 13399 - DNA, 1266 bp, synthetic construct
  misc_feature 1..1266: note = Description of Artificial Sequence: Synthetic coding sequence
  source 1..1266: mol_type = other DNA
atgagagccagcatccagggcctgggcgactggagcaacaccgtggaggagagcaccctgggcaacggcctgcaggccgagggccccgtgcaggagagcagagccgccgaggagggcctggaccagcagctgatcctggccgtggtgggcagcgtgagcgccacctgcctgaccatcctggccgccctgctgaccctggtgtgcatcagaagaagctgcctgcacagaagaagaaccttcacctaccagagcggcagcggcgaggagaccatcctgcagttcagcagcggcaccctgaccctgaccagaagacccaagctgcagcccgagcccctgagctaccccgtgctggagtgggaggacatcaccttcgaggacctgatcggcgagggcaacttcggccaggtgatcagagccatgatcaagaaggacggcctgaagatgaacgccgccatcaagatgctgaaggagtacgccagcgagaacgaccacagagacttcgccggcgagctggaggtgctgtgcaagctgggccaccaccccaacatcatcaacctgctgggcgcctgcaagaacagaggctacctgtacatcgccatcgagtacgccccctacggcaacctgctggacttcctgagaaagagcagagtgctggagaccgaccccgccttcgccagagagcacggcaccgccagcaccctgagcagcagacagctgctgagattcgccagcgacgccgccaacggcatgcagtacctgagcgagaagcagttcatccacagagacctggccgccagaaacgtgctggtgggcgagaacctggccagcaagatcgccgacttcggcctgagcagaggcgaggaggtgtacgtgaagaagaccatgggcagactgcccgtgagatggatggccatcgagagcctgaactacagcgtgtacaccaccaagagcgacgtgtggagcttcggcgtgctgctgtgggagatcgtgagcctgggcggcaccccctactgcggcatgacctgcgccgagctgtacgagaagctgccccagggctacagaatggagcagcccagaaactgcgacgacgaggtgtacgagctgatgagacagtgctggagagacagaccctacgagagaccccccttcgcccagatcgccctgcagctgggcagaatgctggaggccagaaaggcctacgtgaacatgagcctgttcgagaacttcacctacgccggcatcgacgccaccgccgaggaggcctag

SEQ ID NO: 13400 - DNA, 1140 bp, synthetic construct
  misc_feature 1..1140: note = Description of Artificial Sequence: Synthetic coding sequence
  source 1..1140: mol_type = other DNA
atggtgtggagagtgccccccttcctgctgcccatcctgttcctggccagccacgtgggcgccgccgtggacctgaccctgctggccaacctgagactgaccgacccccagagattcttcctgacctgcgtgagcggcgaggccggcgccggcagaggcagcgacgcctggggcccccccctgctgctggagaaggacgacagaatcgtgagaaccccccccggcccccccctgagactggccagaaacggcagccaccaggtgaccctgagaggcttcagcaagcccagcgacctggtgggcgtgttcagctgcgtgggcggcgccggcgccagaagaaccagagtgatctacgtgcacaacagccccggcgcccacctgctgcccgacaaggtgacccacaccgtgaacaagggcgacaccgccgtgctgagcgccagagtgcacaaggagaagcagaccgacgtgatctggaagagcaacggcagctacttctacaccctggactggcacgaggcccaggacggcagattcctgctgcagctgcccaacgtgcagccccccagcagcggcatctacagcgccacctacctggaggccagccccctgggcagcgccttcttcagactgatcgtgagaggctgcggcgccggcagatggggccccggctgcaccaaggagtgccccggctgcctgcacggcggcgtgtgccacgaccacgacggcgagtgcgtgtgcccccccggcttcaccggcaccagatgcgagcaggcctgcagagagggcagattcggccagagctgccaggagcagtgccccggcatcagcggctgcagaggcctgaccttctgcctgcccgacccctacggctgcagctgcggcagcggctggagaggcagccagtgccaggaggcctgcgcccccggccacttcggcgccgactgcagactgcagtgccagtgccagaacggcggcacctgcgacagattcagcggctgcgtgtgccccagcggctggcacggcgtgcactgcgagaagagcggctggagagactgggtggacaccagcaccgagaagcagaacaccgacgagggcagattcggcggccacgtgagcgcccccgtgggcgcccccggctag

SEQ ID NO: 13401 - DNA, 819 bp, synthetic construct
  misc_feature 1..819: note = Description of Artificial Sequence: Synthetic coding sequence
  source 1..819: mol_type = other DNA
atggccctgctggtgagagtgctgagaaaccagaccagcatcagccagtgggtgcccgtgtgcagcagactgatccccgtgagccccacccagggccagggcgacagagccctgagcagaaccagccagtggccccagatgagccagagcagagcctgcggcggcagcgagcagatccccggcatcgacatccagctgaacagaaagtaccacaccaccagaaagctgagcaccaccaaggacagcccccagcccgtggaggagaaggtgggcgccttcaccaagatcatcgaggccatgggcttcaccggccccctgaagtacagatgccagatgcccgacaccttcaacagctggttcctgatcaccctgctgcacgtgtggatgtgcctggtgagaatgaagcaggagggcagaagcggcaagtacatgtgcagaatcatcgtgcacttcatgtgggaggacgtgcagcagagaggcagagtgatgggcgtgaacccctacatcctgaagaagaacatgatcctgatgaccaaccacttctacgccgccatcctgggctacgacgagggcatcctgagcgacgaccacggcctggccgccgccctgtggagaaccttcttcaacagaaagtgcgaggaccccagacacctggagctgctggtggagtacgtgagaaagcagatccagtacctggacagcatgaacggcgaggacctgctgctgaccggcgaggtgagctggagacccctggtggagaagaacccccagagcatcctgaagccccacagccccacctacaacgacgagggcctgtag

SEQ ID NO: 13402 - DNA, 564 bp, synthetic construct
  misc_feature 1..564: note = Description of Artificial Sequence: Synthetic coding sequence
  source 1..564: mol_type = other DNA
atgcagcccatcgacacctgcgtgagctaccccagaaccggcggccagggcagcgtgagccacttccccggctgccagatgcccgacaccttcaacagctggttcctgatcaccctgctgcacgtgtggatgtgcctggtgagaatgaagcaggagggcagaagcggcaagtacatgtgcagaatcatcgtgcacttcatgtgggaggacgtgcagcagagaggcagagtgatgggcgtgaacccctacatcctgaagaagaacatgatcctgatgaccaaccacttctacgccgccatcctgggctacgacgagggcatcctgagcgacgaccacggcctggccgccgccctgtggagaaccttcttcaacagaaagtgcgaggaccccagacacctggagctgctggtggagtacgtgagaaagcagatccagtacctggacagcatgaacggcgaggacctgctgctgaccggcgaggtgagctggagacccctggtggagaagaacccccagagcatcctgaagccccacagccccacctacaacgacgagggcctgtag

SEQ ID NO: 13403 - DNA, 696 bp, synthetic construct
  misc_feature 1..696: note = Description of Artificial Sequence: Synthetic coding sequence
  source 1..696: mol_type = other DNA
atggccctgctggtgagagtgctgagaaaccagaccagcatcagccagtgggtgcccgtgtgcagcagactgatccccgtgagccccacccagggccagggcgacagagccctgagcagaaccagccagaagatcaagatcgccgccctgagaatgtacaccagctgcgtggagaagaccgacttcgaggagttcttcctgagatgccagatgcccgacaccttcaacagctggttcctgatcaccctgctgcacgtgtggatgtgcctggtgagaatgaagcaggagggcagaagcggcaagtacatgtgcagaatcatcgtgcacttcatgtgggaggacgtgcagcagagaggcagagtgatgggcgtgaacccctacatcctgaagaagaacatgatcctgatgaccaaccacttctacgccgccatcctgggctacgacgagggcatcctgagcgacgaccacggcctggccgccgccctgtggagaaccttcttcaacagaaagtgcgaggaccccagacacctggagctgctggtggagtacgtgagaaagcagatccagtacctggacagcatgaacggcgaggacctgctgctgaccggcgaggtgagctggagacccctggtggagaagaacccccagagcatcctgaagccccacagccccacctacaacgacgagggcctgtag

SEQ ID NO: 13404 - DNA, 822 bp, synthetic construct
  misc_feature 1..822: note = Description of Artificial Sequence: Synthetic coding sequence
  source 1..822: mol_type = other DNA
atggccctgctggtgagagtgctgagaaaccagaccagcatcagccagtgggtgcccgtgtgcagcagactgatccccgtgagccccacccagggccagggcgacagagccctgagcagaaccagccagtggccccagatgagccagagcagagcctgcggcggcagcgagcagatccccggcatcgacatccagctgaacagaaagtaccacaccaccagaaagctgagcaccaccaaggacagcccccagcccgtggaggagaaggtgggcgccttcaccaagatcatcgaggccatgggcttcaccggccccctgaagtacagcaagtggaagatcaagatcgccgccctgagaatgtacaccagctgcgtggagaagaccgacttcgaggagttcttcctgagatgccagatgcccgacaccttcaacagctggttcctgatcaccctgctgcacgtgtggatgtgcctggtgagaatgaagcaggagggcagaagcggcaagtacatgtgcagaatcatcgtgcacttcatgtgggaggacgtgcagcagagaggcagagtgatgggcggcatcctgagcgacgaccacggcctggccgccgccctgtggagaaccttcttcaacagaaagtgcgaggaccccagacacctggagctgctggtggagtacgtgagaaagcagatccagtacctggacagcatgaacggcgaggacctgctgctgaccggcgaggtgagctggagacccctggtggagaagaacccccagagcatcctgaagccccacagccccacctacaacgacgagggcctgtag

SEQ ID NO: 13405 - DNA, 900 bp, synthetic construct
  misc_feature 1..900: note = Description of Artificial Sequence: Synthetic coding sequence
  source 1..900: mol_type = other DNA
atggccctgctggtgagagtgctgagaaaccagaccagcatcagccagtgggtgcccgtgtgcagcagactgatccccgtgagccccacccagggccagggcgacagagccctgagcagaaccagccagtggccccagatgagccagagcagagcctgcggcggcagcgagcagatccccggcatcgacatccagctgaacagaaagtaccacaccaccagaaagctgagcaccaccaaggacagcccccagcccgtggaggagaaggtgggcgccttcaccaagatcatcgaggccatgggcttcaccggccccctgaagtacagcaagtggaagatcaagatcgccgccctgagaatgtacaccagctgcgtggagaagaccgacttcgaggagttcttcctgagatgccagatgcccgacaccttcaacagctggttcctgatcaccctgctgcacgtgtggatgtgcctggtgagaatgaagcaggagggcagaagcggcaagtacatgtgcagaatcatcgtgcacttcatgtgggaggacgtgcagcagagaggcagagtgatgggcgtgaacccctacatcctgaagaagaacatgatcctgatgaccaaccacttctacgccgccatcctgggctacgacgagggcatcctgagcgacgaccacggcctggccgccgccctgtggagaaccttcttcaacagaaagtgcgaggaccccagacacctggagctgctggtggagtacgtgagaaagcagatccagtacctggacagcatgaacggcgaggacctgctgctgaccggcgaggtgagctggagacccctggtggagaagaacccccagagcatcctgaagccccacagccccacctacaacgacgagggcctgtag

SEQ ID NO: 13406 - DNA, 603 bp, synthetic construct
  misc_feature 1..603: note = Description of Artificial Sequence: Synthetic coding sequence
  source 1..603: mol_type = other DNA
atgggcttcaccggccccctgaagtacagcaagtggaagatcaagatcgccgccctgagaatgtacaccagctgcgtggagaagaccgacttcgaggagttcttcctgagatgccagatgcccgacaccttcaacagctggttcctgatcaccctgctgcacgtgtggatgtgcctggtgagaatgaagcaggagggcagaagcggcaagtacatgtgcagaatcatcgtgcacttcatgtgggaggacgtgcagcagagaggcagagtgatgggcgtgaacccctacatcctgaagaagaacatgatcctgatgaccaaccacttctacgccgccatcctgggctacgacgagggcatcctgagcgacgaccacggcctggccgccgccctgtggagaaccttcttcaacagaaagtgcgaggaccccagacacctggagctgctggtggagtacgtgagaaagcagatccagtacctggacagcatgaacggcgaggacctgctgctgaccggcgaggtgagctggagacccctggtggagaagaacccccagagcatcctgaagccccacagccccacctacaacgacgagggcctgtag

SEQ ID NO: 13407 - DNA, 489 bp, synthetic construct
  misc_feature 1..489: note = Description of Artificial Sequence: Synthetic coding sequence
  source 1..489: mol_type = other DNA
atggccctgctggtgagagtgctgagaaaccagaccagcatcagccagtgggtgcccgtgtgcagcagactgatccccgtgagccccacccagggccagggcgacagagccctgagcagaaccagccagtggccccagatgagccagagcagagcctgcggcggcagcgagcagatccccggcatcgacatccagctgaacagaaagtaccacaccacccccatcctgggctacgacgagggcatcctgagcgacgaccacggcctggccgccgccctgtggagaaccttcttcaacagaaagtgcgaggaccccagacacctggagctgctggtggagtacgtgagaaagcagatccagtacctggacagcatgaacggcgaggacctgctgctgaccggcgaggtgagctggagacccctggtggagaagaacccccagagcatcctgaagccccacagccccacctacaacgacgagggcctgtag

SEQ ID NO: 13408 - DNA, 435 bp, synthetic construct
  misc_feature 1..435: note = Description of Artificial Sequence: Synthetic coding sequence
  source 1..435: mol_type = other DNA
atgtgcctggtgagaatgaagcaggagggcagaagcggcaagtacatgtgcagaatcatcgtgcacttcatgtgggaggacgtgcagcagagaggcagagtgatgggcgtgaacccctacatcctgaagaagaacatgatcctgatgaccaaccacttctacgccgccatcctgggctacgacgagggcatcctgagcgacgaccacggcctggccgccgccctgtggagaaccttcttcaacagaaagtgcgaggaccccagacacctggagctgctggtggagtacgtgagaaagcagatccagtacctggacagcatgaacggcgaggacctgctgctgaccggcgaggtgagctggagacccctggtggagaagaacccccagagcatcctgaagccccacagccccacctacaacgacgagggcctgtag

SEQ ID NO: 13409 - DNA, 447 bp, synthetic construct
  misc_feature 1..447: note = Description of Artificial Sequence: Synthetic coding sequence
  source 1..447: mol_type = other DNA
atggccctgctggtgagagtgctgagaaaccagaccagcatcagccagtgggtgcccgtgtgcagcagactgatccccgtgagccccacccagggccagggcgacagagccctgagcagaaccagccagtggccccagatgagccagagcagagcctgcggcggcagcgagcagatccccggcatcgacatccagctgaacagaaagtaccacaccaccagaaagctgagcaccaccaaggacagcccccagcccgtggaggagaaggtgggcgccttcaccaagatcatcgaggccatgggcttcaccggccccctgaagtacagcaagtgggacgtgagcagccccaacgaggccggcagacccgagtgggaggtgcacgtgagctaccacagcagcttctacgtgggcggctgcagcgccgccagacagagccacggcggctag

SEQ ID NO: 13410 - DNA, 825 bp, synthetic construct
  misc_feature 1..825: note = Description of Artificial Sequence: Synthetic coding sequence
  source 1..825: mol_type = other DNA
atgctgagcgtggccagcagaagcggccccttcgcccccgtgctgagcgccaccagcagaggcgtggccggcgccctgagacccctggtgcaggccaccgtgcccgccacccccgagcagcccgtgctggacctgaagagacccttcctgagcagagagagcctgagcggccaggccgtgagaagacccctggtggccagcgtgggcctgaacgtgcccgccagcgtgtgctacagccacaccgacatcaaggtgcccgacttcagcgagtacagaagactggaggtgctggacagcaccaagagcagcagagagagcagcgaggccagaaagggcttcagctacctggtgaccggcgtgaccaccgtgggcgtggcctacgccgccaagaacgccgtgacccagttcgtgagcagcatgagcgccagcgccgacgtgctggccctggccaagatcgagatcaagctgagcgacatccccgagggcaagaacatggccttcaagtggagaggcaagcccctgttcgtgagacacagaacccagaaggagatcgagcaggaggccgccgtggagctgagccagctgagagacccccagcacgacctggacagagtgaagaagcccgagtgggtgatcctgatcggcgtgtgcacccacctgggctgcgtgcccatcgccaacgccggcgacttcggcggctactactgcccctgccacggcagccactacgacgccagcggcagaatcagactgggccccgcccccctgaacctggaggtgcccacctacgagttcaccagcgacgacatggtgatcgtgggctag

SEQ ID NO: 13411 - DNA, 1221 bp, synthetic construct
  misc_feature 1..1221: note = Description of Artificial Sequence: Synthetic coding sequence
  source 1..1221: mol_type = other DNA
atggccgccggcgccggcgccggcagcgcccccagatggctgagagccctgagcgagcccctgagcgccgcccagctgagaagactggaggagcacagatacagcgccgccggcgtgagcctgctggagccccccctgcagctgtactggacctggctgctgcagtggatccccctgtggatggcccccaacagcatcaccctgctgggcctggccgtgaacgtggtgaccaccctggtgctgatcagctactgccccaccgccaccgaggaggccccctactggacctacctgctgtgcgccctgggcctgttcatctaccagagcctggacgccatcgacggcaagcaggccagaagaaccaacagctgcagccccctgggcgagctgttcgaccacggctgcgacagcctgagcaccgtgttcatggccgtgggcgccagcatcgccgccagactgggcacctaccccgactggttcttcttctgcagcttcatcggcatgttcgtgttctactgcgcccactggcagacctacgtgagcggcatgctgagattcggcaaggtggacgtgaccgagatccagatcgccctggtgatcgtgttcgtgctgagcgccttcggcggcgccaccatgtgggactacaccatccccatcctggagatcaagctgaagatcctgcccgtgctgggcttcctgggcggcgtgatcttcagctgcagcaactacttccacgtgatcctgcacggcggcgtgggcaagaacggcagcaccatcgccggcaccagcgtgctgagccccggcctgcacatcggcctgatcatcatcctggccatcatgatctacaagaagagcgccaccgacgtgttcgagaagcacccctgcctgtacatcctgatgttcggctgcgtgttcgccaaggtgagccagaagctggtggtggcccacatgaccaagagcgagctgtacctgcaggacaccgtgttcctgggccccggcctgctgttcctggaccagtacttcaacaacttcatcgacgagtacgtggtgctgtggatggccatggtgatcagcagcttcgacatggtgatctacttcagcgccctgtgcctgcagatcagcagacacctgcacctgaacatcttcaagaccgcctgccaccaggcccccgagcaggtgcaggtgctgagcagcaagagccaccagaacaacatggactag

SEQ ID NO: 13412 - DNA, 2508 bp, synthetic construct
  misc_feature 1..2508: note = Description of Artificial Sequence: Synthetic coding sequence
  source 1..2508: mol_type = other DNA
atggccgagctgagcgaggaggccctgctgagcgtgctgcccaccatcagagtgcccaaggccggcgacagagtgcacaaggacgagtgcgccttcagcttcgacacccccgagagcgagggcggcctgtacatctgcatgaacaccttcctgggcttcggcaagcagtacgtggagagacacttcaacaagaccggccagagagtgtacctgcacctgagaagaaccagaagacccaaggaggaggaccccgccaccggcaccggcgacccccccagaaagaagcccaccagactggccatcggcgtggagggcggcttcgacctgagcgaggagaagttcgagctggacgaggacgtgaagatcgtgatcctgcccgactacctggagatcgccagagacggcctgggcggcctgcccgacatcgtgagagacagagtgaccagcgccgtggaggccctgctgagcgccgacagcgccagcagaaagcaggaggtgcaggcctgggacggcgaggtgagacaggtgagcaagcacgccttcagcctgaagcagctggacaaccccgccagaatccccccctgcggctggaagtgcagcaagtgcgacatgagagagaacctgtggctgaacctgaccgacggcagcatcctgtgcggcagaagatacttcgacggcagcggcggcaacaaccacgccgtggagcactacagagagaccggctaccccctggccgtgaagctgggcaccatcacccccgacggcgccgacgtgtacagctacgacgaggacgacatggtgctggaccccagcctggccgagcacctgagccacttcggcatcgacatgctgaagatgcagaagaccgacaagaccatgaccgagctggagatcgacatgaaccagagaatcggcgagtgggagctgatccaggagagcggcgtgcccctgaagcccctgttcggccccggctacaccggcatcagaaacctgggcaacagctgctacctgaacagcgtggtgcaggtgctgttcagcatccccgacttccagagaaagtacgtggacaagctggagaagatcttccagaacgcccccaccgaccccacccaggacttcagcacccaggtggccaagctgggccacggcctgctgagcggcgagtacagcaagcccgtgcccgagagcggcgacggcgagagagtgcccgagcagaaggaggtgcaggacggcatcgcccccagaatgttcaaggccctgatcggcaagggccaccccgagttcagcaccaacagacagcaggacgcccaggagttcttcctgcacctgatcaacatggtggagagaaactgcagaagcagcgagaaccccaacgaggtgttcagattcctggtggaggagaagatcaagtgcctggccaccgagaaggtgaagtacacccagagagtggactacatcatgcagctgcccgtgcccatggacgccgccctgaacaaggaggagctgctggagtacgaggagaagaagagacaggccgaggaggagaagatggccctgcccgagctggtgagagcccaggtgcccttcagcagctgcctggaggcctacggcgcccccgagcaggtggacgacttctggagcaccgccctgcaggccaagagcgtggccgtgaagaccaccagattcgccagcttccccgactacctggtgatccagatcaagaagttcaccttcggcctggactgggtgcccaagaagctggacgtgagcatcgagatgcccgaggagctggacatcagccagctgagaggcaccggcctgcagcccggcgaggaggagctgcccgacatcgccccccccctggtgacccccgacgagcccaaggcccccatgctggacgagagcgtgatcatccagctggtggagatgggcttccccatggacgcctgcagaaaggccgtgtactacaccggcaacagcggcgccgaggccgccatgaactgggtgatgagccacatggacgaccccgacttcgccaaccccctgatcctgcccggcagcagcggccccggcagcaccagcgccgccgccgaccccccccccgaggactgcgtgaccaccatcgtgagcatgggcttcagcagagaccaggccctgaaggccctgagagccaccaacaacagcctggagagagccgtggactggatcttcagccacatcgacgacctggacgccgaggccgccatggacatcagcgagggcagaagcgccgccgacagcatcagcgagagcgtgcccgtgggccccaaggtgagagacggccccggcaagtaccagctgttcgccttcatcagccacatgggcaccagcaccatgtgcggccactacgtgtgccacatcaagaaggagggcagatgggtgatctacaacgaccagaaggtgtgcgccagcgagaagccccccaaggacctgggctacatctacttctaccagagagtggccagctag

SEQ ID NO: 13413 - DNA, 2385 bp, synthetic construct
  misc_feature 1..2385: note = Description of Artificial Sequence: Synthetic coding sequence
  source 1..2385: mol_type = other DNA
atggccgacgcctgggaggagatcagaagactggccgccgacttccagagagcccagttcgccgaggccacccagagactgagcgagagaaactgcatcgagatcgtgaacaagctgatcgcccagaagcagctggaggtggtgcacaccctggacggcaaggagtacatcacccccgcccagatcagcaaggagatgagagacgagctgcacgtgagaggcggcagagtgaacatcgtggacctgcagcaggtgatcaacgtggacctgatccacatcgagaacagaatcggcgacatcatcaagagcgagaagcacgtgcagctggtgctgggccagctgatcgacgagaactacctggacagactggccgaggaggtgaacgacaagctgcaggagagcggccaggtgaccatcagcgagctgtgcaagacctacgacctgcccggcaacttcctgacccaggccctgacccagagactgggcagaatcatcagcggccacatcgacctggacaacagaggcgtgatcttcaccgaggccttcgtggccagacacaaggccagaatcagaggcctgttcagcgccatcaccagacccaccgccgtgaacagcctgatcagcaagtacggcttccaggagcagctgctgtacagcgtgctggaggagctggtgaacagcggcagactgagaggcaccgtggtgggcggcagacaggacaaggccgtgttcgtgcccgacatctacagcagaacccagagcacctgggtggacagcttcttcagacagaacggctacctggagttcgacgccctgagcagactgggcatccccgacgccgtgagctacatcaagaagagatacaagaccacccagctgctgttcctgaaggccgcctgcgtgggccagggcctggtggaccaggtggaggccagcgtggaggaggccatcagcagcggcacctgggtggacatcgcccccctgctgcccaccagcctgagcgtggaggacgccgccatcctgctgcagcaggtgatgagagccttcagcaagcaggccagcaccgtggtgttcagcgacaccgtggtggtgagcgagaagttcatcaacgactgcaccgagctgttcagagagctgatgcaccagaaggccgagaaggagatgaagaacaaccccgtgcacctgatcaccgaggaggacctgaagcagatcagcaccctggagagcgtgagcaccagcaagaaggacaagaaggacgagagaagaagaaaggccaccgagggcagcggcagcatgagaggcggcggcggcggcaacgccagagagtacaagatcaagaaggtgaagaagaagggcagaaaggacgacgacagcgacgacgagagccagagcagccacaccggcaagaagaagcccgagatcagcttcatgttccaggacgagatcgaggacttcctgagaaagcacatccaggacgcccccgaggagttcatcagcgagctggccgagtacctgatcaagcccctgaacaagacctacctggaggtggtgagaagcgtgttcatgagcagcaccaccagcgccagcggcaccggcagaaagagaaccatcaaggacctgcaggaggaggtgagcaacctgtacaacaacatcagactgttcgagaagggcatgaagttcttcgccgacgacacccaggccgccctgaccaagcacctgctgaagagcgtgtgcaccgacatcaccaacctgatcttcaacttcctggccagcgacctgatgatggccgtggacgaccccgccgccatcaccagcgagatcagaaagaagatcctgagcaagctgagcgaggagaccaaggtggccctgaccaagctgcacaacagcctgaacgagaagagcatcgaggacttcatcagctgcctggacagcgccgccgaggcctgcgacatcatggtgaagagaggcgacaagaagagagagagacagatcctgttccagcacagacaggccctggccgagcagctgaaggtgaccgaggaccccgccctgatcctgcacctgaccagcgtgctgctgttccagttcagcacccacagcatgctgcacgcccccggcagatgcgtgccccagatcatcgccttcctgaacagcaagatccccgaggaccagcacgccctgctggtgaagtaccagggcctggtggtgaagcagctggtgagccagagcaagaagaccggccagggcgactaccccctgaacaacgagctggacaaggagcaggaggacgtggccagcaccaccagaaaggagctgcaggagctgagcagcagcatcaaggacctggtgctgaagagcagaaagagcagcgtgaccgaggagtag

SEQ ID NO: 13414 - DNA, 942 bp, synthetic construct
  misc_feature 1..942: note = Description of Artificial Sequence: Synthetic coding sequence
  source 1..942: mol_type = other DNA
atgatcggccagaagaccctgtacagcttcttcagccccagccccgccagaaagagacacgcccccagccccgagcccgccgtgcagggcaccggcgtggccggcgtgcccgaggagagcggcgacgccgccgccatccccgccaagaaggcccccgccggccaggaggagcccggcaccccccccagcagccccctgagcgccgagcagctggacagaatccagagaaacaaggccgccgccctgctgagactggccgccagaaacgtgcccgtgggcttcggcgagagctggaagaagcacctgagcggcgagttcggcaagccctacttcatcaagctgatgggcttcgtggccgaggagagaaagcactacaccgtgtacccccccccccaccaggtgttcacctggacccagatgtgcgacatcaaggacgtgaaggtggtgatcctgggccaggacccctaccacggccccaaccaggcccacggcctgtgcttcagcgtgcagagacccgtgccccccccccccagcctggagaacatctacaaggagctgagcaccgacatcgaggacttcgtgcaccccggccacggcgacctgagcggctgggccaagcagggcgtgctgctgctgaacgccgtgctgaccgtgagagcccaccaggccaacagccacaaggagagaggctgggagcagttcaccgacgccgtggtgagctggctgaaccagaacagcaacggcctggtgttcctgctgtggggcagctacgcccagaagaagggcagcgccatcgacagaaagagacaccacgtgctgcagaccgcccaccccagccccctgagcgtgtacagaggcttcttcggctgcagacacttcagcaagaccaacgagctgctgcagaagagcggcaagaagcccatcgactggaaggagctgtag

SEQ ID NO: 13415 - DNA, 915 bp, synthetic construct
  misc_feature 1..915: note = Description of Artificial Sequence: Synthetic coding sequence
  source 1..915: mol_type = other DNA
atgggcgtgttctgcctgggcccctggggcctgggcagaaagctgagaacccccggcaagggccccctgcagctgctgagcagactgtgcggcgaccacctgcaggccatccccgccaagaaggcccccgccggccaggaggagcccggcaccccccccagcagccccctgagcgccgagcagctggacagaatccagagaaacaaggccgccgccctgctgagactggccgccagaaacgtgcccgtgggcttcggcgagagctggaagaagcacctgagcggcgagttcggcaagccctacttcatcaagctgatgggcttcgtggccgaggagagaaagcactacaccgtgtacccccccccccaccaggtgttcacctggacccagatgtgcgacatcaaggacgtgaaggtggtgatcctgggccaggacccctaccacggccccaaccaggcccacggcctgtgcttcagcgtgcagagacccgtgccccccccccccagcctggagaacatctacaaggagctgagcaccgacatcgaggacttcgtgcaccccggccacggcgacctgagcggctgggccaagcagggcgtgctgctgctgaacgccgtgctgaccgtgagagcccaccaggccaacagccacaaggagagaggctgggagcagttcaccgacgccgtggtgagctggctgaaccagaacagcaacggcctggtgttcctgctgtggggcagctacgcccagaagaagggcagcgccatcgacagaaagagacaccacgtgctgcagaccgcccaccccagccccctgagcgtgtacagaggcttcttcggctgcagacacttcagcaagaccaacgagctgctgcagaagagcggcaagaagcccatcgactggaaggagctgtag

SEQ ID NO: 13416 - DNA, 813 bp, synthetic construct
  misc_feature 1..813: note = Description of Artificial Sequence: Synthetic coding sequence
  source 1..813: mol_type = other DNA
atgggcgtgttctgcctgggcccctggggcctgggcagaaagctgagaacccccggcaagggccccctgagcgccgagcagctggacagaatccagagaaacaaggccgccgccctgctgagactggccgccagaaacgtgcccgtgggcttcggcgagagctggaagaagcacctgagcggcgagttcggcaagccctacttcatcaagctgatgggcttcgtggccgaggagagaaagcactacaccgtgtacccccccccccaccaggtgttcacctggacccagatgtgcgacatcaaggacgtgaaggtggtgatcctgggccaggacccctaccacggccccaaccaggcccacggcctgtgcttcagcgtgcagagacccgtgccccccccccccagcctggagaacatctacaaggagctgagcaccgacatcgaggacttcgtgcaccccggccacggcgacctgagcggctgggccaagcagggcgtgctgctgctgaacgccgtgctgaccgtgagagcccaccaggccaacagccacaaggagagaggctgggagcagttcaccgacgccgtggtgagctggctgaaccagaacagcaacggcctggtgttcctgctgtggggcagctacgcccagaagaagggcagcgccatcgacagaaagagacaccacgtgctgcagaccgcccaccccagccccctgagcgtgtacagaggcttcttcggctgcagacacttcagcaagaccaacgagctgctgcagaagagcggcaagaagcccatcgactggaaggagctgtag

SEQ ID NO: 13417 - DNA, 9288 bp, synthetic construct
  misc_feature 1..9288: note = Description of Artificial Sequence: Synthetic coding sequence
  source 1..9288: mol_type = other DNA
atggtgttcgagagcgtggtggtggacgtgctgaacagattcctgggcgactacgtggtggacctggacaccagccagctgagcctgggcatctggaagggcgccgtggccctgaagaacctgcagatcaaggagaacgccctgagccagctggacgtgcccttcaaggtgaaggtgggccacatcggcaacctgaagctgatcatcccctggaagaacctgtacacccagcccgtggaggccgtgctggaggagatctacctgctgatcgtgcccagcagcagaatcaagtacgaccccctgaaggaggagaagcagctgatggaggccaagcagcaggagctgaagagaatcgaggaggccaagcagaaggtggtggaccaggagcagcacctgcccgagaagcaggacaccttcgccgagaagctggtgacccagatcatcaagaacctgcaggtgaagatcagcagcatccacatcagatacgaggacgacatcaccaacagagacaagcccctgagcttcggcatcagcctgcagaacctgagcatgcagaccaccgaccagtactgggtgccctgcctgcacgacgagaccgagaagctggtgagaaagctgatcagactggacaacctgttcgcctactggaacgtgaagagccagatgttctacctgagcgactacgacaacagcctggacgacctgaagaacggcatcgtgaacgagaacatcgtgcccgagggctacgacttcgtgttcagacccatcagcgccaacgccaagctggtgatgaacagaagaagcgacttcgacttcagcgcccccaagatcaacctggagatcgagctgcacaacatcgccatcgagttcaacaagccccagtacttcagcatcatggagctgctggagagcgtggacatgatggcccagaacctgccctacagaaagttcaagcccgacgtgcccctgcaccaccacgccagagagtggtgggcctacgccatccacggcgtgctggaggtgaacgtgtgccccagactgtggatgtggagctggaagcacatcagaaagcacagacagaaggtgaagcagtacaaggagctgtacaagaagaagctgaccagcaagaagccccccggcgagctgctggtgagcctggaggagctggagaagaccctggacgtgttcaacatcaccatcgccagacagaccgccgaggtggaggtgaagaaggccggctacaagatctacaaggagggcgtgaaggaccccgaggacaacaagggctggttcagctggctgtggagctggagcgagcagaacaccaacgagcagcagcccgacgtgcagcccgagaccctggaggagatgctgacccccgaggagaaggccctgctgtacgaggccatcggctacagcgagaccgccgtggaccccaccctgctgaagaccttcgaggccctgaagttcttcgtgcacctgaagagcatgagcatcgtgctgagagagaaccaccagaagcccgagctggtggacatcgtgatcgaggagttcagcaccctgatcgtgcagagacccggcgcccaggccatcaagttcgagaccaagatcgacagcttccacatcaccggcctgcccgacaacagcgagaagcccagactgctgagcagcctggacgacgccatgagcctgttccagatcaccttcgagatcaaccccctggacgagaccgtgagccagagatgcatcatcgaggccgagcccctggagatcatctacgacgccagaaccgtgaacagcatcgtggagttcttcagaccccccaaggaggtgcacctggcccagctgaccgccgccaccctgaccaagctggaggagttcagaagcaagaccgccaccggcctgctgtacatcatcgagacccagaaggtgctggacctgaagatcaacctgaaggccagctacatcatcgtgccccaggacggcatcttcagccccaccagcaacctgctgctgctggacctgggccacctgaaggtgaccagcaagagcagaagcgagctgcccgacgtgaagcagggcgaggccaacctgaaggagatcatggacagagcctacgacagcttcgacatccagctgaccagcgtgcagctgctgtacagcagagtgggcgacaactggagagaggccagaaagctgagcgtgagcacccagcacatcctggtgcccatgcacttcaacctggagctgagcaaggccatggtgttcatggacgtgagaatgcccaagttcaagatctacggcaagctgcccctgatcagcctgagaatcagcgacaagaagctgcagggcatcatggagctgatcgagagcatccccaagcccgagcccgtgaccgaggtgagcgcccccgtgaagagcttccagatccagaccagcaccagcctgggcaccagccagatcagccagaagatcatccccctgctggagctgcccagcgtgagcgaggacgacagcgaggaggagttcttcgacgccccctgcagccccctggaggagcccctgcagttccccaccggcgtgaagagcatcagaaccagaaagctgcagaagcaggactgcagcgtgaacatgaccaccttcaagatcagattcgaggtgcccaaggtgctgatcgagttctaccacctggtgggcgactgcgagctgagcgtggtggagatcctggtgctgggcctgggcgccgagatcgagatcagaacctacgacctgaaggccaacgccttcctgaaggagttctgcctgaagtgccccgagtacctggacgagaacaagaagcccgtgtacctggtgaccaccctggacaacaccatggaggacctgctgaccctggagtacgtgaaggccgagaagaacgtgcccgacctgaagagcacctacaacaacgtgctgcagctgatcaaggtgaacttcagcagcctggacatccacctgcacaccgaggccctgctgaacaccatcaactacctgcacaacatcctgccccagagcgaggagaagagcgcccccgtgagcaccaccgagaccgaggacaagggcgacgtgatcaagaagctggccctgaagctgagcaccaacgaggacatcatcaccctgcagatcctggccgagctgagctgcctgcagatcttcatccaggaccagaagtgcaacatcagcgagatcaagatcgagggcctggacagcgagatgatcatgagacccagcgagaccgagatcaacgccaagctgagaaacatcatcgtgctggacagcgacatcaccgccatctacaagaaggccgtgtacatcaccggcaaggaggtgttcagcttcaagatggtgagctacatggacgccaccgccggcagcgcctacaccgacatgaacgtggtggacatccaggtgaacctgatcgtgggctgcatcgaggtggtgttcgtgaccaagttcctgtacagcatcctggccttcatcgacaacttccaggccgccaagcaggccctggccgaggccaccgtgcaggccgccggcatggccgccaccggcgtgaaggagctggcccagagaagcagcagaatggccctggacatcaacatcaaggcccccgtggtggtgatcccccagagccccgtgagcgagaacgtgttcgtggccgacttcggcctgatcaccatgaccaacaccttccacatgatcaccgagagccagagcagccccccccccgtgatcgacctgatcaccatcaagctgagcgagatgagactgtacagaagcagattcatcaacgacgcctaccaggaggtgctggacctgctgctgcccctgaacctggaggtggtggtggagagaaacctgtgctgggagtggtaccaggaggtgccctgcttcaacgtgaacgcccagctgaagcccatggagttcatcctgagccaggaggacatcaccaccatcttcaagaccctgcacggcaacatctggtacgagaaggacggcagcgccagccccgccgtgaccaaggaccagtacagcgccaccagcggcgtgaccaccaacgccagccaccacagcggcggcgccaccgtggtgaccgccgccgtggtggaggtgcacagcagagccctgctggtgaagaccaccctgaacatcagcttcaagaccgacgacctgaccatggtgctgtacagccccggccccaagcaggccagcttcaccgacgtgagagaccccagcctgaagctggccgagttcaagctggagaacatcatcagcaccctgaagatgtacaccgacggcagcaccttcagcagcttcagcctgaagaactgcatcctggacgacaagagaccccacgtgaagaaggccacccccagaatgatcggcctgaccgtgggcttcgacaagaaggacatgatggacatcaagtacagaaaggtgagagacggctgcgtgaccgacgccgtgttccaggagatgtacatctgcgccagcgtggagttcctgcagaccgtggccaacgtgttcctggaggcctacaccaccggcaccgccgtggagaccagcgtgcagacctggaccgccaaggaggaggtgcccacccaggagagcgtgaagtgggagatcaacgtgatcatcaagaaccccgagatcgtgttcgtggccgacatgaccaagaacgacgcccccgccctggtgatcaccacccagtgcgagatctgctacaagggcaacctggagaacagcaccatgaccgccgccatcaaggacctgcaggtgagagcctgccccttcctgcccgtgaagagaaagggcaagatcaccaccgtgctgcagccctgcgacctgttctaccagaccacccagaagggcaccgacccccaggtgatcgacatgagcgtgaagagcctgaccctgaaggtgagccccgtgatcatcaacaccatgatcaccatcaccagcgccctgtacaccaccaaggagaccatccccgaggagaccgccagcagcaccgcccacctgtgggagaagaaggacaccaagaccctgaagatgtggttcctggaggagagcaacgagaccgagaagatcgcccccaccaccgagctggtgcccaagggcgagatgatcaagatgaacatcgacagcatcttcatcgtgctggaggccggcatcggccacagaaccgtgcccatgctgctggccaagagcagattcagcggcgagggcaagaactggagcagcctgatcaacctgcactgccagctggagctggaggtgcactactacaacgagatgttcggcgtgtgggagcccctgctggagcccctggagatcgaccagaccgaggacttcagaccctggaacctgggcatcaagatgaagaagaaggccaagatggccatcgtggagagcgaccccgaggaggagaactacaaggtgcccgagtacaagaccgtgatcagcttccacagcaaggaccagctgaacatcaccctgagcaagtgcggcctggtgatgctgaacaacctggtgaaggccttcaccgaggccgccaccggcagcagcgccgacttcgtgaaggacctggcccccttcatgatcctgaacagcctgggcctgaccatcagcgtgagccccagcgacagcttcagcgtgctgaacatccccatggccaagagctacgtgctgaagaacggcgagagcctgagcatggactacatcagaaccaaggacaacgaccacttcaacgccatgaccagcctgagcagcaagctgttcttcatcctgctgacccccgtgaaccacagcaccgccgacaagatccccctgaccaaggtgggcagaagactgtacaccgtgagacacagagagagcggcgtggagagaagcatcgtgtgccagatcgacaccgtggagggcagcaagaaggtgaccatcagaagccccgtgcagatcagaaaccacttcagcgtgcccctgagcgtgtacgagggcgacaccctgctgggcaccgccagccccgagaacgagttcaacatccccctgggcagctacagaagcttcatcttcctgaagcccgaggacgagaactaccagatgtgcgagggcatcgacttcgaggagatcatcaagaacgacggcgccctgctgaagaagaagtgcagaagcaagaaccccagcaaggagagcttcctgatcaacatcgtgcccgagaaggacaacctgaccagcctgagcgtgtacagcgaggacggctgggacctgccctacatcatgcacctgtggccccccatcctgctgagaaacctgctgccctacaagatcgcctactacatcgagggcatcgagaacagcgtgttcaccctgagcgagggccacagcgcccagatctgcaccgcccagctgggcaaggccagactgcacctgaagctgctggactacctgaaccacgactggaagagcgagtaccacatcaagcccaaccagcaggacatcagcttcgtgagcttcacctgcgtgaccgagatggagaagaccgacctggacatcgccgtgcacatgacctacaacaccggccagaccgtggtggccttccacagcccctactggatggtgaacaagaccggcagaatgctgcagtacaaggccgacggcatccacagaaagcacccccccaactacaagaagcccgtgctgttcagcttccagcccaaccacttcttcaacaacaacaaggtgcagctgatggtgaccgacagcgagctgagcaaccagttcagcatcgacaccgtgggcagccacggcgccgtgaagtgcaagggcctgaagatggactaccaggtgggcgtgaccatcgacctgagcagcttcaacatcaccagaatcgtgaccttcacccccttctacatgatcaagaacaagagcaagtaccacatcagcgtggccgaggagggcaacgacaagtggctgagcctggacctggagcagtgcatccccttctggcccgagtacgccagcagcaagctgctgatccaggtggagagaagcgaggacccccccaagagaatctacttcaacaagcaggagaactgcatcctgctgagactggacaacgagctgggcggcatcatcgccgaggtgaacctggccgagcacagcaccgtgatcaccttcctggactaccacgacggcgccgccaccttcctgctgatcaaccacaccaagaacgagctggtgcagtacaaccagagcagcctgagcgagatcgaggacagcctgccccccggcaaggccgtgttctacacctgggccgaccccgtgggcagcagaagactgaagtggagatgcagaaagagccacggcgaggtgacccagaaggacgacatgatgatgcccatcgacctgggcgagaagaccatctacctggtgagcttcttcgagggcctgcagagaatcatcctgttcaccgaggaccccagagtgttcaaggtgacctacgagagcgagaaggccgagctggccgagcaggagatcgccgtggccctgcaggacgtgggcatcagcctggtgaacaactacaccaagcaggaggtggcctacatcggcatcaccagcagcgacgtggtgtgggagaccaagcccaagaagaaggccagatggaagcccatgagcgtgaagcacaccgagaagctggagagagagttcaaggagtacaccgagagcagccccagcgaggacaaggtgatccagctggacaccaacgtgcccgtgagactgacccccaccggccacaacatgaagatcctgcagccccacgtgatcgccctgagaagaaactacctgcccgccctgaaggtggagtacaacaccagcgcccaccagagcagcttcagaatccagatctacagaatccagatccagaaccagatccacggcgccgtgttccccttcgtgttctaccccgtgaagccccccaagagcgtgaccatggacagcgcccccaagcccttcaccgacgtgagcatcgtgatgagaagcgccggccacagccagatcagcagaatcaagtacttcaaggtgctgatccaggagatggacctgagactggacctgggcttcatctacgccctgaccgacctgatgaccgaggccgaggtgaccgagaacaccgaggtggagctgttccacaaggacatcgaggccttcaaggaggagtacaagaccgccagcctggtggaccagagccaggtgagcctgtacgagtacttccacatcagccccatcaagctgcacctgagcgtgagcctgagcagcggcagagaggaggccaaggacagcaagcagaacggcggcctgatccccgtgcacagcctgaacctgctgctgaagagcatcggcgccaccctgaccgacgtgcaggacgtggtgttcaagctggccttcttcgagctgaactaccagttccacaccaccagcgacctgcagagcgaggtgatcagacactacagcaagcaggccatcaagcagatgtacgtgctgatcctgggcctggacgtgctgggcaaccccttcggcctgatcagagagttcagcgagggcgtggaggccttcttctacgagccctaccagggcgccatccagggccccgaggagttcgtggagggcatggccctgggcctgaaggccctggtgggcggcgccgtgggcggcctggccggcgccgccagcaagatcaccggcgccatggccaagggcgtggccgccatgaccatggacgaggactaccagcagaagagaagagaggccatgaacaagcagcccgccggcttcagagagggcatcaccagaggcggcaagggcctggtgagcggcttcgtgagcggcatcaccggcatcgtgaccaagcccatcaagggcgcccagaagggcggcgccgccggcttcttcaagggcgtgggcaagggcctggtgggcgccgtggccagacccaccggcggcatcatcgacatggccagcagcaccttccagggcatcaagagagccaccgagaccagcgaggtggagagcctgagaccccccagattcttcaacgaggacggcgtgatcagaccctacagactgagagacggcaccggcaaccagatgctgcagaagatccagttctacagagagtggatcatgacccacagcagcagcagcgacgacgacgacgacgacgacgacgacgacgagagcgacctgaaccactag

SEQ ID NO: 13418 - DNA, 9525 bp, synthetic construct
  misc_feature 1..9525: note = Description of Artificial Sequence: Synthetic coding sequence
  source 1..9525: mol_type = other DNA
atggtgttcgagagcgtggtggtggacgtgctgaacagattcctgggcgactacgtggtggacctggacaccagccagctgagcctgggcatctggaagggcgccgtggccctgaagaacctgcagatcaaggagaacgccctgagccagctggacgtgcccttcaaggtgaaggtgggccacatcggcaacctgaagctgatcatcccctggaagaacctgtacacccagcccgtggaggccgtgctggaggagatctacctgctgatcgtgcccagcagcagaatcaagtacgaccccctgaaggaggagaagcagctgatggaggccaagcagcaggagctgaagagaatcgaggaggccaagcagaaggtggtggaccaggagcagcacctgcccgagaagcaggacaccttcgccgagaagctggtgacccagatcatcaagaacctgcaggtgaagatcagcagcatccacatcagatacgaggacgacatcaccaacagagacaagcccctgagcttcggcatcagcctgcagaacctgagcatgcagaccaccgaccagtactgggtgccctgcctgcacgacgagaccgagaagctggtgagaaagctgatcagactggacaacctgttcgcctactggaacgtgaagagccagatgttctacctgagcgactacgacaacagcctggacgacctgaagaacggcatcgtgaacgagaacatcgtgcccgagggctacgacttcgtgttcagacccatcagcgccaacgccaagctggtgatgaacagaagaagcgacttcgacttcagcgcccccaagatcaacctggagatcgagctgcacaacatcgccatcgagttcaacaagccccagtacttcagcatcatggagctgctggagagcgtggacatgatggcccagaacctgccctacagaaagttcaagcccgacgtgcccctgcaccaccacgccagagagtggtgggcctacgccatccacggcgtgctggaggtgaacgtgtgccccagactgtggatgtggagctggaagcacatcagaaagcacagacagaaggtgaagcagtacaaggagctgtacaagaagaagctgaccagcaagaagccccccggcgagctgctggtgagcctggaggagctggagaagaccctggacgtgttcaacatcaccatcgccagacagaccgccgaggtggaggtgaagaaggccggctacaagatctacaaggagggcgtgaaggaccccgaggacaacaagggctggttcagctggctgtggagctggagcgagcagaacaccaacgagcagcagcccgacgtgcagcccgagaccctggaggagatgctgacccccgaggagaaggccctgctgtacgaggccatcggctacagcgagaccgccgtggaccccaccctgctgaagaccttcgaggccctgaagttcttcgtgcacctgaagagcatgagcatcgtgctgagagagaaccaccagaagcccgagctggtggacatcgtgatcgaggagttcagcaccctgatcgtgcagagacccggcgcccaggccatcaagttcgagaccaagatcgacagcttccacatcaccggcctgcccgacaacagcgagaagcccagactgctgagcagcctggacgacgccatgagcctgttccagatcaccttcgagatcaaccccctggacgagaccgtgagccagagatgcatcatcgaggccgagcccctggagatcatctacgacgccagaaccgtgaacagcatcgtggagttcttcagaccccccaaggaggtgcacctggcccagctgaccgccgccaccctgaccaagctggaggagttcagaagcaagaccgccaccggcctgctgtacatcatcgagacccagaaggtgctggacctgaagatcaacctgaaggccagctacatcatcgtgccccaggacggcatcttcagccccaccagcaacctgctgctgctggacctgggccacctgaaggtgaccagcaagagcagaagcgagctgcccgacgtgaagcagggcgaggccaacctgaaggagatcatggacagagcctacgacagcttcgacatccagctgaccagcgtgcagctgctgtacagcagagtgggcgacaactggagagaggccagaaagctgagcgtgagcacccagcacatcctggtgcccatgcacttcaacctggagctgagcaaggccatggtgttcatggacgtgagaatgcccaagttcaagatctacggcaagctgcccctgatcagcctgagaatcagcgacaagaagctgcagggcatcatggagctgatcgagagcatccccaagcccgagcccgtgaccgaggtgagcgcccccgtgaagagcttccagatccagaccagcaccagcctgggcaccagccagatcagccagaagatcatccccctgctggagctgcccagcgtgagcgaggacgacagcgaggaggagttcttcgacgccccctgcagccccctggaggagcccctgcagttccccaccggcgtgaagagcatcagaaccagaaagctgcagaagcaggactgcagcgtgaacatgaccaccttcaagatcagattcgaggtgcccaaggtgctgatcgagttctaccacctggtgggcgactgcgagctgagcgtggtggagatcctggtgctgggcctgggcgccgagatcgagatcagaacctacgacctgaaggccaacgccttcctgaaggagttctgcctgaagtgccccgagtacctggacgagaacaagaagcccgtgtacctggtgaccaccctggacaacaccatggaggacctgctgaccctggagtacgtgaaggccgagaagaacgtgcccgacctgaagagcacctacaacaacgtgctgcagctgatcaaggtgaacttcagcagcctggacatccacctgcacaccgaggccctgctgaacaccatcaactacctgcacaacatcctgccccagagcgaggagaagagcgcccccgtgagcaccaccgagaccgaggacaagggcgacgtgatcaagaagctggccctgaagctgagcaccaacgaggacatcatcaccctgcagatcctggccgagctgagctgcctgcagatcttcatccaggaccagaagtgcaacatcagcgagatcaagatcgagggcctggacagcgagatgatcatgagacccagcgagaccgagatcaacgccaagctgagaaacatcatcgtgctggacagcgacatcaccgccatctacaagaaggccgtgtacatcaccggcaaggaggtgttcagcttcaagatggtgagctacatggacgccaccgccggcagcgcctacaccgacatgaacgtggtggacatccaggtgaacctgatcgtgggctgcatcgaggtggtgttcgtgaccaagttcctgtacagcatcctggccttcatcgacaacttccaggccgccaagcaggccctggccgaggccaccgtgcaggccgccggcatggccgccaccggcgtgaaggagctggcccagagaagcagcagaatggccctggacatcaacatcaaggcccccgtggtggtgatcccccagagccccgtgagcgagaacgtgttcgtggccgacttcggcctgatcaccatgaccaacaccttccacatgatcaccgagagccagagcagccccccccccgtgatcgacctgatcaccatcaagctgagcgagatgagactgtacagaagcagattcatcaacgacgcctaccaggaggtgctggacctgctgctgcccctgaacctggaggtggtggtggagagaaacctgtgctgggagtggtaccaggaggtgccctgcttcaacgtgaacgcccagctgaagcccatggagttcatcctgagccaggaggacatcaccaccatcttcaagaccctgcacggcaacatctggtacgagaaggacggcagcgccagccccgccgtgaccaaggaccagtacagcgccaccagcggcgtgaccaccaacgccagccaccacagcggcggcgccaccgtggtgaccgccgccgtggtggaggtgcacagcagagccctgctggtgaagaccaccctgaacatcagcttcaagaccgacgacctgaccatggtgctgtacagccccggccccaagcaggccagcttcaccgacgtgagagaccccagcctgaagctggccgagttcaagctggagaacatcatcagcaccctgaagatgtacaccgacggcagcaccttcagcagcttcagcctgaagaactgcatcctggacgacaagagaccccacgtgaagaaggccacccccagaatgatcggcctgaccgtgggcttcgacaagaaggacatgatggacatcaagtacagaaaggtgagagacggctgcgtgaccgacgccgtgttccaggagatgtacatctgcgccagcgtggagttcctgcagaccgtggccaacgtgttcctggaggcctacaccaccggcaccgccgtggagaccagcgtgcagacctggaccgccaaggaggaggtgcccacccaggagagcgtgaagtgggagatcaacgtgatcatcaagaaccccgagatcgtgttcgtggccgacatgaccaagaacgacgcccccgccctggtgatcaccacccagtgcgagatctgctacaagggcaacctggagaacagcaccatgaccgccgccatcaaggacctgcaggtgagagcctgccccttcctgcccgtgaagagaaagggcaagatcaccaccgtgctgcagccctgcgacctgttctaccagaccacccagaagggcaccgacccccaggtgatcgacatgagcgtgaagagcctgaccctgaaggtgagccccgtgatcatcaacaccatgatcaccatcaccagcgccctgtacaccaccaaggagaccatccccgaggagaccgccagcagcaccgcccacctgtgggagaagaaggacaccaagaccctgaagatgtggttcctggaggagagcaacgagaccgagaagatcgcccccaccaccgagctggtgcccaagggcgagatgatcaagatgaacatcgacagcatcttcatcgtgctggaggccggcatcggccacagaaccgtgcccatgctgctggccaagagcagattcagcggcgagggcaagaactggagcagcctgatcaacctgcactgccagctggagctggaggtgcactactacaacgagatgttcggcgtgtgggagcccctgctggagcccctggagatcgaccagaccgaggacttcagaccctggaacctgggcatcaagatgaagaagaaggccaagatggccatcgtggagagcgaccccgaggaggagaactacaaggtgcccgagtacaagaccgtgatcagcttccacagcaaggaccagctgaacatcaccctgagcaagtgcggcctggtgatgctgaacaacctggtgaaggccttcaccgaggccgccaccggcagcagcgccgacttcgtgaaggacctggcccccttcatgatcctgaacagcctgggcctgaccatcagcgtgagccccagcgacagcttcagcgtgctgaacatccccatggccaagagctacgtgctgaagaacggcgagagcctgagcatggactacatcagaaccaaggacaacgaccacttcaacgccatgaccagcctgagcagcaagctgttcttcatcctgctgacccccgtgaaccacagcaccgccgacaagatccccctgaccaaggtgggcagaagactgtacaccgtgagacacagagagagcggcgtggagagaagcatcgtgtgccagatcgacaccgtggagggcagcaagaaggtgaccatcagaagccccgtgcagatcagaaaccacttcagcgtgcccctgagcgtgtacgagggcgacaccctgctgggcaccgccagccccgagaacgagttcaacatccccctgggcagctacagaagcttcatcttcctgaagcccgaggacgagaactaccagatgtgcgagggcatcgacttcgaggagatcatcaagaacgacggcgccctgctgaagaagaagtgcagaagcaagaaccccagcaaggagagcttcctgatcaacatcgtgcccgagaaggacaacctgaccagcctgagcgtgtacagcgaggacggctgggacctgccctacatcatgcacctgtggccccccatcctgctgagaaacctgctgccctacaagatcgcctactacatcgagggcatcgagaacagcgtgttcaccctgagcgagggccacagcgcccagatctgcaccgcccagctgggcaaggccagactgcacctgaagctgctggactacctgaaccacgactggaagagcgagtaccacatcaagcccaaccagcaggacatcagcttcgtgagcttcacctgcgtgaccgagatggagaagaccgacctggacatcgccgtgcacatgacctacaacaccggccagaccgtggtggccttccacagcccctactggatggtgaacaagaccggcagaatgctgcagtacaaggccgacggcatccacagaaagcacccccccaactacaagaagcccgtgctgttcagcttccagcccaaccacttcttcaacaacaacaaggtgcagctgatggtgaccgacagcgagctgagcaaccagttcagcatcgacaccgtgggcagccacggcgccgtgaagtgcaagggcctgaagatggactaccaggtgggcgtgaccatcgacctgagcagcttcaacatcaccagaatcgtgaccttcacccccttctacatgatcaagaacaagagcaagtaccacatcagcgtggccgaggagggcaacgacaagtggctgagcctggacctggagcagtgcatccccttctggcccgagtacgccagcagcaagctgctgatccaggtggagagaagcgaggacccccccaagagaatctacttcaacaagcaggagaactgcatcctgctgagactggacaacgagctgggcggcatcatcgccgaggtgaacctggccgagcacagcaccgtgatcaccttcctggactaccacgacggcgccgccaccttcctgctgatcaaccacaccaagaacgagctggtgcagtacaaccagagcagcctgagcgagatcgaggacagcctgccccccggcaaggccgtgttctacacctgggccgaccccgtgggcagcagaagactgaagtggagatgcagaaagagccacggcgaggtgacccagaaggacgacatgatgatgcccatcgacctgggcgagaagaccatctacctggtgagcttcttcgagggcctgcagagaatcatcctgttcaccgaggaccccagagtgttcaaggtgacctacgagagcgagaaggccgagctggccgagcaggagatcgccgtggccctgcaggacgtgggcatcagcctggtgaacaactacaccaagcaggaggtggcctacatcggcatcaccagcagcgacgtggtgtgggagaccaagcccaagaagaaggccagatggaagcccatgagcgtgaagcacaccgagaagctggagagagagttcaaggagtacaccgagagcagccccagcgaggacaaggtgatccagctggacaccaacgtgcccgtgagactgacccccaccggccacaacatgaagatcctgcagccccacgtgatcgccctgagaagaaactacctgcccgccctgaaggtggagtacaacaccagcgcccaccagagcagcttcagaatccagatctacagaatccagatccagaaccagatccacggcgccgtgttccccttcgtgttctaccccgtgaagccccccaagagcgtgaccatggacagcgcccccaagcccttcaccgacgtgagcatcgtgatgagaagcgccggccacagccagatcagcagaatcaagtacttcaaggtgctgatccaggagatggacctgagactggacctgggcttcatctacgccctgaccgacctgatgaccgaggccgaggtgaccgagaacaccgaggtggagctgttccacaaggacatcgaggccttcaaggaggagtacaagaccgccagcctggtggaccagagccaggtgagcctgtacgagtacttccacatcagccccatcaagctgcacctgagcgtgagcctgagcagcggcagagaggaggccaaggacagcaagcagaacggcggcctgatccccgtgcacagcctgaacctgctgctgaagagcatcggcgccaccctgaccgacgtgcaggacgtggtgttcaagctggccttcttcgagctgaactaccagttccacaccaccagcgacctgcagagcgaggtgatcagacactacagcaagcaggccatcaagcagatgtacgtgctgatcctgggcctggacgtgctgggcaaccccttcggcctgatcagagagttcagcgagggcgtggaggccttcttctacgagccctaccagggcgccatccagggccccgaggagttcgtggagggcatggccctgggcctgaaggccctggtgggcggcgccgtgggcggcctggccggcgccgccagcaagatcaccggcgccatggccaagggcgtggccgccatgaccatggacgaggactaccagcagaagagaagagaggccatgaacaagcagcccgccggcttcagagagggcatcaccagaggcggcaagggcctggtgagcggcttcgtgagcggcatcaccggcatcgtgaccaagcccatcaagggcgcccagaagggcggcgccgccggcttcttcaagggcgtgggcaagggcctggtgggcgccgtggccagacccaccggcggcatcatcgacatggccagcagcaccttccagggcatcaagagagccaccgagaccagcgaggtggagagcctgagaccccccagattcttcaacgaggacggcgtgatcagaccctacagactgagagacggcaccggcaaccagatgctgcaggtgatggagaacggcagattcgccaagtacaagtacttcacccacgtgatgatcaacaagaccgacatgctgatgatcaccagaagaggcgtgctgttcgtgaccaagggcaccttcggccagctgacctgcgagtggcagtacagcttcgacgagttcaccaaggagcccttcatcgtgcacggcagaagactgagaatcgaggccaaggagagagtgaagagcgtgttccacgccagagagttcggcaagatcatcaacttcaagacccccgaggacgccagatggatcctgaccaagctgcaggaggccagagagcccagccccagcctgtag

SEQ ID NO: 13419 - DNA, 9210 bp, synthetic construct
  misc_feature 1..9210: note = Description of Artificial Sequence: Synthetic coding sequence
  source 1..9210: mol_type = other DNA
atggtgttcgagagcgtggtggtggacgtgctgaacagattcctgggcgactacgtggtggacctggacaccagccagctgagcctgggcatctggaagggcgccgtggccctgaagaacctgcagatcaaggagaacgccctgagccagctggacgtgcccttcaaggtgaaggtgggccacatcggcaacctgaagctgatcatcccctggaagaacctgtacacccagcccgtggaggccgtgctggaggagatctacctgctgatcgtgcccagcagcagaatcaagtacgaccccctgaaggaggagaagcagctgatggaggccaagcagcaggagctgaagagaatcgaggaggccaagcagaaggtggtggaccaggagcagcacctgcccgagaagcaggacaccttcgccgagaagctggtgacccagatcatcaagaacctgcaggtgaagatcagcagcatccacatcagatacgaggacgacatcaccaacagagacaagcccctgagcttcggcatcagcctgcagaacctgagcatgcagaccaccgaccagtactgggtgccctgcctgcacgacgagaccgagaagctggtgagaaagctgatcagactggacaacctgttcgcctactggaacgtgaagagccagatgttctacctgagcgactacgacaacagcctggacgacctgaagaacggcatcgtgaacgagaacatcgtgcccgagggctacgacttcgtgttcagacccatcagcgccaacgccaagctggtgatgaacagaagaagcgacttcgacttcagcgcccccaagatcaacctggagatcgagctgcacaacatcgccatcgagttcaacaagccccagtacttcagcatcatggagctgctggagagcgtggacatgatggcccagaacctgccctacagaaagttcaagcccgacgtgcccctgcaccaccacgccagagagtggtgggcctacgccatccacggcgtgctggaggtgaacgtgtgccccagactgtggatgtggagctggaagcacatcagaaagcacagacagaaggtgaagcagtacaaggagctgtacaagaagaagctgaccagcaagaagccccccggcgagctgctggtgagcctggaggagctggagaagaccctggacgtgttcaacatcaccatcgccagacagaccgccgaggtggaggtgaagaaggccggctacaagatctacaaggagggcgtgaaggaccccgaggacaacaagggctggttcagctggctgtggagctggagcgagcagaacaccaacgagcagcagcccgacgtgcagcccgagaccctggaggagatgctgacccccgaggagaaggccctgctgtacgaggccatcggctacagcgagaccgccgtggaccccaccctgctgaagaccttcgaggccctgaagttcttcgtgcacctgaagagcatgagcatcgtgctgagagagaaccaccagaagcccgagctggtggacatcgtgatcgaggagttcagcaccctgatcgtgcagagacccggcgcccaggccatcaagttcgagaccaagatcgacagcttccacatcaccggcctgcccgacaacagcgagaagcccagactgctgagcagcctggacgacgccatgagcctgttccagatcaccttcgagatcaaccccctggacgagaccgtgagccagagatgcatcatcgaggccgagcccctggagatcatctacgacgccagaaccgtgaacagcatcgtggagttcttcagaccccccaaggaggtgcacctggcccagctgaccgccgccaccctgaccaagctggaggagttcagaagcaagaccgccaccggcctgctgtacatcatcgagacccagaaggtgctggacctgaagatcaacctgaaggccagctacatcatcgtgccccaggacggcatcttcagccccaccagcaacctgctgctgctggacctgggccacctgaaggtgaccagcaagagcagaagcgagctgcccgacgtgaagcagggcgaggccaacctgaaggagatcatggacagagcctacgacagcttcgacatccagctgaccagcgtgcagctgctgtacagcagagtgggcgacaactggagagaggccagaaagctgagcgtgagcacccagcacatcctggtgcccatgcacttcaacctggagctgagcaaggccatggtgttcatggacgtgagaatgcccaagttcaagatctacggcaagctgcccctgatcagcctgagaatcagcgacaagaagctgcagggcatcatggagctgatcgagagcatccccaagcccgagcccgtgaccgaggtgagcgcccccgtgaagagcttccagatccagaccagcaccagcctgggcaccagccagatcagccagaagatcatccccctgctggagctgcccagcgtgagcgaggacgacagcgaggaggagttcttcgacgccccctgcagccccctggaggagcccctgcagttccccaccggcgtgaagagcatcagaaccagaaagctgcagaagcaggactgcagcgtgaacatgaccaccttcaagatcagattcgaggtgcccaaggtgctgatcgagttctaccacctggtgggcgactgcgagctgagcgtggtggagatcctggtgctgggcctgggcgccgagatcgagatcagaacctacgacctgaaggccaacgccttcctgaaggagttctgcctgaagtgccccgagtacctggacgagaacaagaagcccgtgtacctggtgaccaccctggacaacaccatggaggacctgctgaccctggagtacgtgaaggccgagaagaacgtgcccgacctgaagagcacctacaacaacgtgctgcagctgatcaaggtgaacttcagcagcctggacatccacctgcacaccgaggccctgctgaacaccatcaactacctgcacaacatcctgccccagagcgaggagaagagcgcccccgtgagcaccaccgagaccgaggacaagggcgacgtgatcaagaagctggccctgaagctgagcaccaacgaggacatcatcaccctgcagatcctggccgagctgagctgcctgcagatcttcatccaggaccagaagtgcaacatcagcgagatcaagatcgagggcctggacagcgagatgatcatgagacccagcgagaccgagatcaacgccaagctgagaaacatcatcgtgctggacagcgacatcaccgccatctacaagaaggccgtgtacatcaccggcaaggaggtgttcagcttcaagatggtgagctacatggacgccaccgccggcagcgcctacaccgacatgaacgtggtggacatccaggtgaacctgatcgtgggctgcatcgaggtggtgttcgtgaccaagttcctgtacagcatcctggccttcatcgacaacttccaggccgccaagcaggccctggccgaggccaccgtgcaggccgccggcatggccgccaccggcgtgaaggagctggcccagagaagcagcagaatggccctggacatcaacatcaaggcccccgtggtggtgatcccccagagccccgtgagcgagaacgtgttcgtggccgacttcggcctgatcaccatgaccaacaccttccacatgatcaccgagagccagagcagccccccccccgtgatcgacctgatcaccatcaagctgagcgagatgagactgtacagaagcagattcatcaacgacgcctaccaggaggtgctggacctgctgctgcccctgaacctggaggtggtggtggagagaaacctgtgctgggagtggtaccaggaggtgccctgcttcaacgtgaacgcccagctgaagcccatggagttcatcctgagccaggaggacatcaccaccatcttcaagaccctgcacggcaacatctggtacgagaaggacggcagcgccagccccgccgtgaccaaggaccagtacagcgccaccagcggcgtgaccaccaacgccagccaccacagcggcggcgccaccgtggtgaccgccgccgtggtggaggtgcacagcagagccctgctggtgaagaccaccctgaacatcagcttcaagaccgacgacctgaccatggtgctgtacagccccggccccaagcaggccagcttcaccgacgtgagagaccccagcctgaagctggccgagttcaagctggagaacatcatcagcaccctgaagatgtacaccgacggcagcaccttcagcagcttcagcctgaagaactgcatcctggacgacaagagaccccacgtgaagaaggccacccccagaatgatcggcctgaccgtgggcttcgacaagaaggacatgatggacatcaagtacagaaaggtgagagacggctgcgtgaccgacgccgtgttccaggagatgtacatctgcgccagcgtggagttcctgcagaccgtggccaacgtgttcctggaggcctacaccaccggcaccgccgtggagaccagcgtgcagacctggaccgccaaggaggaggtgcccacccaggagagcgtgaagtgggagatcaacgtgatcatcaagaaccccgagatcgtgttcgtggccgacatgaccaagaacgacgcccccgccctggtgatcaccacccagtgcgagatctgctacaagggcaacctggagaacagcaccatgaccgccgccatcaaggacctgcaggtgagagcctgccccttcctgcccgtgaagagaaagggcaagatcaccaccgtgctgcagccctgcgacctgttctaccagaccacccagaagggcaccgacccccaggtgatcgacatgagcgtgaagagcctgaccctgaaggtgagccccgtgatcatcaacaccatgatcaccatcaccagcgccctgtacaccaccaaggagaccatccccgaggagaccgccagcagcaccgcccacctgtgggagaagaaggacaccaagaccctgaagatgtggttcctggaggagagcaacgagaccgagaagatcgcccccaccaccgagctggtgcccaagggcgagatgatcaagatgaacatcgacagcatcttcatcgtgctggaggccggcatcggccacagaaccgtgcccatgctgctggccaagagcagattcagcggcgagggcaagaactggagcagcctgatcaacctgcactgccagctggagctggaggtgcactactacaacgagatgttcggcgtgtgggagcccctgctggagcccctggagatcgaccagaccgaggacttcagaccctggaacctgggcatcaagatgaagaagaaggccaagatggccatcgtggagagcgaccccgaggaggagaactacaaggtgcccgagtacaagaccgtgatcagcttccacagcaaggaccagctgaacatcaccctgagcaagtgcggcctggtgatgctgaacaacctggtgaaggccttcaccgaggccgccaccggcagcagcgccgacttcgtgaaggacctggcccccttcatgatcctgaacagcctgggcctgaccatcagcgtgagccccagcgacagcttcagcgtgctgaacatccccatggccaagagctacgtgctgaagaacggcgagagcctgagcatggactacatcagaaccaaggacaacgaccacttcaacgccatgaccagcctgagcagcaagctgttcttcatcctgctgacccccgtgaaccacagcaccgccgacaagatccccctgaccaaggtgggcagaagactgtacaccgtgagacacagagagagcggcgtggagagaagcatcgtgtgccagatcgacaccgtggagggcagcaagaaggtgaccatcagaagccccgtgcagatcagaaaccacttcagcgtgcccctgagcgtgtacgagggcgacaccctgctgggcaccgccagccccgagaacgagttcaacatccccctgggcagctacagaagcttcatcttcctgaagcccgaggacgagaactaccagatgtgcgagggcatcgacttcgaggagatcatcaagaacgacggcgccctgctgaagaagaagtgcagaagcaagaaccccagcaaggagagcttcctgatcaacatcgtgcccgagaaggacaacctgaccagcctgagcgtgtacagcgaggacggctgggacctgccctacatcatgcacctgtggccccccatcctgctgagaaacctgctgccctacaagatcgcctactacatcgagggcatcgagaacagcgtgttcaccctgagcgagggccacagcgcccagatctgcaccgcccagctgggcaaggccagactgcacctgaagctgctggactacctgaaccacgactggaagagcgagtaccacatcaagcccaaccagcaggacatcagcttcgtgagcttcacctgcgtgaccgagatggagaagaccgacctggacatcgccgtgcacatgacctacaacaccggccagaccgtggtggccttccacagcccctactggatggtgaacaagaccggcagaatgctgcagtacaaggccgacggcatccacagaaagcacccccccaactacaagaagcccgtgctgttcagcttccagcccaaccacttcttcaacaacaacaaggtgcagctgatggtgaccgacagcgagctgagcaaccagttcagcatcgacaccgtgggcagccacggcgccgtgaagtgcaagggcctgaagatggactaccaggtgggcgtgaccatcgacctgagcagcttcaacatcaccagaatcgtgaccttcacccccttctacatgatcaagaacaagagcaagtaccacatcagcgtggccgaggagggcaacgacaagtggctgagcctggacctggagcagtgcatccccttctggcccgagtacgccagcagcaagctgctgatccaggtggagagaagcgaggacccccccaagagaatctacttcaacaagcaggagaactgcatcctgctgagactggacaacgagctgggcggcatcatcgccgaggtgaacctggccgagcacagcaccgtgatcaccttcctggactaccacgacggcgccgccaccttcctgctgatcaaccacaccaagaacgagctggtgcagtacaaccagagcagcctgagcgagatcgaggacagcctgccccccggcaaggccgtgttctacacctgggccgaccccgtgggcagcagaagactgaagtggagatgcagaaagagccacggcgaggtgacccagaaggacgacatgatgatgcccatcgacctgggcgagaagaccatctacctggtgagcttcttcgagggcctgcagagaatcatcctgttcaccgaggaccccagagtgttcaaggtgacctacgagagcgagaaggccgagctggccgagcaggagatcgccgtggccctgcaggacgtgggcatcagcctggtgaacaactacaccaagcaggaggtggcctacatcggcatcaccagcagcgacgtggtgtgggagaccaagcccaagaagaaggccagatggaagcccatgagcgtgaagcacaccgagaagctggagagagagttcaaggagtacaccgagagcagccccagcgaggacaaggtgatccagctggacaccaacgtgcccgtgagactgacccccaccggccacaacatgaagatcctgcagccccacgtgatcgccctgagaagaaactacctgcccgccctgaaggtggagtacaacaccagcgcccaccagagcagcttcagaatccagatctacagaatccagatccagaaccagatccacggcgccgtgttccccttcgtgttctaccccgtgaagccccccaagagcgtgaccatggacagcgcccccaagcccttcaccgacgtgagcatcgtgatgagaagcgccggccacagccagatcagcagaatcaagtacttcaaggtgctgatccaggagatggacctgagactggacctgggcttcatctacgccctgaccgacctgatgaccgaggccgaggtgaccgagaacaccgaggtggagctgttccacaaggacatcgaggccttcaaggaggagtacaagaccgccagcctggtggaccagagccaggtgagcctgtacgagtacttccacatcagccccatcaagctgcacctgagcgtgagcctgagcagcggcagagaggaggccaaggacagcaagcagaacggcggcctgatccccgtgcacagcctgaacctgctgctgaagagcatcggcgccaccctgaccgacgtgcaggacgtggtgttcaagctggccttcttcgagctgaactaccagttccacaccaccagcgacctgcagagcgaggtgatcagacactacagcaagcaggccatcaagcagatgtacgtgctgatcctgggcctggacgtgctgggcaaccccttcggcctgatcagagagttcagcgagggcgtggaggccttcttctacgagccctaccagggcgccatccagggccccgaggagttcgtggagggcatggccctgggcctgaaggccctggtgggcggcgccgtgggcggcctggccggcgccgccagcaagatcaccggcgccatggccaagggcgtggccgccatgaccatggacgaggactaccagcagaagagaagagaggccatgaacaagcagcccgccggcttcagagagggcatcaccagaggcggcaagggcctggtgagcggcttcgtgagcggcatcaccggcatcgtgaccaagcccatcaagggcgcccagaagggcggcgccgccggcttcttcaagggcgtgggcaagggcctggtgggcgccgtggccagacccaccggcggcatcatcgacatggccagcagcaccttccagggcatcaagagagccaccgagaccagcgaggtggagagcctgagaccccccagattcttcaacgaggacggcgtgatcagaccctacagactgagagacggcaccggcaaccagatgctgcaggccagcaagagcctgatctag

SEQ ID NO: 13420 - DNA, 9408 bp, synthetic construct
  misc_feature 1..9408: note = Description of Artificial Sequence: Synthetic coding sequence
  source 1..9408: mol_type = other DNA
atggtgttcgagagcgtggtggtggacgtgctgaacagattcctgggcgactacgtggtggacctggacaccagccagctgagcctgggcatctggaagggcgccgtggccctgaagaacctgcagatcaaggagaacgccctgagccagctggacgtgcccttcaaggtgaaggtgggccacatcggcaacctgaagctgatcatcccctggaagaacctgtacacccagcccgtggaggccgtgctggaggagatctacctgctgatcgtgcccagcagcagaatcaagtacgaccccctgaaggaggagaagcagctgatggaggccaagcagcaggagctgaagagaatcgaggaggccaagcagaaggtggtggaccaggagcagcacctgcccgagaagcaggacaccttcgccgagaagctggtgacccagatcatcaagaacctgcaggtgaagatcagcagcatccacatcagatacgaggacgacatcaccaacagagacaagcccctgagcttcggcatcagcctgcagaacctgagcatgcagaccaccgaccagtactgggtgccctgcctgcacgacgagaccgagaagctggtgagaaagctgatcagactggacaacctgttcgcctactggaacgtgaagagccagatgttctacctgagcgactacgacaacagcctggacgacctgaagaacggcatcgtgaacgagaacatcgtgcccgagggctacgacttcgtgttcagacccatcagcgccaacgccaagctggtgatgaacagaagaagcgacttcgacttcagcgcccccaagatcaacctggagatcgagctgcacaacatcgccatcgagttcaacaagccccagtacttcagcatcatggagctgctggagagcgtggacatgatggcccagaacctgccctacagaaagttcaagcccgacgtgcccctgcaccaccacgccagagagtggtgggcctacgccatccacggcgtgctggaggtgaacgtgtgccccagactgtggatgtggagctggaagcacatcagaaagcacagacagaaggtgaagcagtacaaggagctgtacaagaagaagctgaccagcaagaagccccccggcgagctgctggtgagcctggaggagctggagaagaccctggacgtgttcaacatcaccatcgccagacagaccgccgaggtggaggtgaagaaggccggctacaagatctacaaggagggcgtgaaggaccccgaggacaacaagggctggttcagctggctgtggagctggagcgagcagaacaccaacgagcagcagcccgacgtgcagcccgagaccctggaggagatgctgacccccgaggagaaggccctgctgtacgaggccatcggctacagcgagaccgccgtggaccccaccctgctgaagaccttcgaggccctgaagttcttcgtgcacctgaagagcatgagcatcgtgctgagagagaaccaccagaagcccgagctggtggacatcgtgatcgaggagttcagcaccctgatcgtgcagagacccggcgcccaggccatcaagttcgagaccaagatcgacagcttccacatcaccggcctgcccgacaacagcgagaagcccagactgctgagcagcctggacgacgccatgagcctgttccagatcaccttcgagatcaaccccctggacgagaccgtgagccagagatgcatcatcgaggccgagcccctggagatcatctacgacgccagaaccgtgaacagcatcgtggagttcttcagaccccccaaggaggtgcacctggcccagctgaccgccgccaccctgaccaagctggaggagttcagaagcaagaccgccaccggcctgctgtacatcatcgagacccagaaggtgctggacctgaagatcaacctgaaggccagctacatcatcgtgccccaggacggcatcttcagccccaccagcaacctgctgctgctggacctgggccacctgaaggtgaccagcaagagcagaagcgagctgcccgacgtgaagcagggcgaggccaacctgaaggagatcatggacagagcctacgacagcttcgacatccagctgaccagcgtgcagctgctgtacagcagagtgggcgacaactggagagaggccagaaagctgagcgtgagcacccagcacatcctggtgcccatgcacttcaacctggagctgagcaaggccatggtgttcatggacgtgagaatgcccaagttcaagatctacggcaagctgcccctgatcagcctgagaatcagcgacaagaagctgcagggcatcatggagctgatcgagagcatccccaagcccgagcccgtgaccgaggtgagcgcccccgtgaagagcttccagatccagaccagcaccagcctgggcaccagccagatcagccagaagatcatccccctgctggagctgcccagcgtgagcgaggacgacagcgaggaggagttcttcgacgccccctgcagccccctggaggagcccctgcagttccccaccggcgtgaagagcatcagaaccagaaagctgcagaagcaggactgcagcgtgaacatgaccaccttcaagatcagattcgaggtgcccaaggtgctgatcgagttctaccacctggtgggcgactgcgagctgagcgtggtggagatcctggtgctgggcctgggcgccgagatcgagatcagaacctacgacctgaaggccaacgccttcctgaaggagttctgcctgaagtgccccgagtacctggacgagaacaagaagcccgtgtacctggtgaccaccctggacaacaccatggaggacctgctgaccctggagtacgtgaaggccgagaagaacgtgcccgacctgaagagcacctacaacaacgtgctgcagctgatcaaggtgaacttcagcagcctggacatccacctgcacaccgaggccctgctgaacaccatcaactacctgcacaacatcctgccccagagcgaggagaagagcgcccccgtgagcaccaccgagaccgaggacaagggcgacgtgatcaagaagctgggcctggacagcgagatgatcatgagacccagcgagaccgagatcaacgccaagctgagaaacatcatcgtgctggacagcgacatcaccgccatctacaagaaggccgtgtacatcaccggcaaggaggtgttcagcttcaagatggtgagctacatggacgccaccgccggcagcgcctacaccgacatgaacgtggtggacatccaggtgaacctgatcgtgggctgcatcgaggtggtgttcgtgaccaagttcctgtacagcatcctggccttcatcgacaacttccaggccgccaagcaggccctggccgaggccaccgtgcaggccgccggcatggccgccaccggcgtgaaggagctggcccagagaagcagcagaatggccctggacatcaacatcaaggcccccgtggtggtgatcccccagagccccgtgagcgagaacgtgttcgtggccgacttcggcctgatcaccatgaccaacaccttccacatgatcaccgagagccagagcagccccccccccgtgatcgacctgatcaccatcaagctgagcgagatgagactgtacagaagcagattcatcaacgacgcctaccaggaggtgctggacctgctgctgcccctgaacctggaggtggtggtggagagaaacctgtgctgggagtggtaccaggaggtgccctgcttcaacgtgaacgcccagctgaagcccatggagttcatcctgagccaggaggacatcaccaccatcttcaagaccctgcacggcaacatctggtacgagaaggacggcagcgccagccccgccgtgaccaaggaccagtacagcgccaccagcggcgtgaccaccaacgccagccaccacagcggcggcgccaccgtggtgaccgccgccgtggtggaggtgcacagcagagccctgctggtgaagaccaccctgaacatcagcttcaagaccgacgacctgaccatggtgctgtacagccccggccccaagcaggccagcttcaccgacgtgagagaccccagcctgaagctggccgagttcaagctggagaacatcatcagcaccctgaagatgtacaccgacggcagcaccttcagcagcttcagcctgaagaactgcatcctggacgacaagagaccccacgtgaagaaggccacccccagaatgatcggcctgaccgtgggcttcgacaagaaggacatgatggacatcaagtacagaaaggtgagagacggctgcgtgaccgacgccgtgttccaggagatgtacatctgcgccagcgtggagttcctgcagaccgtggccaacgtgttcctggaggcctacaccaccggcaccgccgtggagaccagcgtgcagacctggaccgccaaggaggaggtgcccacccaggagagcgtgaagtgggagatcaacgtgatcatcaagaaccccgagatcgtgttcgtggccgacatgaccaagaacgacgcccccgccctggtgatcaccacccagtgcgagatctgctacaagggcaacctggagaacagcaccatgaccgccgccatcaaggacctgcaggtgagagcctgccccttcctgcccgtgaagagaaagggcaagatcaccaccgtgctgcagccctgcgacctgttctaccagaccacccagaagggcaccgacccccaggtgatcgacatgagcgtgaagagcctgaccctgaaggtgagccccgtgatcatcaacaccatgatcaccatcaccagcgccctgtacaccaccaaggagaccatccccgaggagaccgccagcagcaccgcccacctgtgggagaagaaggacaccaagaccctgaagatgtggttcctggaggagagcaacgagaccgagaagatcgcccccaccaccgagctggtgcccaagggcgagatgatcaagatgaacatcgacagcatcttcatcgtgctggaggccggcatcggccacagaaccgtgcccatgctgctggccaagagcagattcagcggcgagggcaagaactggagcagcctgatcaacctgcactgccagctggagctggaggtgcactactacaacgagatgttcggcgtgtgggagcccctgctggagcccctggagatcgaccagaccgaggacttcagaccctggaacctgggcatcaagatgaagaagaaggccaagatggccatcgtggagagcgaccccgaggaggagaactacaaggtgcccgagtacaagaccgtgatcagcttccacagcaaggaccagctgaacatcaccctgagcaagtgcggcctggtgatgctgaacaacctggtgaaggccttcaccgaggccgccaccggcagcagcgccgacttcgtgaaggacctggcccccttcatgatcctgaacagcctgggcctgaccatcagcgtgagccccagcgacagcttcagcgtgctgaacatccccatggccaagagctacgtgctgaagaacggcgagagcctgagcatggactacatcagaaccaaggacaacgaccacttcaacgccatgaccagcctgagcagcaagctgttcttcatcctgctgacccccgtgaaccacagcaccgccgacaagatccccctgaccaaggtgggcagaagactgtacaccgtgagacacagagagagcggcgtggagagaagcatcgtgtgccagatcgacaccgtggagggcagcaagaaggtgaccatcagaagccccgtgcagatcagaaaccacttcagcgtgcccctgagcgtgtacgagggcgacaccctgctgggcaccgccagccccgagaacgagttcaacatccccctgggcagctacagaagcttcatcttcctgaagcccgaggacgagaactaccagatgtgcgagggcatcgacttcgaggagatcatcaagaacgacggcgccctgctgaagaagaagtgcagaagcaagaaccccagcaaggagagcttcctgatcaacatcgtgcccgagaaggacaacctgaccagcctgagcgtgtacagcgaggacggctgggacctgccctacatcatgcacctgtggccccccatcctgctgagaaacctgctgccctacaagatcgcctactacatcgagggcatcgagaacagcgtgttcaccctgagcgagggccacagcgcccagatctgcaccgcccagctgggcaaggccagactgcacctgaagctgctggactacctgaaccacgactggaagagcgagtaccacatcaagcccaaccagcaggacatcagcttcgtgagcttcacctgcgtgaccgagatggagaagaccgacctggacatcgccgtgcacatgacctacaacaccggccagaccgtggtggccttccacagcccctactggatggtgaacaagaccggcagaatgctgcagtacaaggccgacggcatccacagaaagcacccccccaactacaagaagcccgtgctgttcagcttccagcccaaccacttcttcaacaacaacaaggtgcagctgatggtgaccgacagcgagctgagcaaccagttcagcatcgacaccgtgggcagccacggcgccgtgaagtgcaagggcctgaagatggactaccaggtgggcgtgaccatcgacctgagcagcttcaacatcaccagaatcgtgaccttcacccccttctacatgatcaagaacaagagcaagtaccacatcagcgtggccgaggagggcaacgacaagtggctgagcctggacctggagcagtgcatccccttctggcccgagtacgccagcagcaagctgctgatccaggtggagagaagcgaggacccccccaagagaatctacttcaacaagcaggagaactgcatcctgctgagactggacaacgagctgggcggcatcatcgccgaggtgaacctggccgagcacagcaccgtgatcaccttcctggactaccacgacggcgccgccaccttcctgctgatcaaccacaccaagaacgagctggtgcagtacaaccagagcagcctgagcgagatcgaggacagcctgccccccggcaaggccgtgttctacacctgggccgaccccgtgggcagcagaagactgaagtggagatgcagaaagagccacggcgaggtgacccagaaggacgacatgatgatgcccatcgacctgggcgagaagaccatctacctggtgagcttcttcgagggcctgcagagaatcatcctgttcaccgaggaccccagagtgttcaaggtgacctacgagagcgagaaggccgagctggccgagcaggagatcgccgtggccctgcaggacgtgggcatcagcctggtgaacaactacaccaagcaggaggtggcctacatcggcatcaccagcagcgacgtggtgtgggagaccaagcccaagaagaaggccagatggaagcccatgagcgtgaagcacaccgagaagctggagagagagttcaaggagtacaccgagagcagccccagcgaggacaaggtgatccagctggacaccaacgtgcccgtgagactgacccccaccggccacaacatgaagatcctgcagccccacgtgatcgccctgagaagaaactacctgcccgccctgaaggtggagtacaacaccagcgcccaccagagcagcttcagaatccagatctacagaatccagatccagaaccagatccacggcgccgtgttccccttcgtgttctaccccgtgaagccccccaagagcgtgaccatggacagcgcccccaagcccttcaccgacgtgagcatcgtgatgagaagcgccggccacagccagatcagcagaatcaagtacttcaaggtgctgatccaggagatggacctgagactggacctgggcttcatctacgccctgaccgacctgatgaccgaggccgaggtgaccgagaacaccgaggtggagctgttccacaaggacatcgaggccttcaaggaggagtacaagaccgccagcctggtggaccagagccaggtgagcctgtacgagtacttccacatcagccccatcaagctgcacctgagcgtgagcctgagcagcggcagagaggaggccaaggacagcaagcagaacggcggcctgatccccgtgcacagcctgaacctgctgctgaagagcatcggcgccaccctgaccgacgtgcaggacgtggtgttcaagctggccttcttcgagctgaactaccagttccacaccaccagcgacctgcagagcgaggtgatcagacactacagcaagcaggccatcaagcagatgtacgtgctgatcctgggcctggacgtgctgggcaaccccttcggcctgatcagagagttcagcgagggcgtggaggccttcttctacgagccctaccagggcgccatccagggccccgaggagttcgtggagggcatggccctgggcctgaaggccctggtgggcggcgccgtgggcggcctggccggcgccgccagcaagatcaccggcgccatggccaagggcgtggccgccatgaccatggacgaggactaccagcagaagagaagagaggccatgaacaagcagcccgccggcttcagagagggcatcaccagaggcggcaagggcctggtgagcggcttcgtgagcggcatcaccggcatcgtgaccaagcccatcaagggcgcccagaagggcggcgccgccggcttcttcaagggcgtgggcaagggcctggtgggcgccgtggccagacccaccggcggcatcatcgacatggccagcagcaccttccagggcatcaagagagccaccgagaccagcgaggtggagagcctgagaccccccagattcttcaacgaggacggcgtgatcagaccctacagactgagagacggcaccggcaaccagatgctgcaggtgatggagaacggcagattcgccaagtacaagtacttcacccacgtgatgatcaacaagaccgacatgctgatgatcaccagaagaggcgtgctgttcgtgaccaagggcaccttcggccagctgacctgcgagtggcagtacagcttcgacgagttcaccaaggagcccttcatcgtgcacggcagaagactgagaatcgaggccaaggagagagtgaagagcgtgttccacgccagagagttcggcaagatcatcaacttcaagacccccgaggacgccagatggatcctgaccaagctgcaggaggccagagagcccagccccagcctgtag

SEQ ID NO: 13421 - DNA, 1317 bp, synthetic construct
  misc_feature 1..1317: note = Description of Artificial Sequence: Synthetic coding sequence
  source 1..1317: mol_type = other DNA
atgaacgaggtgagcgtgatcaaggagggctggctgcacaagagaggcgagtacatcaagacctggagacccagatacttcctgctgaagagcgacggcagcttcatcggctacaaggagagacccgaggcccccgaccagaccctgccccccctgaacaacttcagcgtggccgagtgccagctgatgaagaccgagagacccagacccaacaccttcgtgatcagatgcctgcagtggaccaccgtgatcgagagaaccttccacgtggacagccccgacgagagagaggagtggatgagagccatccagatggtggccaacagcctgaagcagagagcccccggcgaggaccccatggactacaagtgcggcagccccagcgacagcagcaccaccgaggagatggaggtggccgtgagcaaggccagagccaaggtgaccatgaacgacttcgactacctgaagctgctgggcaagggcaccttcggcaaggtgatcctggtgagagagaaggccaccggcagatactacgccatgaagatcctgagaaaggaggtgatcatcgccaaggacgaggtggcccacaccgtgaccgagagcagagtgctgcagaacaccagacaccccttcctgaccgccctgaagtacgccttccagacccacgacagactgtgcttcgtgatggagtacgccaacggcggcgagctgttcttccacctgagcagagagagagtgttcaccgaggagagagccagattctacggcgccgagatcgtgagcgccctggagtacctgcacagcagagacgtggtgtacagagacatcaaggtgctggaggacaacgactacggcagagccgtggactggtggggcctgggcgtggtgatgtacgagatgatgtgcggcagactgcccttctacaaccaggaccacgagagactgttcgagctgatcctgatggaggagatcagattccccagaaccctgagccccgaggccaagagcctgctggccggcctgctgaagaaggaccccaagcagagactgggcggcggccccagcgacgccaaggaggtgatggagcacagattcttcctgagcatcaactggcaggacgtggtgcagaagaagctgctgccccccttcaagccccaggtgaccagcgaggtggacaccagatacttcgacgacgagttcaccgcccagagcatcaccatcaccccccccgacagatacgacagcctgggcctgctggagctggaccagagaacccacttcccccagttcagctacagcgccagcatcagagagtag

SEQ ID NO: 13422 - DNA, 444 bp, synthetic construct
  misc_feature 1..444: note = Description of Artificial Sequence: Synthetic coding sequence
  source 1..444: mol_type = other DNA
atgagatgcctgagcagcaagaaggccggcagcaccagcgtggtgaagtacatcaagacctggagacccagatacttcctgctgaagagcgacggcagcttcatcggctacaaggagagacccgaggcccccgaccagaccctgccccccctgaacaacttcagcgtggccgagtgccagctgatgaagaccgagagacccagacccaacaccttcgtgatcagatgcctgcagtggaccaccgtgatcgagagaaccttccacgtggacagccccgacgagagagaggagtggatgagagccatccagatggtggccaacagcctgcagccccacctgtgcgcccagaccagaatctggaagacccccccccccgcccaggcctgggccgtgggcagactggagatccaggtgctgatccacaccagccccagcgagggctag

SEQ ID NO: 13423 - DNA, 1149 bp, synthetic construct
  misc_feature 1..1149: note = Description of Artificial Sequence: Synthetic coding sequence
  source 1..1149: mol_type = other DNA
atgagagccatccagatggtggccaacagcctgaagcagagagcccccggcgaggaccccatggactacaagtgcggcagccccagcgacagcagcaccaccgaggagatggaggtggccgtgagcaaggccagagccaaggtgaccatgaacgacttcgactacctgaagctgctgggcaagggcaccttcggcaaggtgatcctggtgagagagaaggccaccggcagatactacgccatgaagatcctgagaaaggaggtgatcatcgccaaggacgaggtggcccacaccgtgaccgagagcagagtgctgcagaacaccagacaccccttcctgaccgccctgaagtacgccttccagacccacgacagactgtgcttcgtgatggagtacgccaacggcggcgagctgttcttccacctgagcagagagagagtgttcaccgaggagagagccagattctacggcgccgagatcgtgagcgccctggagtacctgcacagcagagacgtggtgtacagagacatcaagctggagaacctgatgctggacaaggacggccacatcaagatcaccgacttcggcctgtgcaaggagggcatcagcgacggcgccaccatgaagaccttctgcggcacccccgagtacctggcccccgaggtgctggaggacaacgactacggcagagccgtggactggtggggcctgggcgtggtgatgtacgagatgatgtgcggcagactgcccttctacaaccaggaccacgagagactgttcgagctgatcctgatggaggagatcagattccccagaaccctgagccccgaggccaagagcctgctggccggcctgctgaagaaggaccccaagcagagactgggcggcggccccagcgacgccaaggaggtgatggagcacagattcttcctgagcatcaactggcaggacgtggtgcagaagaagctgctgccccccttcaagccccaggtgaccagcgaggtggacaccagatacttcgacgacgagttcaccgcccagagcatcaccatcaccccccccgacagatacgacagcctgggcctgctggagctggaccagagaacccacttcccccagttcagctacagcgccagcatcagagagtag

SEQ ID NO: 13424 - DNA, 402 bp, synthetic construct
  misc_feature 1..402: note = Description of Artificial Sequence: Synthetic coding sequence
  source 1..402: mol_type = other DNA
atgaacgaggtgagcgtgatcaaggagggctggctgcacaagagaggcgagtacatcaagacctggagacccagatacttcctgctgaagagcgacggcagcttcatcggctacaaggagagacccgaggcccccgaccagaccctgccccccctgaacaacttcagcgtggccgagtgccagctgatgaagaccgagagacccagacccaacaccttcgtgatcagatgcctgcagtggaccaccgtgatcgagagaaccttccacgtggacagccccgacgagagagaggagtggatgagagccatccagatggtggccaacagcctgaagcagagagcccccggcgaggaccccatggactacaagtgcggcagccccagcgacagcagcaccacctag

SEQ ID NO: 13425 - DNA, 1446 bp, synthetic construct
  misc_feature 1..1446: note = Description of Artificial Sequence: Synthetic coding sequence
  source 1..1446: mol_type = other DNA
atgaacgaggtgagcgtgatcaaggagggctggctgcacaagagaggcgagtacatcaagacctggagacccagatacttcctgctgaagagcgacggcagcttcatcggctacaaggagagacccgaggcccccgaccagaccctgccccccctgaacaacttcagcgtggccgagtgccagctgatgaagaccgagagacccagacccaacaccttcgtgatcagatgcctgcagtggaccaccgtgatcgagagaaccttccacgtggacagccccgacgagagagaggagtggatgagagccatccagatggtggccaacagcctgaagcagagagcccccggcgaggaccccatggactacaagtgcggcagccccagcgacagcagcaccaccgaggagatggaggtggccgtgagcaaggccagagccaaggtgaccatgaacgacttcgactacctgaagctgctgggcaagggcaccttcggcaaggtgatcctggtgagagagaaggccaccggcagatactacgccatgaagatcctgagaaaggaggtgatcatcgccaaggacgaggtggcccacaccgtgaccgagagcagagtgctgcagaacaccagacaccccttcctgaccgccctgaagtacgccttccagacccacgacagactgtgcttcgtgatggagtacgccaacggcggcgagctgttcttccacctgagcagagagagagtgttcaccgaggagagagccagattctacggcgccgagatcgtgagcgccctggagtacctgcacagcagagacgtggtgtacagagacatcaagctggagaacctgatgctggacaaggacggccacatcaagatcaccgacttcggcctgtgcaaggagggcatcagcgacggcgccaccatgaagaccttctgcggcacccccgagtacctggcccccgaggtgctggaggacaacgactacggcagagccgtggactggtggggcctgggcgtggtgatgtacgagatgatgtgcggcagactgcccttctacaaccaggaccacgagagactgttcgagctgatcctgatggaggagatcagattccccagaaccctgagccccgaggccaagagcctgctggccggcctgctgaagaaggaccccaagcagagactgggcggcggccccagcgacgccaaggaggtgatggagcacagattcttcctgagcatcaactggcaggacgtggtgcagaagaagctgctgccccccttcaagccccaggtgaccagcgaggtggacaccagatacttcgacgacgagttcaccgcccagagcatcaccatcaccccccccgacagatacgacagcctgggcctgctggagctggaccagagaacccacttcccccagttcagctacagcgccagcatcagagagtag

SEQ ID NO: 13426 - DNA, 402 bp, synthetic construct; identical to SEQ ID NO: 13424
  misc_feature 1..402: note = Description of Artificial Sequence: Synthetic coding sequence
  source 1..402: mol_type = other DNA

SEQ ID NO: 13427 - DNA, 291 bp, synthetic construct
  misc_feature 1..291: note = Description of Artificial Sequence: Synthetic coding sequence
  source 1..291: mol_type = other DNA
atgaacgaggtgagcgtgatcaaggagggctggctgcacaagagaggcgagtacatcaagacctggagacccagatacttcctgctgaagagcgacggcagcttcatcggctacaaggagagacccgaggcccccgaccagaccctgccccccctgaacaacttcagcgtggccgagtgccagctgatgaagaccgagagacccagacccaacaccttcgtgatcagatgcctgcagtggaccaccgtgatcgagagaaccttccacgtggacagccccgacgagagatag

SEQ ID NO: 13428 - DNA, 360 bp, synthetic construct
  misc_feature 1..360: note = Description of Artificial Sequence: Synthetic coding sequence
  source 1..360: mol_type = other DNA
atgaacgaggtgagcgtgatcaaggagggctggctgcacaagagaggcgagtacatcaagacctggagacccagatacttcctgctgaagagcgacggcagcttcatcggctacaaggagagacccgaggcccccgaccagaccctgccccccctgaacaacttcagcgtggccgagtgccagctgatgaagaccgagagacccagacccaacaccttcgtgatcagatgcctgcagtggaccaccgtgatcgagagaaccttccacgtggacagccccgacgagagagaggagtggatgagagccatccagatggtggccaacagcctgaagcagagagcccccggcgaggacccctag

SEQ ID NO: 13429 - DNA, 1446 bp, synthetic construct; identical to SEQ ID NO: 13425
  misc_feature 1..1446: note = Description of Artificial Sequence: Synthetic coding sequence
  source 1..1446: mol_type = other DNA

SEQ ID NO: 13430 - DNA, 204 bp, synthetic construct
  misc_feature 1..204: note = Description of Artificial Sequence: Synthetic coding sequence
  source 1..204: mol_type = other DNA
atgaacgaggtgagcgtgatcaaggagggctggctgcacaagagaggcgagtacatcaagacctggagacccagatacttcctgctgaagagcgacggcagcttcatcggctacaaggagagacccgaggcccccgaccagaccctgccccccctgaacaacttcagcgtggccgagtgccagctgatgaagaccgagagatag

SEQ ID NO: 13431 - DNA, 144 bp, synthetic construct
  misc_feature 1..144: note = Description of Artificial Sequence: Synthetic coding sequence
  source 1..144: mol_type = other DNA
atgaacgaggtgagcgtgatcaaggagggctggctgcacaagagaggcgagtacatcaagacctggagacccagatacttcctgctgaagagcgacggcagcttcatcggctacaaggagagacccgaggcccccgaccagtag

SEQ ID NO: 13432 - DNA, 405 bp, synthetic construct
  misc_feature 1..405: note = Description of Artificial Sequence: Synthetic coding sequence
  source 1..405: mol_type = other DNA
atgaacgaggtgagcgtgatcaaggagggctggctgcacaagagaggcgagtacatcaagacctggagacccagatacttcctgctgaagagcgacggcagcttcatcggctacaaggagagacccgaggcccccgaccagaccctgccccccctgaacaacttcagcgtggccgagtgccagctgatgaagaccgagagacccagacccaacaccttcgtgatcagatgcctgcagtggaccaccgtgatcgagagaaccttccacgtggacagccccgacgagagagaggagtggatgagagccatccagatggtggccaacagcctgaagcagagagcccccggcgaggaccccatggactacaagtgcggcagccccagcgacagcagcaccaccgagtag

SEQ ID NO: 13433 - DNA, 324 bp, synthetic construct
  misc_feature 1..324: note = Description of Artificial Sequence: Synthetic coding sequence
  source 1..324: mol_type = other DNA
atgaacgaggtgagcgtgatcaaggagggctggctgcacaagagaggcgagtacatcaagacctggagacccagatacttcctgctgaagagcgacggcagcttcatcggctacaaggagagacccgaggcccccgaccagaccctgccccccctgaacaacttcagcgtggccgagtgccagctgatgaagaccgagagacccagacccaacaccttcgtgatcagatgcctgcagtggaccaccgtgatcgagagaaccttccacgtggacagccccgacgagagagaggagtggatgagagccatccagatggtggcctag

SEQ ID NO: 13434 - DNA, 867 bp, synthetic construct
  misc_feature 1..867: note = Description of Artificial Sequence: Synthetic coding sequence
  source 1..867: mol_type = other DNA
atgaacgaggtgagcgtgatcaaggagggctggctgcacaagagaggcgagtacatcaagacctggagacccagatacttcctgctgaagagcgacggcagcttcatcggctacaaggagagacccgaggcccccgaccagaccctgccccccctgaacaacttcagcgtggccgagtgccagctgatgaagaccgagagacccagacccaacaccttcgtgatcagatgcctgcagtggaccaccgtgatcgagagaaccttccacgtggacagccccgacgagagagaggagtggatgagagccatccagatggtggccaacagcctgaagcagagagcccccggcgaggaccccatggactacaagtgcggcagccccagcgacagcagcaccaccgaggagatggaggtggccgtgagcaaggccagagccaaggtgaccatgaacgacttcgactacctgaagctgctgggcaagggcaccttcggcaaggtgatcctggtgagagagaaggccaccggcagatactacgccatgaagatcctgagaaaggaggtgatcatcgccaaggacgaggtggcccacaccgtgaccgagagcagagtgctgcagaacaccagacaccccttcctgaccgtgagctgcccccccctgcccagacagtgcgaggccagcctgtggaccgagctgagagagagagccctgatcttctggtacaaggcccagagctggggcagacccggcggccagggcaaggtgctgctgagacccgccaagagcagcgagcccagacacgtggtgggcgtgagcagactgggcgagtgggagggcgacagcttcttcatcgacggcggcttcatgtag

SEQ ID NO: 13435 - DNA, 1440 bp, synthetic construct
  misc_feature 1..1440: note = Description of Artificial Sequence: Synthetic coding sequence
  source 1..1440: mol_type = other DNA
atgagcgacgtgaccatcgtgaaggagggctgggtgcagaagagaggcgagtacatcaagaactggagacccagatacttcctgctgaagaccgacggcagcttcatcggctacaaggagaagccccaggacgtggacctgccctaccccctgaacaacttcagcgtggccaagtgccagctgatgaagaccgagagacccaagcccaacaccttcatcatcagatgcctgcagtggaccaccgtgatcgagagaaccttccacgtggacacccccgaggagagagaggagtggaccgaggccatccaggccgtggccgacagactgcagagacaggaggaggagagaatgaactgcagccccaccagccagatcgacaacatcggcgaggaggagatggacgccagcaccacccaccacaagagaaagaccatgaacgacttcgactacctgaagctgctgggcaagggcaccttcggcaaggtgatcctggtgagagagaaggccagcggcaagtactacgccatgaagatcctgaagaaggaggtgatcatcgccaaggacgaggtggcccacaccctgaccgagagcagagtgctgaagaacaccagacaccccttcctgaccagcctgaagtacagcttccagaccaaggacagactgtgcttcgtgatggagtacgtgaacggcggcgagctgttcttccacctgagcagagagagagtgttcagcgaggacagaaccagattctacggcgccgagatcgtgagcgccctggactacctgcacagcggcaagatcgtgtacagagacctgaagctggagaacctgatgctggacaaggacggccacatcaagatcaccgacttcggcctgtgcaaggagggcatcaccgacgccgccaccatgaagaccttctgcggcacccccgagtacctggcccccgaggtgctggaggacaacgactacggcagagccgtggactggtggggcctgggcgtggtgatgtacgagatgatgtgcggcagactgcccttctacaaccaggaccacgagaagctgttcgagctgatcctgatggaggacatcaagttccccagaaccctgagcagcgacgccaagagcctgctgagcggcctgctgatcaaggaccccaacaagagactgggcggcggccccgacgacgccaaggagatcatgagacacagcttcttcagcggcgtgaactggcaggacgtgtacgacaagaagctggtgccccccttcaagccccaggtgaccagcgagaccgacaccagatacttcgacgaggagttcaccgcccagaccatcaccatcaccccccccgagaagtacgacgaggacggcatggactgcatggacaacgagagaagaccccacttcccccagttcagctacagcgccagcggcagagagtag

SEQ ID NO: 13436 - DNA, 1398 bp, synthetic construct
  misc_feature 1..1398: note = Description of Artificial Sequence: Synthetic coding sequence
  source 1..1398: mol_type = other DNA
atgagcgacgtgaccatcgtgaaggagggctgggtgcagaagagaggcgagtacatcaagaactggagacccagatacttcctgctgaagaccgacggcagcttcatcggctacaaggagaagccccaggacgtggacctgccctaccccctgaacaacttcagcgtggccaagtgccagctgatgaagaccgagagacccaagcccaacaccttcatcatcagatgcctgcagtggaccaccgtgatcgagagaaccttccacgtggacacccccgaggagagagaggagtggaccgaggccatccaggccgtggccgacagactgcagagacaggaggaggagagaatgaactgcagccccaccagccagatcgacaacatcggcgaggaggagatggacgccagcaccacccaccacaagagaaagaccatgaacgacttcgactacctgaagctgctgggcaagggcaccttcggcaaggtgatcctggtgagagagaaggccagcggcaagtactacgccatgaagatcctgaagaaggaggtgatcatcgccaaggacgaggtggcccacaccctgaccgagagcagagtgctgaagaacaccagacaccccttcctgaccagcctgaagtacagcttccagaccaaggacagactgtgcttcgtgatggagtacgtgaacggcggcgagctgttcttccacctgagcagagagagagtgttcagcgaggacagaaccagattctacggcgccgagatcgtgagcgccctggactacctgcacagcggcaagatcgtgtacagagacctgaagctggagaacctgatgctggacaaggacggccacatcaagatcaccgacttcggcctgtgcaaggagggcatcaccgacgccgccaccatgaagaccttctgcggcacccccgagtacctggcccccgaggtgctggaggacaacgactacggcagagccgtggactggtggggcctgggcgtggtgatgtacgagatgatgtgcggcagactgcccttctacaaccaggaccacgagaagctgttcgagctgatcctgatggaggacatcaagttccccagaaccctgagcagcgacgccaagagcctgctgagcggcctgctgatcaaggaccccaacaagagactgggcggcggccccgacgacgccaaggagatcatgagacacagcttcttcagcggcgtgaactggcaggacgtgtacgacaagaagctggtgccccccttcaagccccaggtgaccagcgagaccgacaccagatacttcgacgaggagttcaccgcccagaccatcaccatcaccccccccgagaagtgccagcagagcgactgcggcatgctgggcaactggaagaagtag

SEQ ID NO: 13437 - DNA, 1440 bp, synthetic construct; identical to SEQ ID NO: 13435
  misc_feature 1..1440: note = Description of Artificial Sequence: Synthetic coding sequence
  source 1..1440: mol_type = other DNA

SEQ ID NO: 13438 - DNA, 1398 bp, synthetic construct; identical to SEQ ID NO: 13436
  misc_feature 1..1398: note = Description of Artificial Sequence: Synthetic coding sequence
  source 1..1398: mol_type = other DNA

SEQ ID NO: 13439 - DNA, 420 bp, synthetic construct
  misc_feature 1..420: note = Description of Artificial Sequence: Synthetic coding sequence
  source 1..420: mol_type = other DNA
atgagcgacgtgaccatcgtgaaggagggctgggtgcagaagagaggcgagtacatcaagaactggagacccagatacttcctgctgaagaccgacggcagcttcatcggctacaaggagaagccccaggacgtggacctgccctaccccctgaacaacttcagcgtggccaagtgccagctgatgaagaccgagagacccaagcccaacaccttcatcatcagatgcctgcagtggaccaccgtgatcgagagaaccttccacgtggacacccccgaggagagagaggagtggaccgaggccatccaggccgtggccgacagactgcagagacaggaggaggagagaatgaactgcagccccaccagccagatcgacaacatcggcgaggaggagatggacgccagcaccacccactag

SEQ ID NO: 13440 - DNA, 624 bp, synthetic construct
  misc_feature 1..624: note = Description of Artificial Sequence: Synthetic coding sequence
  source 1..624: mol_type = other DNA
atgagccccctgctgagaagactgctgctggccgccctgctgcagctggcccccgcccaggcccccgtgagccagcccgacgcccccggccaccagagaaaggtggtgagctggatcgacgtgtacaccagagccacctgccagcccagagaggtggtggtgcccctgaccgtggagctgatgggcaccgtggccaagcagctggtgcccagctgcgtgaccgtgcagagatgcggcggctgctgccccgacgacggcctggagtgcgtgcccaccggccagcaccaggtgagaatgcagatcctgatgatcagataccccagcagccagctgggcgagatgagcctggaggagcacagccagtgcgagtgcagacccaagaagaaggacagcgccgtgaagcccgacagagccgccaccccccaccacagaccccagcccagaagcgtgcccggctgggacagcgcccccggcgcccccagccccgccgacatcacccaccccacccccgcccccggccccagcgcccacgccgcccccagcaccaccagcgccctgacccccggccccgccgccgccgccgccgacgccgccgccagcagcgtggccaagggcggcgcctag

SEQ ID NO: 13441 - DNA, 567 bp, synthetic construct
  misc_feature 1..567: note = Description of Artificial Sequence: Synthetic coding sequence
  source 1..567: mol_type = other DNA
atgagccccctgctgagaagactgctgctggccgccctgctgcagctggcccccgcccaggcccccgtgagccagcccgacgcccccggccaccagagaaaggtggtgagctggatcgacgtgtacaccagagccacctgccagcccagagaggtggtggtgcccctgaccgtggagctgatgggcaccgtggccaagcagctggtgcccagctgcgtgaccgtgcagagatgcggcggctgctgccccgacgacggcctggagtgcgtgcccaccggccagcaccaggtgagaatgcagatcctgatgatcagataccccagcagccagctgggcgagatgagcctggaggagcacagccagtgcgagtgcagacccaagaagaaggacagcgccgtgaagcccgacagccccagacccctgtgccccagatgcacccagcaccaccagagacccgaccccagaacctgcagatgcagatgcagaagaagaagcttcctgagatgccagggcagaggcctggagctgaaccccgacacctgcagatgcagaaagctgagaagatag

SEQ ID NO: 13442 - DNA, 1143 bp, synthetic construct
  misc_feature 1..1143: note = Description of Artificial Sequence: Synthetic coding sequence
  source 1..1143: mol_type = other DNA
atgagcgagaccgtgatctgcagcagcagagccaccgtgatgctgtacgacgacggcaacaagagatggctgcccgccggcaccggcccccaggccttcagcagagtgcagatctaccacaaccccaccgccaacagcttcagagtggtgggcagaaagatgcagcccgaccagcaggtggtgatcaactgcgccatcgtgagaggcgtgaagtacaaccaggccacccccaacttccaccagtggagagacgccagacaggtgtggggcctgaacttcggcagcaaggaggacgccgcccagttcgccgccggcatggccagcgccctggaggccctggagggcggcggccccccccccccccccgccctgcccacctggagcgtgcccaacggccccagccccgaggaggtggagcagcagaagagacagcagcccggccccagcgagcacatcgagagaagagtgagcaacgccggcggcccccccgccccccccgccggcggccccccccccccccccggccccccccccccccccggccccccccccccccccggcctgccccccagcggcgtgcccgccgccgcccacggcgccggcggcggccccccccccgccccccccctgcccgccgcccagggccccggcggcggcggcgccggcgcccccggcctggccgccgccatcgccggcgccaagctgagaaaggtgagcaagcaggaggaggccagcggcggccccaccgcccccaaggccgagagcggcagaagcggcggcggcggcctgatggaggagatgaacgccatgctggccagaagaagaaaggccacccaggtgggcgagaagacccccaaggacgagagcgccaaccaggaggagcccgaggccagagtgcccgcccagagcgagagcgtgagaagaccctgggagaagaacagcaccaccctgcccagaatgaagagcagcagcagcgtgaccaccagcgagacccagccctgcacccccagcagcagcgactacagcgacctgcagagagtgaagcaggagctgctggaggaggtgaagaaggagctgcagaaggtgaaggaggagatcatcgaggccttcgtgcaggagctgagaaagagaggcagcccctag

SEQ ID NO: 13443 - DNA, 915 bp, synthetic construct
  misc_feature 1..915: note = Description of Artificial Sequence: Synthetic coding sequence
  source 1..915: mol_type = other DNA
atggccggcaacttcgacagcgaggagagaagcagctggtactggggcagactgagcagacaggaggccgtggccctgctgcagggccagagacacggcgtgttcctggtgagagacagcagcaccagccccggcgactacgtgctgagcgtgagcgagaacagcagagtgagccactacatcatcaacagcagcggccccagaccccccgtgccccccagccccgcccagcccccccccggcgtgagccccagcagactgagaatcggcgaccaggagttcgacagcctgcccgccctgctggagttctacaagatccactacctggacaccaccaccctgatcgagcccgtgagcagaagcagacagggcagcggcgtgatcctgagacaggaggaggccgagtacgtgagagccctgttcgacttcaacggcaacgacgaggaggacctgcccttcaagaagggcgacatcctgagaatcagagacaagcccgaggagcagtggtggaacgccgaggacagcgagggcaagagaggcatgatccccgtgccctacgtggagaagtacagacccgccagcgccagcgtgagcgccctgatcggcggcaaccaggagggcagccacccccagcccctgggcggccccgagcccggcccctacgcccagcccagcgtgaacacccccctgcccaacctgcagaacggccccatctacgccagagtgatccagaagagagtgcccaacgcctacgacaagaccgccctggccctggaggtgggcgagctggtgaaggtgaccaagatcaacgtgagcggccagtgggagggcgagtgcaacggcaagagaggccacttccccttcacccacgtgagactgctggaccagcagaaccccgacgaggacttcagctag

SEQ ID NO: 13444 - DNA, 615 bp, synthetic construct
  misc_feature 1..615: note = Description of Artificial Sequence: Synthetic coding sequence
  source 1..615: mol_type = other DNA
atggccggcaacttcgacagcgaggagagaagcagctggtactggggcagactgagcagacaggaggccgtggccctgctgcagggccagagacacggcgtgttcctggtgagagacagcagcaccagccccggcgactacgtgctgagcgtgagcgagaacagcagagtgagccactacatcatcaacagcagcggccccagaccccccgtgccccccagccccgcccagcccccccccggcgtgagccccagcagactgagaatcggcgaccaggagttcgacagcctgcccgccctgctggagttctacaagatccactacctggacaccaccaccctgatcgagcccgtgagcagaagcagacagggcagcggcgtgatcctgagacaggaggaggccgagtacgtgagagccctgttcgacttcaacggcaacgacgaggaggacctgcccttcaagaagggcgacatcctgagaatcagagacaagcccgaggagcagtggtggaacgccgaggacagcgagggcaagagaggcatgatccccgtgccctacgtggagaagtacagacccgccagcgccagcgtgagcgccctgatcggcggcagatag

SEQ ID NO: 13445 - DNA, 2196 bp, synthetic construct
  misc_feature 1..2196: note = Description of Artificial Sequence: Synthetic coding sequence
  source 1..2196: mol_type = other DNA
tgaaagcccgccaccggcctgtgggtgtgggtgagcctgctggtggccgccggcaccgtgcagcccagcgacagccagagcgtgtgcgccggcaccgagaacaagctgagcagcctgagcgacctggagcagcagtacagagccctgagaaagtactacgagaactgcgaggtggtgatgggcaacctggagatcaccagcatcgagcacaacagagacctgagcttcctgagaagcgtgagagaggtgaccggctacgtgctggtggccctgaaccagttcagatacctgcccctggagaacctgagaatcatcagaggcaccaagctgtacgaggacagatacgccctggccatcttcctgaactacagaaaggacggcaacttcggcctgcaggagctgggcctgaagaacctgaccgagatcctgaacggcggcgtgtacgtggaccagaacaagttcctgtgctacgccgacaccatccactggcaggacatcgtgagaaacccctggcccagcaacctgaccctggtgagcaccaacggcagcagcggctgcggcagatgccacaagagctgcaccggcagatgctggggccccaccgagaaccactgccagaccctgaccagaaccgtgtgcgccgagcagtgcgacggcagatgctacggcccctacgtgagcgactgctgccacagagagtgcgccggcggctgcagcggccccaaggacaccgactgcttcgcctgcatgaacttcaacgacagcggcgcctgcgtgacccagtgcccccagaccttcgtgtacaaccccaccaccttccagctggagcacaacttcaacgccaagtacacctacggcgccttctgcgtgaagaagtgcccccacaacttcgtggtggacagcagcagctgcgtgagagcctgccccagcagcaagatggaggtggaggagaacggcatcaagatgtgcaagccctgcaccgacatctgccccaaggcctgcgacggcatcggcaccggcagcctgatgagcgcccagaccgtggacagcagcaacatcgacaagttcatcaactgcaccaagatcaacggcaacctgatcttcctggtgaccggcatccacggcgacccctacaacgccatcgaggccatcgaccccgagaagctgaacgtgttcagaaccgtgagagagatcaccggcttcctgaacatccagagctggccccccaacatgaccgacttcagcgtgttcagcaacctggtgaccatcggcggcagagtgctgtacagcggcctgagcctgctgatcctgaagcagcagggcatcaccagcctgcagttccagagcctgaaggagatcagcgccggcaacatctacatcaccgacaacagcaacctgtgctactaccacaccatcaactggaccaccctgttcagcaccatcaaccagagaatcgtgatcagagacaacagaaaggccgagaactgcaccgccgagggcatggtgtgcaaccacctgtgcagcagcgacggctgctggggccccggccccgaccagtgcctgagctgcagaagattcagcagaggcagaatctgcatcgagagctgcaacctgtacgacggcgagttcagagagttcgagaacggcagcatctgcgtggagtgcgacccccagtgcgagaagatggaggacggcctgctgacctgccacggccccggccccgacaactgcaccaagtgcagccacttcaaggacggccccaactgcgtggagaagtgccccgacggcctgcagggcgccaacagcttcatcttcaagtacgccgaccccgacagagagtgccacccctgccaccccaactgcacccagggctgcatcggcagcagcatcgaggactgcatcggcctgatggacagaacccccctgatcgccgccggcgtgatcggcggcctgttcatcctggtgatcgtgggcctgaccttcgccgtgtacgtgagaagaaagagcatcaagaagaagagagccctgagaagattcctggagaccgagctggtggagcccctgacccccagcggcaccgcccccaaccaggcccagctgagaatcctgaaggagaccgagctgaagagagtgaaggtgctgggcagcggcgccttcggcaccgtgtacaagggcatctgggtgcccgagggctag

SEQ ID NO: 13446 - DNA, 3927 bp, synthetic construct
  misc_feature 1..3927: note = Description of Artificial Sequence: Synthetic coding sequence
  source 1..3927: mol_type = other DNA
atgaagcccgccaccggcctgtgggtgtgggtgagcctgctggtggccgccggcaccgtgcagcccagcgacagccagagcgtgtgcgccggcaccgagaacaagctgagcagcctgagcgacctggagcagcagtacagagccctgagaaagtactacgagaactgcgaggtggtgatgggcaacctggagatcaccagcatcgagcacaacagagacctgagcttcctgagaagcgtgagagaggtgaccggctacgtgctggtggccctgaaccagttcagatacctgcccctggagaacctgagaatcatcagaggcaccaagctgtacgaggacagatacgccctggccatcttcctgaactacagaaaggacggcaacttcggcctgcaggagctgggcctgaagaacctgaccgagatcctgaacggcggcgtgtacgtggaccagaacaagttcctgtgctacgccgacaccatccactggcaggacatcgtgagaaacccctggcccagcaacctgaccctggtgagcaccaacggcagcagcggctgcggcagatgccacaagagctgcaccggcagatgctggggccccaccgagaaccactgccagaccctgaccagaaccgtgtgcgccgagcagtgcgacggcagatgctacggcccctacgtgagcgactgctgccacagagagtgcgccggcggctgcagcggccccaaggacaccgactgcttcgcctgcatgaacttcaacgacagcggcgcctgcgtgacccagtgcccccagaccttcgtgtacaaccccaccaccttccagctggagcacaacttcaacgccaagtacacctacggcgccttctgcgtgaagaagtgcccccacaacttcgtggtggacagcagcagctgcgtgagagcctgccccagcagcaagatggaggtggaggagaacggcatcaagatgtgcaagccctgcaccgacatctgccccaaggcctgcgacggcatcggcaccggcagcctgatgagcgcccagaccgtggacagcagcaacatcgacaagttcatcaactgcaccaagatcaacggcaacctgatcttcctggtgaccggcatccacggcgacccctacaacgccatcgaggccatcgaccccgagaagctgaacgtgttcagaaccgtgagagagatcaccggcttcctgaacatccagagctggccccccaacatgaccgacttcagcgtgttcagcaacctggtgaccatcggcggcagagtgctgtacagcggcctgagcctgctgatcctgaagcagcagggcatcaccagcctgcagttccagagcctgaaggagatcagcgccggcaacatctacatcaccgacaacagcaacctgtgctactaccacaccatcaactggaccaccctgttcagcaccatcaaccagagaatcgtgatcagagacaacagaaaggccgagaactgcaccgccgagggcatggtgtgcaaccacctgtgcagcagcgacggctgctggggccccggccccgaccagtgcctgagctgcagaagattcagcagaggcagaatctgcatcgagagctgcaacctgtacgacggcgagttcagagagttcgagaacggcagcatctgcgtggagtgcgacccccagtgcgagaagatggaggacggcctgctgacctgccacggccccggccccgacaactgcaccaagtgcagccacttcaaggacggccccaactgcgtggagaagtgccccgacggcctgcagggcgccaacagcttcatcttcaagtacgccgaccccgacagagagtgccacccctgccaccccaactgcacccagggctgcaacggccccaccagccacgactgcatctactacccctggaccggccacagcaccctgccccagcacgccagaacccccctgatcgccgccggcgtgatcggcggcctgttcatcctggtgatcgtgggcctgaccttcgccgtgtacgtgagaagaaagagcatcaagaagaagagagccctgagaagattcctggagaccgagctggtggagcccctgacccccagcggcaccgcccccaaccaggcccagctgagaatcctgaaggagaccgagctgaagagagtgaaggtgctgggcagcggcgccttcggcaccgtgtacaagggcatctgggtgcccgagggcgagaccgtgaagatccccgtggccatcaagatcctgaacgagaccaccggccccaaggccaacgtggagttcatggacgaggccctgatcatggccagcatggaccacccccacctggtgagactgctgggcgtgtgcctgagccccaccatccagctggtgacccagctgatgccccacggctgcctgctggagtacgtgcacgagcacaaggacaacatcggcagccagctgctgctgaactggtgcgtgcagatcgccaagggcatgatgtacctggaggagagaagactggtgcacagagacctggccgccagaaacgtgctggtgaagagccccaaccacgtgaagatcaccgacttcggcctggccagactgctggagggcgacgagaaggagtacaacgccgacggcggcaagatgcccatcaagtggatggccctggagtgcatccactacagaaagttcacccaccagagcgacgtgtggagctacggcgtgaccatctgggagctgatgaccttcggcggcaagccctacgacggcatccccaccagagagatccccgacctgctggagaagggcgagagactgccccagccccccatctgcaccatcgacgtgtacatggtgatggtgaagtgctggatgatcgacgccgacagcagacccaagttcaaggagctggccgccgagttcagcagaatggccagagacccccagagatacctggtgatccagggcgacgacagaatgaagctgcccagccccaacgacagcaagttcttccagaacctgctggacgaggaggacctggaggacatgatggacgccgaggagtacctggtgccccaggccttcaacatccccccccccatctacaccagcagagccagaatcgacagcaacagaagcgagatcggccacagccccccccccgcctacacccccatgagcggcaaccagttcgtgtacagagacggcggcttcgccgccgagcagggcgtgagcgtgccctacagagcccccaccagcaccatccccgaggcccccgtggcccagggcgccaccgccgagatcttcgacgacagctgctgcaacggcaccctgagaaagcccgtggccccccacgtgcaggaggacagcagcacccagagatacagcgccgaccccaccgtgttcgcccccgagagaagccccagaggcgagctggacgaggagggctacatgacccccatgagagacaagcccaagcaggagtacctgaaccccgtggaggagaaccccttcgtgagcagaagaaagaacggcgacctgcaggccctggacaaccccgagtaccacaacgccagcaacggcccccccaaggccgaggacgagtacgtgaacgagcccctgtacctgaacaccttcgccaacaccctgggcaaggccgagtacctgaagaacaacatcctgagcatgcccgagaaggccaagaaggccttcgacaaccccgactactggaaccacagcctgccccccagaagcaccctgcagcaccccgactacctgcaggagtacagcaccaagtacttctacaagcagaacggcagaatcagacccatcgtggccgagaaccccgagtacctgagcgagttcagcctgaagcccggcaccgtgctgcccccccccccctacagacacagaaacaccgtggtgtag

SEQ ID NO: 13447 - DNA, 3897 bp, synthetic construct
  misc_feature 1..3897: note = Description of Artificial Sequence: Synthetic coding sequence
  source 1..3897: mol_type = other DNA
atgaagcccgccaccggcctgtgggtgtgggtgagcctgctggtggccgccggcaccgtgcagcccagcgacagccagagcgtgtgcgccggcaccgagaacaagctgagcagcctgagcgacctggagcagcagtacagagccctgagaaagtactacgagaactgcgaggtggtgatgggcaacctggagatcaccagcatcgagcacaacagagacctgagcttcctgagaagcgtgagagaggtgaccggctacgtgctggtggccctgaaccagttcagatacctgcccctggagaacctgagaatcatcagaggcaccaagctgtacgaggacagatacgccctggccatcttcctgaactacagaaaggacggcaacttcggcctgcaggagctgggcctgaagaacctgaccgagatcctgaacggcggcgtgtacgtggaccagaacaagttcctgtgctacgccgacaccatccactggcaggacatcgtgagaaacccctggcccagcaacctgaccctggtgagcaccaacggcagcagcggctgcggcagatgccacaagagctgcaccggcagatgctggggccccaccgagaaccactgccagaccctgaccagaaccgtgtgcgccgagcagtgcgacggcagatgctacggcccctacgtgagcgactgctgccacagagagtgcgccggcggctgcagcggccccaaggacaccgactgcttcgcctgcatgaacttcaacgacagcggcgcctgcgtgacccagtgcccccagaccttcgtgtacaaccccaccaccttccagctggagcacaacttcaacgccaagtacacctacggcgccttctgcgtgaagaagtgcccccacaacttcgtggtggacagcagcagctgcgtgagagcctgccccagcagcaagatggaggtggaggagaacggcatcaagatgtgcaagccctgcaccgacatctgccccaaggcctgcgacggcatcggcaccggcagcctgatgagcgcccagaccgtggacagcagcaacatcgacaagttcatcaactgcaccaagatcaacggcaacctgatcttcctggtgaccggcatccacggcgacccctacaacgccatcgaggccatcgaccccgagaagctgaacgtgttcagaaccgtgagagagatcaccggcttcctgaacatccagagctggccccccaacatgaccgacttcagcgtgttcagcaacctggtgaccatcggcggcagagtgctgtacagcggcctgagcctgctgatcctgaagcagcagggcatcaccagcctgcagttccagagcctgaaggagatcagcgccggcaacatctacatcaccgacaacagcaacctgtgctactaccacaccatcaactggaccaccctgttcagcaccatcaaccagagaatcgtgatcagagacaacagaaaggccgagaactgcaccgccgagggcatggtgtgcaaccacctgtgcagcagcgacggctgctggggccccggccccgaccagtgcctgagctgcagaagattcagcagaggcagaatctgcatcgagagctgcaacctgtacgacggcgagttcagagagttcgagaacggcagcatctgcgtggagtgcgacccccagtgcgagaagatggaggacggcctgctgacctgccacggccccggccccgacaactgcaccaagtgcagccacttcaaggacggccccaactgcgtggagaagtgccccgacggcctgcagggcgccaacagcttcatcttcaagtacgccgaccccgacagagagtgccacccctgccaccccaactgcacccagggctgcatcggcagcagcatcgaggactgcatcggcctgatggacagaacccccctgatcgccgccggcgtgatcggcggcctgttcatcctggtgatcgtgggcctgaccttcgccgtgtacgtgagaagaaagagcatcaagaagaagagagccctgagaagattcctggagaccgagctggtggagcccctgacccccagcggcaccgcccccaaccaggcccagctgagaatcctgaaggagaccgagctgaagagagtgaaggtgctgggcagcggcgccttcggcaccgtgtacaagggcatctgggtgcccgagggcgagaccgtgaagatccccgtggccatcaagatcctgaacgagaccaccggccccaaggccaacgtggagttcatggacgaggccctgatcatggccagcatggaccacccccacctggtgagactgctgggcgtgtgcctgagccccaccatccagctggtgacccagctgatgccccacggctgcctgctggagtacgtgcacgagcacaaggacaacatcggcagccagctgctgctgaactggtgcgtgcagatcgccaagggcatgatgtacctggaggagagaagactggtgcacagagacctggccgccagaaacgtgctggtgaagagccccaaccacgtgaagatcaccgacttcggcctggccagactgctggagggcgacgagaaggagtacaacgccgacggcggcaagatgcccatcaagtggatggccctggagtgcatccactacagaaagttcacccaccagagcgacgtgtggagctacggcgtgaccatctgggagctgatgaccttcggcggcaagccctacgacggcatccccaccagagagatccccgacctgctggagaagggcgagagactgccccagccccccatctgcaccatcgacgtgtacatggtgatggtgaagtgctggatgatcgacgccgacagcagacccaagttcaaggagctggccgccgagttcagcagaatggccagagacccccagagatacctggtgatccagggcgacgacagaatgaagctgcccagccccaacgacagcaagttcttccagaacctgctggacgaggaggacctggaggacatgatggacgccgaggagtacctggtgccccaggccttcaacatccccccccccatctacaccagcagagccagaatcgacagcaacagaagcgagatcggccacagccccccccccgcctacacccccatgagcggcaaccagttcgtgtacagagacggcggcttcgccgccgagcagggcgtgagcgtgccctacagagcccccaccagcaccatccccgaggcccccgtggcccagggcgccaccgccgagatcttcgacgacagctgctgcaacggcaccctgagaaagcccgtggccccccacgtgcaggaggacagcagcacccagagatacagcgccgaccccaccgtgttcgcccccgagagaagccccagaggcgagctggacgaggagggctacatgacccccatgagagacaagcccaagcaggagtacctgaaccccgtggaggagaaccccttcgtgagcagaagaaagaacggcgacctgcaggccctggacaaccccgagtaccacaacgccagcaacggcccccccaaggccgaggacgagtacgtgaacgagcccctgtacctgaacaccttcgccaacaccctgggcaaggccgagtacctgaagaacaacatcctgagcatgcccgagaaggccaagaaggccttcgacaaccccgactactggaaccacagcctgccccccagaagcaccctgcagcaccccgactacctgcaggagtacagcaccaagtacttctacaagcagaacggcagaatcagacccatcgtggccgagaaccccgagtacctgagcgagttcagcctgaagcccggcaccgtgctgcccccccccccctacagacacagaaacaccgtggtgtag

SEQ ID NO: 13448 - DNA, 387 bp, synthetic construct
  misc_feature 1..387: note = Description of Artificial Sequence: Synthetic coding sequence
  source 1..387: mol_type = other DNA
atgggcaacctggagatcaccagcatcgagcacaacagagacctgagcttcctgagaagcgtgagagaggtgaccggctacgtgctggtggccctgaaccagttcagatacctgcccctggagaacctgagaatcatcagaggcaccaagctgtacgaggacagatacgccctggccatcttcctgaactacagaaaggacggcaacttcggcctgcaggagctgggcctgaagaacctgaccgagatcctgaacggcggcgtgtacgtggaccagaacaagttcctgtgctacgccgacaccatccactggcaggacatcgtgagaaacccctggcccagcaacctgaccctggtgagcaccaacggcagcagcggctgcggctag

SEQ ID NO: 13449 - DNA, 3879 bp, synthetic construct
  misc_feature 1..3879: note = Description of Artificial Sequence: Synthetic coding sequence
  source 1..3879: mol_type = other DNA
atgaagcccgccaccggcctgtgggtgtgggtgagcctgctggtggccgccggcaccgtgcagcccagcgacagccagagcgtgtgcgccggcaccgagaacaagctgagcagcctgagcgacctggagcagcagtacagagccctgagaaagtactacgagaactgcgaggtggtgatgggcaacctggagatcaccagcatcgagcacaacagagacctgagcttcctgagaagcgtgagagaggtgaccggctacgtgctggtggccctgaaccagttcagatacctgcccctggagaacctgagaatcatcagaggcaccaagctgtacgaggacagatacgccctggccatcttcctgaactacagaaaggacggcaacttcggcctgcaggagctgggcctgaagaacctgaccgagatcctgaacggcggcgtgtacgtggaccagaacaagttcctgtgctacgccgacaccatccactggcaggacatcgtgagaaacccctggcccagcaacctgaccctggtgagcaccaacggcagcagcggctgcggcagatgccacaagagctgcaccggcagatgctggggccccaccgagaaccactgccagaccctgaccagaaccgtgtgcgccgagcagtgcgacggcagatgctacggcccctacgtgagcgactgctgccacagagagtgcgccggcggctgcagcggccccaaggacaccgactgcttcgcctgcatgaacttcaacgacagcggcgcctgcgtgacccagtgcccccagaccttcgtgtacaaccccaccaccttccagctggagcacaacttcaacgccaagtacacctacggcgccttctgcgtgaagaagtgcccccacaacttcgtggtggacagcagcagctgcgtgagagcctgccccagcagcaagatggaggtggaggagaacggcatcaagatgtgcaagccctgcaccgacatctgccccaaggcctgcgacggcatcggcaccggcagcctgatgagcgcccagaccgtggacagcagcaacatcgacaagttcatcaactgcaccaagatcaacggcaacctgatcttcctggtgaccggcatccacggcgacccctacaacgccatcgaggccatcgaccccgagaagctgaacgtgttcagaaccgtgagagagatcaccggcttcctgaacatccagagctggccccccaacatgaccgacttcagcgtgttcagcaacctggtgaccatcggcggcagagtgctgtacagcggcctgagcctgctgatcctgaagcagcagggcatcaccagcctgcagttccagagcctgaaggagatcagcgccggcaacatctacatcaccgacaacagcaacctgtgctactaccacaccatcaactggaccaccctgttcagcaccatcaaccagagaatcgtgatcagagacaacagaaaggccgagaactgcaccgccgagggcatggtgtgcaaccacctgtgcagcagcgacggctgctggggccccggccccgaccagtgcctgagctgcagaagattcagcagaggcagaatctgcatcgagagctgcaacctgtacgacggcgagttcagagagttcgagaacggcagcatctgcgtggagtgcgacccccagtgcgagaagatggaggacggcctgctgacctgccacggccccggccccgacaactgcaccaagtgcagccacttcaaggacggccccaactgcgtggagaagtgccccgacggcctgcagggcgccaacagcttcatcttcaagtacgccgaccccgacagagagtgccacccctgccaccccaactgcacccagggctgcaacggccccaccagccacgactgcatctactacccctggaccggccacagcaccctgccccagcacgccagaacccccctgatcgccgccggcgtgatcggcggcctgttcatcctggtgatcgtgggcctgaccttcgccgtgtacgtgagaagaaagagcatcaagaagaagagagccctgagaagattcctggagaccgagctggtggagcccctgacccccagcggcaccgcccccaaccaggcccagctgagaatcctgaaggagaccgagctgaagagagtgaaggtgctgggcagcggcgccttcggcaccgtgtacaagggcatctgggtgcccgagggcgagaccgtgaagatccccgtggccatcaagatcctgaacgagaccaccggccccaaggccaacgtggagttcatggacgaggccctgatcatggccagcatggaccacccccacctggtgagactgctgggcgtgtgcctgagccccaccatccagctggtgacccagctgatgccccacggctgcctgctggagtacgtgcacgagcacaaggacaacatcggcagccagctgctgctgaactggtgcgtgcagatcgccaagggcatgatgtacctggaggagagaagactggtgcacagagacctggccgccagaaacgtgctggtgaagagccccaaccacgtgaagatcaccgacttcggcctggccagactgctggagggcgacgagaaggagtacaacgccgacggcggcaagatgcccatcaagtggatggccctggagtgcatccactacagaaagttcacccaccagagcgacgtgtggagctacggcgtgaccatctgggagctgatgaccttcggcggcaagccctacgacggcatccccaccagagagatccccgacctgctggagaagggcgagagactgccccagccccccatctgcaccatcgacgtgtacatggtgatggtgaagtgctggatgatcgacgccgacagcagacccaagttcaaggagctggccgccgagttcagcagaatggccagagacccccagagatacctggtgatccagggcgacgacagaatgaagctgcccagccccaacgacagcaagttcttccagaacctgctggacgaggaggacctggaggacatgatggacgccgaggagtacctggtgccccaggccttcaacatccccccccccatctacaccagcagagccagaatcgacagcaacagaaaccagttcgtgtacagagacggcggcttcgccgccgagcagggcgtgagcgtgccctacagagcccccaccagcaccatccccgaggcccccgtggcccagggcgccaccgccgagatcttcgacgacagctgctgcaacggcaccctgagaaagcccgtggccccccacgtgcaggaggacagcagcacccagagatacagcgccgaccccaccgtgttcgcccccgagagaagccccagaggcgagctggacgaggagggctacatgacccccatgagagacaagcccaagcaggagtacctgaaccccgtggaggagaaccccttcgtgagcagaagaaagaacggcgacctgcaggccctggacaaccccgagtaccacaacgccagcaacggcccccccaaggccgaggacgagtacgtgaacgagcccctgtacctgaacaccttcgccaacaccctgggcaaggccgagtacctgaagaacaacatcctgagcatgcccgagaaggccaagaaggccttcgacaaccccgactactggaaccacagcctgccccccagaagcaccctgcagcaccccgactacctgcaggagtacagcaccaagtacttctacaagcagaacggcagaatcagacccatcgtggccgagaaccccgagtacctgagcgagttcagcctgaagcccggcaccgtgctgcccccccccccctacagacacagaaacaccgtggtgtag

SEQ ID NO: 13450 - DNA, 4029 bp, synthetic construct
  misc_feature 1..4029: note = Description of Artificial Sequence: Synthetic coding sequence
  source 1..4029: mol_type = other DNA
atgagagccaacgacgccctgcaggtgctgggcctgctgttcagcctggccagaggcagcgaggtgggcaacagccaggccgtgtgccccggcaccctgaacggcctgagcgtgaccggcgacgccgagaaccagtaccagaccctgtacaagctgtacgagagatgcgaggtggtgatgggcaacctggagatcgtgctgaccggccacaacgccgacctgagcttcctgcagtggatcagagaggtgaccggctacgtgctggtggccatgaacgagttcagcaccctgcccctgcccaacctgagagtggtgagaggcacccaggtgtacgacggcaagttcgccatcttcgtgatgctgaactacaacaccaacagcagccacgccctgagacagctgagactgacccagctgaccgagatcctgagcggcggcgtgtacatcgagaagaacgacaagctgtgccacatggacaccatcgactggagagacatcgtgagagacagagacgccgagatcgtggtgaaggacaacggcagaagctgccccccctgccacgaggtgtgcaagggcagatgctggggccccggcagcgaggactgccagaccctgaccaagaccatctgcgccccccagtgcaacggccactgcttcggccccaaccccaaccagtgctgccacgacgagtgcgccggcggctgcagcggcccccaggacaccgactgcttcgcctgcagacacttcaacgacagcggcgcctgcgtgcccagatgcccccagcccctggtgtacaacaagctgaccttccagctggagcccaacccccacaccaagtaccagtacggcggcgtgtgcgtggccagctgcccccacaacttcgtggtggaccagaccagctgcgtgagagcctgcccccccgacaagatggaggtggacaagaacggcctgaagatgtgcgagccctgcggcggcctgtgccccaaggcctgcgagggcaccggcagcggcagcagattccagaccgtggacagcagcaacatcgacggcttcgtgaactgcaccaagatcctgggcaacctggacttcctgatcaccggcctgaacggcgacccctggcacaagatccccgccctggaccccgagaagctgaacgtgttcagaaccgtgagagagatcaccggctacctgaacatccagagctggcccccccacatgcacaacttcagcgtgttcagcaacctgaccaccatcggcggcagaagcctgtacaacagaggcttcagcctgctgatcatgaagaacctgaacgtgaccagcctgggcttcagaagcctgaaggagatcagcgccggcagaatctacatcagcgccaacagacagctgtgctaccaccacagcctgaactggaccaaggtgctgagaggccccaccgaggagagactggacatcaagcacaacagacccagaagagactgcgtggccgagggcaaggtgtgcgaccccctgtgcagcagcggcggctgctggggccccggccccggccagtgcctgagctgcagaaactacagcagaggcggcgtgtgcgtgacccactgcaacttcctgaacggcgagcccagagagttcgcccacgaggccgagtgcttcagctgccaccccgagtgccagcccatggagggcaccgccacctgcaacggcagcggcagcgacacctgcgcccagtgcgcccacttcagagacggcccccactgcgtgagcagctgcccccacggcgtgctgggcgccaagggccccatctacaagtaccccgacgtgcagaacgagtgcagaccctgccacgagaactgcacccagggctgcaagggccccgagctgcaggactgcctgggccagaccctggtgctgatcggcaagacccacctgaccatggccctgaccgtgatcgccggcctggtggtgatcttcatgatgctgggcggcaccttcctgtactggagaggcagaagaatccagaacaagagagccatgagaagatacctggagagaggcgagagcatcgagcccctggaccccagcgagaaggccaacaaggtgctggccagaatcttcaaggagaccgagctgagaaagctgaaggtgctgggcagcggcgtgttcggcaccgtgcacaagggcgtgtggatccccgagggcgagagcatcaagatccccgtgtgcatcaaggtgatcgaggacaagagcggcagacagagcttccaggccgtgaccgaccacatgctggccatcggcagcctggaccacgcccacatcgtgagactgctgggcctgtgccccggcagcagcctgcagctggtgacccagtacctgcccctgggcagcctgctggaccacgtgagacagcacagaggcgccctgggcccccagctgctgctgaactggggcgtgcagatcgccaagggcatgtactacctggaggagcacggcatggtgcacagaaacctggccgccagaaacgtgctgctgaagagccccagccaggtgcaggtggccgacttcggcgtggccgacctgctgccccccgacgacaagcagctgctgtacagcgaggccaagacccccatcaagtggatggccctggagagcatccacttcggcaagtacacccaccagagcgacgtgtggagctacggcgtgaccgtgtgggagctgatgaccttcggcgccgagccctacgccggcctgagactggccgaggtgcccgacctgctggagaagggcgagagactggcccagccccagatctgcaccatcgacgtgtacatggtgatggtgaagtgctggatgatcgacgagaacatcagacccaccttcaaggagctggccaacgagttcaccagaatggccagagacccccccagatacctggtgatcaagagagagagcggccccggcatcgcccccggccccgagccccacggcctgaccaacaagaagctggaggaggtggagctggagcccgagctggacctggacctggacctggaggccgaggaggacaacctggccaccaccaccctgggcagcgccctgagcctgcccgtgggcaccctgaacagacccagaggcagccagagcctgctgagccccagcagcggctacatgcccatgaaccagggcaacctgggcgagagctgccaggagagcgccgtgagcggcagcagcgagagatgccccagacccgtgagcctgcaccccatgcccagaggctgcctggccagcgagagcagcgagggccacgtgaccggcagcgaggccgagctgcaggagaaggtgagcatgtgcagaagcagaagcagaagcagaagccccagacccagaggcgacagcgcctaccacagccagagacacagcctgctgacccccgtgacccccctgagcccccccggcctggaggaggaggacgtgaacggctacgtgatgcccgacacccacctgaagggcacccccagcagcagagagggcaccctgagcagcgtgggcctgagcagcgtgctgggcaccgaggaggaggacgaggacgaggagtacgagtacatgaacagaagaagaagacacagccccccccacccccccagacccagcagcctggaggagctgggctacgagtacatggacgtgggcagcgacctgagcgccagcctgggcagcacccagagctgccccctgcaccccgtgcccatcatgcccaccgccggcaccacccccgacgaggactacgagtacatgaacagacagagagacggcggcggccccggcggcgactacgccgccatgggcgcctgccccgccagcgagcagggctacgaggagatgagagccttccagggccccggccaccaggccccccacgtgcactacgccagactgaagaccctgagaagcctggaggccaccgacagcgccttcgacaaccccgactactggcacagcagactgttccccaaggccaacgcccagagaacctag

SEQ ID NO: 13451 - DNA, 996 bp, synthetic construct
  misc_feature 1..996: note = Description of Artificial Sequence: Synthetic coding sequence
  source 1..996: mol_type = other DNA
atgagagccaacgacgccctgcaggtgctgggcctgctgttcagcctggccagaggcagcgaggtgggcaacagccaggccgtgtgccccggcaccctgaacggcctgagcgtgaccggcgacgccgagaaccagtaccagaccctgtacaagctgtacgagagatgcgaggtggtgatgggcaacctggagatcgtgctgaccggccacaacgccgacctgagcttcctgcagtggatcagagaggtgaccggctacgtgctggtggccatgaacgagttcagcaccctgcccctgcccaacctgagagtggtgagaggcacccaggtgtacgacggcaagttcgccatcttcgtgatgctgaactacaacaccaacagcagccacgccctgagacagctgagactgacccagctgaccgagatcctgagcggcggcgtgtacatcgagaagaacgacaagctgtgccacatggacaccatcgactggagagacatcgtgagagacagagacgccgagatcgtggtgaaggacaacggcagaagctgccccccctgccacgaggtgtgcaagggcagatgctggggccccggcagcgaggactgccagaccctgaccaagaccatctgcgccccccagtgcaacggccactgcttcggccccaaccccaaccagtgctgccacgacgagtgcgccggcggctgcagcggcccccaggacaccgactgcttcgcctgcagacacttcaacgacagcggcgcctgcgtgcccagatgcccccagcccctggtgtacaacaagctgaccttccagctggagcccaacccccacaccaagtaccagtacggcggcgtgtgcgtggccagctgcccccacaacttcgtggtggaccagaccagctgcgtgagagcctgcccccccgacaagatggaggtggacaagaacggcctgaagatgtgcgagccctgcggcggcctgtgccccaaggtgttctag

SEQ ID NO: 13452 - DNA, 552 bp, synthetic construct
  misc_feature 1..552: note = Description of Artificial Sequence: Synthetic coding sequence
  source 1..552: mol_type = other DNA
atgagagccaacgacgccctgcaggtgctgggcctgctgttcagcctggccagaggcagcgaggtgggcaacagccaggccgtgtgccccggcaccctgaacggcctgagcgtgaccggcgacgccgagaaccagtaccagaccctgtacaagctgtacgagagatgcgaggtggtgatgggcaacctggagatcgtgctgaccggccacaacgccgacctgagcttcctgcagtggatcagagaggtgaccggctacgtgctggtggccatgaacgagttcagcaccctgcccctgcccaacctgagagtggtgagaggcacccaggtgtacgacggcaagttcgccatcttcgtgatgctgaactacaacaccaacagcagccacgccctgagacagctgagactgacccagctgaccggccagttccccatggtgcccagcggcctgaccccccagcccgcccaggactggtacctgctggacgacgaccccagactgctgaccctgagcgccagcagcaaggtgcccgtgaccctggccgccgtgtag

SEQ ID NO: 13453 - DNA, 3852 bp, synthetic construct
  misc_feature 1..3852: note = Description of Artificial Sequence: Synthetic coding sequence
  source 1..3852: mol_type = other DNA
atgggcaacctggagatcgtgctgaccggccacaacgccgacctgagcttcctgcagtggatcagagaggtgaccggctacgtgctggtggccatgaacgagttcagcaccctgcccctgcccaacctgagagtggtgagaggcacccaggtgtacgacggcaagttcgccatcttcgtgatgctgaactacaacaccaacagcagccacgccctgagacagctgagactgacccagctgaccgagatcctgagcggcggcgtgtacatcgagaagaacgacaagctgtgccacatggacaccatcgactggagagacatcgtgagagacagagacgccgagatcgtggtgaaggacaacggcagaagctgccccccctgccacgaggtgtgcaagggcagatgctggggccccggcagcgaggactgccagaccctgaccaagaccatctgcgccccccagtgcaacggccactgcttcggccccaaccccaaccagtgctgccacgacgagtgcgccggcggctgcagcggcccccaggacaccgactgcttcgcctgcagacacttcaacgacagcggcgcctgcgtgcccagatgcccccagcccctggtgtacaacaagctgaccttccagctggagcccaacccccacaccaagtaccagtacggcggcgtgtgcgtggccagctgcccccacaacttcgtggtggaccagaccagctgcgtgagagcctgcccccccgacaagatggaggtggacaagaacggcctgaagatgtgcgagccctgcggcggcctgtgccccaaggcctgcgagggcaccggcagcggcagcagattccagaccgtggacagcagcaacatcgacggcttcgtgaactgcaccaagatcctgggcaacctggacttcctgatcaccggcctgaacggcgacccctggcacaagatccccgccctggaccccgagaagctgaacgtgttcagaaccgtgagagagatcaccggctacctgaacatccagagctggcccccccacatgcacaacttcagcgtgttcagcaacctgaccaccatcggcggcagaagcctgtacaacagaggcttcagcctgctgatcatgaagaacctgaacgtgaccagcctgggcttcagaagcctgaaggagatcagcgccggcagaatctacatcagcgccaacagacagctgtgctaccaccacagcctgaactggaccaaggtgctgagaggccccaccgaggagagactggacatcaagcacaacagacccagaagagactgcgtggccgagggcaaggtgtgcgaccccctgtgcagcagcggcggctgctggggccccggccccggccagtgcctgagctgcagaaactacagcagaggcggcgtgtgcgtgacccactgcaacttcctgaacggcgagcccagagagttcgcccacgaggccgagtgcttcagctgccaccccgagtgccagcccatggagggcaccgccacctgcaacggcagcggcagcgacacctgcgcccagtgcgcccacttcagagacggcccccactgcgtgagcagctgcccccacggcgtgctgggcgccaagggccccatctacaagtaccccgacgtgcagaacgagtgcagaccctgccacgagaactgcacccagggctgcaagggccccgagctgcaggactgcctgggccagaccctggtgctgatcggcaagacccacctgaccatggccctgaccgtgatcgccggcctggtggtgatcttcatgatgctgggcggcaccttcctgtactggagaggcagaagaatccagaacaagagagccatgagaagatacctggagagaggcgagagcatcgagcccctggaccccagcgagaaggccaacaaggtgctggccagaatcttcaaggagaccgagctgagaaagctgaaggtgctgggcagcggcgtgttcggcaccgtgcacaagggcgtgtggatccccgagggcgagagcatcaagatccccgtgtgcatcaaggtgatcgaggacaagagcggcagacagagcttccaggccgtgaccgaccacatgctggccatcggcagcctggaccacgcccacatcgtgagactgctgggcctgtgccccggcagcagcctgcagctggtgacccagtacctgcccctgggcagcctgctggaccacgtgagacagcacagaggcgccctgggcccccagctgctgctgaactggggcgtgcagatcgccaagggcatgtactacctggaggagcacggcatggtgcacagaaacctggccgccagaaacgtgctgctgaagagccccagccaggtgcaggtggccgacttcggcgtggccgacctgctgccccccgacgacaagcagctgctgtacagcgaggccaagacccccatcaagtggatggccctggagagcatccacttcggcaagtacacccaccagagcgacgtgtggagctacggcgtgaccgtgtgggagctgatgaccttcggcgccgagccctacgccggcctgagactggccgaggtgcccgacctgctggagaagggcgagagactggcccagccccagatctgcaccatcgacgtgtacatggtgatggtgaagtgctggatgatcgacgagaacatcagacccaccttcaaggagctggccaacgagttcaccagaatggccagagacccccccagatacctggtgatcaagagagagagcggccccggcatcgcccccggccccgagccccacggcctgaccaacaagaagctggaggaggtggagctggagcccgagctggacctggacctggacctggaggccgaggaggacaacctggccaccaccaccctgggcagcgccctgagcctgcccgtgggcaccctgaacagacccagaggcagccagagcctgctgagccccagcagcggctacatgcccatgaaccagggcaacctgggcgagagctgccaggagagcgccgtgagcggcagcagcgagagatgccccagacccgtgagcctgcaccccatgcccagaggctgcctggccagcgagagcagcgagggccacgtgaccggcagcgaggccgagctgcaggagaaggtgagcatgtgcagaagcagaagcagaagcagaagccccagacccagaggcgacagcgcctaccacagccagagacacagcctgctgacccccgtgacccccctgagcccccccggcctggaggaggaggacgtgaacggctacgtgatgcccgacacccacctgaagggcacccccagcagcagagagggcaccctgagcagcgtgggcctgagcagcgtgctgggcaccgaggaggaggacgaggacgaggagtacgagtacatgaacagaagaagaagacacagccccccccacccccccagacccagcagcctggaggagctgggctacgagtacatggacgtgggcagcgacctgagcgccagcctgggcagcacccagagctgccccctgcaccccgtgcccatcatgcccaccgccggcaccacccccgacgaggactacgagtacatgaacagacagagagacggcggcggccccggcggcgactacgccgccatgggcgcctgccccgccagcgagcagggctacgaggagatgagagccttccagggccccggccaccaggccccccacgtgcactacgccagactgaagaccctgagaagcctggaggccaccgacagcgccttcgacaaccccgactactggcacagcagactgttccccaaggccaacgcccagagaacctag

SEQ ID NO: 13454 - DNA, 2100 bp, synthetic construct
  misc_feature 1..2100: note = Description of Artificial Sequence: Synthetic coding sequence
  source 1..2100: mol_type = other DNA
atggccctgaccgtgatcgccggcctggtggtgatcttcatgatgctgggcggcaccttcctgtactggagaggcagaagaatccagaacaagagagccatgagaagatacctggagagaggcgagagcatcgagcccctggaccccagcgagaaggccaacaaggtgctggccagaatcttcaaggagaccgagctgagaaagctgaaggtgctgggcagcggcgtgttcggcaccgtgcacaagggcgtgtggatccccgagggcgagagcatcaagatccccgtgtgcatcaaggtgatcgaggacaagagcggcagacagagcttccaggccgtgaccgaccacatgctggccatcggcagcctggaccacgcccacatcgtgagactgctgggcctgtgccccggcagcagcctgcagctggtgacccagtacctgcccctgggcagcctgctggaccacgtgagacagcacagaggcgccctgggcccccagctgctgctgaactggggcgtgcagatcgccaagggcatgtactacctggaggagcacggcatggtgcacagaaacctggccgccagaaacgtgctgctgaagagccccagccaggtgcaggtggccgacttcggcgtggccgacctgctgccccccgacgacaagcagctgctgtacagcgaggccaagacccccatcaagtggatggccctggagagcatccacttcggcaagtacacccaccagagcgacgtgtggagctacggcgtgaccgtgtgggagctgatgaccttcggcgccgagccctacgccggcctgagactggccgaggtgcccgacctgctggagaagggcgagagactggcccagccccagatctgcaccatcgacgtgtacatggtgatggtgaagtgctggatgatcgacgagaacatcagacccaccttcaaggagctggccaacgagttcaccagaatggccagagacccccccagatacctggtgatcaagagagagagcggccccggcatcgcccccggccccgagccccacggcctgaccaacaagaagctggaggaggtggagctggagcccgagctggacctggacctggacctggaggccgaggaggacaacctggccaccaccaccctgggcagcgccctgagcctgcccgtgggcaccctgaacagacccagaggcagccagagcctgctgagccccagcagcggctacatgcccatgaaccagggcaacctgggcgagagctgccaggagagcgccgtgagcggcagcagcgagagatgccccagacccgtgagcctgcaccccatgcccagaggctgcctggccagcgagagcagcgagggccacgtgaccggcagcgaggccgagctgcaggagaaggtgagcatgtgcagaagcagaagcagaagcagaagccccagacccagaggcgacagcgcctaccacagccagagacacagcctgctgacccccgtgacccccctgagcccccccggcctggaggaggaggacgtgaacggctacgtgatgcccgacacccacctgaagggcacccccagcagcagagagggcaccctgagcagcgtgggcctgagcagcgtgctgggcaccgaggaggaggacgaggacgaggagtacgagtacatgaacagaagaagaagacacagccccccccacccccccagacccagcagcctggaggagctgggctacgagtacatggacgtgggcagcgacctgagcgccagcctgggcagcacccagagctgccccctgcaccccgtgcccatcatgcccaccgccggcaccacccccgacgaggactacgagtacatgaacagacagagagacggcggcggccccggcggcgactacgccgccatgggcgcctgccccgccagcgagcagggctacgaggagatgagagccttccagggccccggccaccaggccccccacgtgcactacgccagactgaagaccctgagaagcctggaggccaccgacagcgccttcgacaaccccgactactggcacagcagactgttccccaaggccaacgcccagagaacctag

SEQ ID NO: 13455 - DNA, 381 bp, synthetic construct
  misc_feature 1..381: note = Description of Artificial Sequence: Synthetic coding sequence
  source 1..381: mol_type = other DNA
atgagagccaacgacgccctgcaggtgctgggcctgctgttcagcctggccagaggcagcgaggtgggcaacagccaggccgtgtgccccggcaccctgaacggcctgagcgtgaccggcgacgccgagaaccagtaccagaccctgtacaagctgtacgagagatgcgaggtggtgatgggcaacctggagatcgtgctgaccggccacaacgccgacctgagcttcctgcagtggatcagagaggtgaccggctacgtgctggtggccatgaacgagttcagcaccctgcccctgcccaacctgagagtggtgagaggcacccaggtgtacgacggcaagttcgccatcttcgtgatgctgaactacaacaccaactag

SEQ ID NO: 13456 - DNA, 2766 bp, synthetic construct
  misc_feature 1..2766: note = Description of Artificial Sequence: Synthetic coding sequence
  source 1..2766: mol_type = other DNA
atgagagccaacgacgccctgcaggtgctgggcctgctgttcagcctggccagaggcagcgaggtgggcaacagccaggccgtgtgccccggcaccctgaacggcctgagcgtgaccggcgacgccgagaaccagtaccagaccctgtacaagctgtacgagagatgcgaggtggtgatgggcaacctggagatcgtgctgaccggccacaacgccgacctgagcttcctgcagtggatcagagaggtgaccggctacgtgctggtggccatgaacgagttcagcaccctgcccctgcccaacctgagagtggtgagaggcacccaggtgtacgacggcaagttcgccatcttcgtgatgctgaactacaacaccaacagcagccacgccctgagacagctgagactgacccagctgaccgagatcctgagcggcggcgtgtacatcgagaagaacgacaagctgtgccacatggacaccatcgactggagagacatcgtgagagacagagacgccgagatcgtggtgaaggacaacggcagaagctgccccccctgccacgaggtgtgcaagggcagatgctggggccccggcagcgaggactgccagaccctgaccaagaccatctgcgccccccagtgcaacggccactgcttcggccccaaccccaaccagtgctgccacgacgagtgcgccggcggctgcagcggcccccaggacaccgactgcttcgcctgcagacacttcaacgacagcggcgcctgcgtgcccagatgcccccagcccctggtgtacaacaagctgaccttccagctggagcccaacccccacaccaagtaccagtacggcggcgtgtgcgtggccagctgcccccacaacttcgtggtggaccagaccagctgcgtgagagcctgcccccccgacaagatggaggtggacaagaacggcctgaagatgtgcgagccctgcggcggcctgtgccccaaggcctgcgagggcaccggcagcggcagcagattccagaccgtggacagcagcaacatcgacggcttcgtgaactgcaccaagatcctgggcaacctggacttcctgatcaccggcctgaacggcgacccctggcacaagatccccgccctggaccccgagaagctgaacgtgttcagaaccgtgagagagatcaccggctacctgaacatccagagctggcccccccacatgcacaacttcagcgtgttcagcaacctgaccaccatcggcggcagaagcctgtacaacagaggcttcagcctgctgatcatgaagaacctgaacgtgaccagcctgggcttcagaagcctgaaggagatcagcgccggcagaatctacatcagcgccaacagacagctgtgctaccaccacagcctgaactggaccaaggtgctgagaggccccaccgaggagagactggacatcaagcacaacagacccagaagagactgcgtggccgagggcaaggtgtgcgaccccctgtgcagcagcggcggctgctggggccccggccccggccagtgcctgagctgcagaaactacagcagaggcggcgtgtgcgtgacccactgcaacttcctgaacggcgagcccagagagttcgcccacgaggccgagtgcttcagctgccaccccgagtgccagcccatggagggcaccgccacctgcaacggcagcggcagcgacacctgcgcccagtgcgcccacttcagagacggcccccactgcgtgagcagctgcccccacggcgtgctgggcgccaagggccccatctacaagtaccccgacgtgcagaacgagtgcagaccctgccacgagaactgcacccagggctgcaagggccccgagctgcaggactgcctgggccagaccctggtgctgatcggcaagacccacctgaccatggccctgaccgtgatcgccggcctggtggtgatcttcatgatgctgggcggcaccttcctgtactggagaggcagaagaatccagaacaagagagccatgagaagatacctggagagaggcgagagcatcgagcccctggaccccagcgagaaggccaacaaggtgctggccagaatcttcaaggagaccgagctgagaaagctgaaggtgctgggcagcggcgtgttcggcaccgtgcacaagggcgtgtggatccccgagggcgagagcatcaagatccccgtgtgcatcaaggtgatcgaggacaagagcggcagacagagcttccaggccgtgaccgaccacatgctggccatcggcagcctggaccacgcccacatcgtgagactgctgggcctgtgccccggcagcagcctgcagctggtgacccagtacctgcccctgggcagcctgctggaccacgtgagacagcacagaggcgccctgggcccccagctgctgctgaactggggcgtgcagatcgccaagggcatgtactacctggaggagcacggcatggtgcacagaaacctggccgccagaaacgtgctgctgaagagccccagccaggtgcaggtggccgacttcggcgtggccgacctgctgccccccgacgacaagcagctgctgtacagcgaggccaagacccccatcaagtggatggccctggagagcatccacttcggcaagtacacccaccagagcgacgtgtggagctacggccagtgcatctggatgcccagcctgcccagcctggcccccgtgagcaacctgcccttcgagacccccagctag

SEQ ID NO: 13457 - DNA, 10191 bp, synthetic construct
  misc_feature 1..10191: note = Description of Artificial Sequence: Synthetic coding sequence
  source 1..10191: mol_type = other DNA
atgttcatcaacatcaagagcatcctgtggatgtgcagcaccctgatcgtgacccacgccctgcacaaggtgaaggtgggcaagagcccccccgtgagaggcagcctgagcggcaaggtgagcctgccctgccacttcagcaccatgcccaccctgccccccagctacaacaccagcgagttcctgagaatcaagtggagcaagatcgaggtggacaagaacggcaaggacctgaaggagaccaccgtgctggtggcccagaacggcaacatcaagatcggccaggactacaagggcagagtgagcgtgcccacccaccccgaggccgtgggcgacgccagcctgaccgtggtgaagctgctggccagcgacgccggcctgtacagatgcgacgtgatgtacggcatcgaggacacccaggacaccgtgagcctgaccgtggacggcgtggtgttccactacagagccgccaccagcagatacaccctgaacttcgaggccgcccagaaggcctgcctggacgtgggcgccgtgatcgccacccccgagcagctgttcgccgcctacgaggacggcttcgagcagtgcgacgccggctggctggccgaccagaccgtgagataccccatcagagcccccagagtgggctgctacggcgacaagatgggcaaggccggcgtgagaacctacggcttcagaagcccccaggagacctacgacgtgtactgctacgtggaccacctggacggcgacgtgttccacctgaccgtgcccagcaagttcaccttcgaggaggccgccaaggagtgcgagaaccaggacgccagactggccaccgtgggcgagctgcaggccgcctggagaaacggcttcgaccagtgcgactacggctggctgagcgacgccagcgtgagacaccccgtgaccgtggccagagcccagtgcggcggcggcctgctgggcgtgagaaccctgtacagattcgagaaccagaccggcttccccccccccgacagcagattcgacgcctactgcttcaagcccaaggaggccaccaccatcgacctgagcatcctggccgagaccgccagccccagcctgagcaaggagccccagatggtgagcgacagaaccacccccatcatccccctggtggacgagctgcccgtgatccccaccgagttcccccccgtgggcaacatcgtgagcttcgagcagaaggccaccgtgcagccccaggccatcaccgacagcctggccaccaagctgcccacccccaccggcagcaccaagaagccctgggacatggacgactacagccccagcgccagcggccccctgggcaagctggacatcagcgagatcaaggaggaggtgctgcagagcaccaccggcgtgagccactacgccaccgacagctgggacggcgtggtggaggacaagcagacccaggagagcgtgacccagatcgagcagatcgaggtgggccccctggtgaccagcatggagatcctgaagcacatccccagcaaggagttccccgtgaccgagacccccctggtgaccgccagaatgatcctggagagcaagaccgagaagaagatggtgagcaccgtgagcgagctggtgaccaccggccactacggcttcaccctgggcgaggaggacgacgaggacagaaccctgaccgtgggcagcgacgagagcaccctgatcttcgaccagatccccgaggtgatcaccgtgagcaagaccagcgaggacaccatccacacccacctggaggacctggagagcgtgagcgccagcaccaccgtgagccccctgatcatgcccgacaacaacggcagcagcatggacgactgggaggagagacagaccagcggcagaatcaccgaggagttcctgggcaagtacctgagcaccacccccttccccagccagcacagaaccgagatcgagctgttcccctacagcggcgacaagatcctggtggagggcatcagcaccgtgatctaccccagcctgcagaccgagatgacccacagaagagagagaaccgagaccctgatccccgagatgagaaccgacacctacaccgacgagatccaggaggagatcaccaagagccccttcatgggcaagaccgaggaggaggtgttcagcggcatgaagctgagcaccagcctgagcgagcccatccacgtgaccgagagcagcgtggagatgaccaagagcttcgacttccccaccctgatcaccaagctgagcgccgagcccaccgaggtgagagacatggaggaggacttcaccgccacccccggcaccaccaagtacgacgagaacatcaccaccgtgctgctggcccacggcaccctgagcgtggaggccgccaccgtgagcaagtggagctgggacgaggacaacaccaccagcaagcccctggagagcaccgagcccagcgccagcagcaagctgccccccgccctgctgaccaccgtgggcatgaacggcaaggacaaggacatccccagcttcaccgaggacggcgccgacgagttcaccctgatccccgacagcacccagaagcagctggaggaggtgaccgacgaggacatcgccgcccacggcaagttcaccatcagattccagcccaccaccagcaccggcatcgccgagaagagcaccctgagagacagcaccaccgaggagaaggtgccccccatcaccagcaccgagggccaggtgtacgccaccatggagggcagcgccctgggcgaggtggaggacgtggacctgagcaagcccgtgagcaccgtgccccagttcgcccacaccagcgaggtggagggcctggccttcgtgagctacagcagcacccaggagcccaccacctacgtggacagcagccacaccatccccctgagcgtgatccccaagaccgactggggcgtgctggtgcccagcgtgcccagcgaggacgaggtgctgggcgagcccagccaggacatcctggtgatcgaccagaccagactggaggccaccatcagccccgagaccatgagaaccaccaagatcaccgagggcaccacccaggaggagttcccctggaaggagcagaccgccgagaagcccgtgcccgccctgagcagcaccgcctggacccccaaggaggccgtgacccccctggacgagcaggagggcgacggcagcgcctacaccgtgagcgaggacgagctgctgaccggcagcgagagagtgcccgtgctggagaccacccccgtgggcaagatcgaccacagcgtgagctacccccccggcgccgtgaccgagcacaaggtgaagaccgacgaggtggtgaccctgacccccagaatcggccccaaggtgagcctgagccccggccccgagcagaagtacgagaccgagggcagcagcaccaccggcttcaccagcagcctgagccccttcagcacccacatcacccagctgatggaggagaccaccaccgagaagaccagcctggaggacatcgacctgggcagcggcctgttcgagaagcccaaggccaccgagctgatcgagttcagcaccatcaaggtgaccgtgcccagcgacatcaccaccgccttcagcagcgtggacagactgcacaccaccagcgccttcaagcccagcagcgccatcaccaagaagccccccctgatcgacagagagcccggcgaggagaccaccagcgacatggtgatcatcggcgagagcaccagccacgtgccccccaccaccctggaggacatcgtggccaaggagaccgagaccgacatcgacagagagtacttcaccaccagcagcccccccgccacccagcccaccagaccccccaccgtggaggacaaggaggccttcggcccccaggccctgagcaccccccagccccccgccagcaccaagttccaccccgacatcaacgtgtacatcatcgaggtgagagagaacaagaccggcagaatgagcgacctgagcgtgatcggccaccccatcgacagcgagagcaaggaggacgagccctgcagcgaggagaccgaccccgtgcacgacctgatggccgagatcctgcccgagttccccgacatcatcgagatcgacctgtaccacagcgaggagaacgaggaggaggaggaggagtgcgccaacgccaccgacgtgaccaccacccccagcgtgcagtacatcaacggcaagcacctggtgaccaccgtgcccaaggaccccgaggccgccgaggccagaagaggccagttcgagagcgtggcccccagccagaacttcagcgacagcagcgagagcgacacccaccccttcgtgatcgccaagaccgagctgagcaccgccgtgcagcccaacgagagcaccgagaccaccgagagcctggaggtgacctggaagcccgagacctaccccgagaccagcgagcacttcagcggcggcgagcccgacgtgttccccaccgtgcccttccacgaggagttcgagagcggcaccgccaagaagggcgccgagagcgtgaccgagagagacaccgaggtgggccaccaggcccacgagcacaccgagcccgtgagcctgttccccgaggagagcagcggcgagatcgccatcgaccaggagagccagaagatcgccttcgccagagccaccgaggtgaccttcggcgaggaggtggagaagagcaccagcgtgacctacacccccaccatcgtgcccagcagcgccagcgcctacgtgagcgaggaggaggccgtgaccctgatcggcaacccctggcccgacgacctgctgagcaccaaggagagctgggtggaggccacccccagacaggtggtggagctgagcggcagcagcagcatccccatcaccgagggcagcggcgaggccgaggaggacgaggacaccatgttcaccatggtgaccgacctgagccagagaaacaccaccgacaccctgatcaccctggacaccagcagaatcatcaccgagagcttcttcgaggtgcccgccaccaccatctaccccgtgagcgagcagcccagcgccaaggtggtgcccaccaagttcgtgagcgagaccgacaccagcgagtggatcagcagcaccaccgtggaggagaagaagagaaaggaggaggagggcaccaccggcaccgccagcaccttcgaggtgtacagcagcacccagagaagcgaccagctgatcctgcccttcgagctggagagccccaacgtggccaccagcagcgacagcggcaccagaaagagcttcatgagcctgaccacccccacccagagcgagagagagatgaccgacagcacccccgtgttcaccgagaccaacaccctggagaacctgggcgcccagaccaccgagcacagcagcatccaccagcccggcgtgcaggagggcctgaccaccctgcccagaagccccgccagcgtgttcatggagcagggcagcggcgaggccgccgccgaccccgagaccaccaccgtgagcagcttcagcctgaacgtggagtacgccatccaggccgagaaggaggtggccggcaccctgagcccccacgtggagaccaccttcagcaccgagcccaccggcctggtgctgagcaccgtgatggacagagtggtggccgagaacatcacccagaccagcagagagatcgtgatcagcgagagactgggcgagcccaactacggcgccgagatcagaggcttcagcaccggcttccccctggaggaggacttcagcggcgacttcagagagtacagcaccgtgagccaccccatcgccaaggaggagaccgtgatgatggagggcagcggcgacgccgccttcagagacacccagaccagccccagcaccgtgcccaccagcgtgcacatcagccacatcagcgacagcgagggccccagcagcaccatggtgagcaccagcgccttcccctgggaggagttcaccagcagcgccgagggcagcggcgagcagctggtgaccgtgagcagcagcgtggtgcccgtgctgcccagcgccgtgcagaagttcagcggcaccgccagcagcatcatcgacgagggcctgggcgaggtgggcaccgtgaacgagatcgacagaagaagcaccatcctgcccaccgccgaggtggagggcaccaaggcccccgtggagaaggaggaggtgaaggtgagcggcaccgtgagcaccaacttcccccagaccatcgagcccgccaagctgtggagcagacaggaggtgaaccccgtgagacaggagatcgagagcgagaccaccagcgaggagcagatccaggaggagaagagcttcgagagcccccagaacagccccgccaccgagcagaccatcttcgacagccagaccttcaccgagaccgagctgaagaccaccgactacagcgtgctgaccaccaagaagacctacagcgacgacaaggagatgaaggaggaggacaccagcctggtgaacatgagcacccccgaccccgacgccaacggcctggagagctacaccaccctgcccgaggccaccgagaagagccacttcttcctggccaccgccctggtgaccgagagcatccccgccgagcacgtggtgaccgacagccccatcaagaaggaggagagcaccaagcacttccccaagggcatgagacccaccatccaggagagcgacaccgagctgctgttcagcggcctgggcagcggcgaggaggtgctgcccaccctgcccaccgagagcgtgaacttcaccgaggtggagcagatcaacaacaccctgtacccccacaccagccaggtggagagcaccagcagcgacaagatcgaggacttcaacagaatggagaacgtggccaaggaggtgggccccctggtgagccagaccgacatcttcgagggcagcggcagcgtgaccagcaccaccctgatcgagatcctgagcgacaccggcgccgagggccccaccgtggcccccctgcccttcagcaccgacatcggccacccccagaaccagaccgtgagatgggccgaggagatccagaccagcagaccccagaccatcaccgagcaggacagcaacaagaacagcagcaccgccgagatcaacgagaccaccaccagcagcaccgacttcctggccagagcctacggcttcgagatggccaaggagttcgtgaccagcgcccccaagcccagcgacctgtactacgagcccagcggcgagggcagcggcgaggtggacatcgtggacagcttccacaccagcgccaccacccaggccaccagacaggagagcagcaccaccttcgtgagcgacggcagcctggagaagcaccccgaggtgcccagcgccaaggccgtgaccgccgacggcttccccaccgtgagcgtgatgctgcccctgcacagcgagcagaacaagagcagccccgaccccaccagcaccctgagcaacaccgtgagctacgagagaagcaccgacggcagcttccaggacagattcagagagttcgaggacagcaccctgaagcccaacagaaagaagcccaccgagaacatcatcatcgacctggacaaggaggacaaggacctgatcctgaccatcaccgagagcaccatcctggagatcctgcccgagctgaccagcgacaagaacaccatcatcgacatcgaccacaccaagcccgtgtacgaggacatcctgggcatgcagaccgacatcgacaccgaggtgcccagcgagccccacgacagcaacgacgagagcaacgacgacagcacccaggtgcaggagatctacgaggccgccgtgaacctgagcctgaccgaggagaccttcgagggcagcgccgacgtgctggccagctacacccaggccacccacgacgagagcatgacctacgaggacagaagccagctggaccacatgggcttccacttcaccaccggcatccccgcccccagcaccgagaccgagctggacgtgctgctgcccaccgccaccagcctgcccatccccagaaagagcgccaccgtgatccccgagatcgagggcatcaaggccgaggccaaggccctggacgacatgttcgagagcagcaccctgagcgacggccaggccatcgccgaccagagcgagatcatccccaccctgggccagttcgagagaacccaggaggagtacgaggacaagaagcacgccggccccagcttccagcccgagttcagcagcggcgccgaggaggccctggtggaccacaccccctacctgagcatcgccaccacccacctgatggaccagagcgtgaccgaggtgcccgacgtgatggagggcagcaaccccccctactacaccgacaccaccctggccgtgagcaccttcgccaagctgagcagccagacccccagcagccccctgaccatctacagcggcagcgaggccagcggccacaccgagatcccccagcccagcgccctgcccggcatcgacgtgggcagcagcgtgatgagcccccaggacagcttcaaggagatccacgtgaacatcgaggccaccttcaagcccagcagcgaggagtacctgcacatcaccgagccccccagcctgagccccgacaccaagctggagcccagcgaggacgacggcaagcccgagctgctggaggagatggaggccagccccaccgagctgatcgccgtggagggcaccgagatcctgcaggacttccagaacaagaccgacggccaggtgagcggcgaggccatcaagatgttccccaccatcaagacccccgaggccggcaccgtgatcaccaccgccgacgagatcgagctggagggcgccacccagtggccccacagcaccagcgccagcgccacctacggcgtggaggccggcgtggtgccctggctgagcccccagaccagcgagagacccaccctgagcagcagccccgagatcaaccccgagacccaggccgccctgatcagaggccaggacagcaccatcgccgccagcgagcagcaggtggccgccagaatcctggacagcaacgaccaggccaccgtgaaccccgtggagttcaacaccgaggtggccaccccccccttcagcctgctggagaccagcaacgagaccgacttcctgatcggcatcaacgaggagagcgtggagggcaccgccatctacctgcccggccccgacagatgcaagatgaacccctgcctgaacggcggcacctgctaccccaccgagaccagctacgtgtgcacctgcgtgcccggctacagcggcgaccagtgcgagctggacttcgacgagtgccacagcaacccctgcagaaacggcgccacctgcgtggacggcttcaacaccttcagatgcctgtgcctgcccagctacgtgggcgccctgtgcgagcaggacaccgagacctgcgactacggctggcacaagttccagggccagtgctacaagtacttcgcccacagaagaacctgggacgccgccgagagagagtgcagactgcagggcgcccacctgaccagcatcctgagccacgaggagcagatgttcgtgaacagagtgggccacgactaccagtggatcggcctgaacgacaagatgttcgagcacgacttcagatggaccgacggcagcaccctgcagtacgagaactggagacccaaccagcccgacagcttcttcagcgccggcgaggactgcgtggtgatcatctggcacgagaacggccagtggaacgacgtgccctgcaactaccacctgacctacacctgcaagaagggcaccgtggcctgcggccagccccccgtggtggagaacgccaagaccttcggcaagatgaagcccagatacgagatcaacagcctgatcagataccactgcaaggacggcttcatccagagacacctgcccaccatcagatgcctgggcaacggcagatgggccatccccaagatcacctgcatgaaccccagcgcctaccagagaacctacagcatgaagtacttcaagaacagcagcagcgccaaggacaacagcatcaacaccagcaagcacgaccacagatggagcagaagatggcaggagagcagaagatag

SEQ ID NO: 13458 - DNA, 4929 bp, synthetic construct
  misc_feature 1..4929: note = Description of Artificial Sequence: Synthetic coding sequence
  source 1..4929: mol_type = other DNA
atgttcatcaacatcaagagcatcctgtggatgtgcagcaccctgatcgtgacccacgccctgcacaaggtgaaggtgggcaagagcccccccgtgagaggcagcctgagcggcaaggtgagcctgccctgccacttcagcaccatgcccaccctgccccccagctacaacaccagcgagttcctgagaatcaagtggagcaagatcgaggtggacaagaacggcaaggacctgaaggagaccaccgtgctggtggcccagaacggcaacatcaagatcggccaggactacaagggcagagtgagcgtgcccacccaccccgaggccgtgggcgacgccagcctgaccgtggtgaagctgctggccagcgacgccggcctgtacagatgcgacgtgatgtacggcatcgaggacacccaggacaccgtgagcctgaccgtggacggcgtggtgttccactacagagccgccaccagcagatacaccctgaacttcgaggccgcccagaaggcctgcctggacgtgggcgccgtgatcgccacccccgagcagctgttcgccgcctacgaggacggcttcgagcagtgcgacgccggctggctggccgaccagaccgtgagataccccatcagagcccccagagtgggctgctacggcgacaagatgggcaaggccggcgtgagaacctacggcttcagaagcccccaggagacctacgacgtgtactgctacgtggaccacctggacggcgacgtgttccacctgaccgtgcccagcaagttcaccttcgaggaggccgccaaggagtgcgagaaccaggacgccagactggccaccgtgggcgagctgcaggccgcctggagaaacggcttcgaccagtgcgactacggctggctgagcgacgccagcgtgagacaccccgtgaccgtggccagagcccagtgcggcggcggcctgctgggcgtgagaaccctgtacagattcgagaaccagaccggcttccccccccccgacagcagattcgacgcctactgcttcaagcccaaggaggccaccaccatcgacctgagcatcctggccgagaccgccagccccagcctgagcaaggagccccagatggtgagcgacagaaccacccccatcatccccctggtggacgagctgcccgtgatccccaccgagttcccccccgtgggcaacatcgtgagcttcgagcagaaggccaccgtgcagccccaggccatcaccgacagcctggccaccaagctgcccacccccaccggcagcaccaagaagccctgggacatggacgactacagccccagcgccagcggccccctgggcaagctggacatcagcgagatcaaggaggaggtgctgcagagcaccaccggcgtgagccactacgccaccgacagctgggacggcgtggtggaggacaagcagacccaggagagcgtgacccagatcgagcagatcgaggtgggccccctggtgaccagcatggagatcctgaagcacatccccagcaaggagttccccgtgaccgagacccccctggtgaccgccagaatgatcctggagagcaagaccgagaagaagatggtgagcaccgtgagcgagctggtgaccaccggccactacggcttcaccctgggcgaggaggacgacgaggacagaaccctgaccgtgggcagcgacgagagcaccctgatcttcgaccagatccccgaggtgatcaccgtgagcaagaccagcgaggacaccatccacacccacctggaggacctggagagcgtgagcgccagcaccaccgtgagccccctgatcatgcccgacaacaacggcagcagcatggacgactgggaggagagacagaccagcggcagaatcaccgaggagttcctgggcaagtacctgagcaccacccccttccccagccagcacagaaccgagatcgagctgttcccctacagcggcgacaagatcctggtggagggcatcagcaccgtgatctaccccagcctgcagaccgagatgacccacagaagagagagaaccgagaccctgatccccgagatgagaaccgacacctacaccgacgagatccaggaggagatcaccaagagccccttcatgggcaagaccgaggaggaggtgttcagcggcatgaagctgagcaccagcctgagcgagcccatccacgtgaccgagagcagcgtggagatgaccaagagcttcgacttccccaccctgatcaccaagctgagcgccgagcccaccgaggtgagagacatggaggaggacttcaccgccacccccggcaccaccaagtacgacgagaacatcaccaccgtgctgctggcccacggcaccctgagcgtggaggccgccaccgtgagcaagtggagctgggacgaggacaacaccaccagcaagcccctggagagcaccgagcccagcgccagcagcaagctgccccccgccctgctgaccaccgtgggcatgaacggcaaggacaaggacatccccagcttcaccgaggacggcgccgacgagttcaccctgatccccgacagcacccagaagcagctggaggaggtgaccgacgaggacatcgccgcccacggcaagttcaccatcagattccagcccaccaccagcaccggcatcgccgagaagagcaccctgagagacagcaccaccgaggagaaggtgccccccatcaccagcaccgagggccaggtgtacgccaccatggagggcagcgccctgggcgaggtggaggacgtggacctgagcaagcccgtgagcaccgtgccccagttcgcccacaccagcgaggtggagggcctggccttcgtgagctacagcagcacccaggagcccaccacctacgtggacagcagccacaccatccccctgagcgtgatccccaagaccgactggggcgtgctggtgcccagcgtgcccagcgaggacgaggtgctgggcgagcccagccaggacatcctggtgatcgaccagaccagactggaggccaccatcagccccgagaccatgagaaccaccaagatcaccgagggcaccacccaggaggagttcccctggaaggagcagaccgccgagaagcccgtgcccgccctgagcagcaccgcctggacccccaaggaggccgtgacccccctggacgagcaggagggcgacggcagcgcctacaccgtgagcgaggacgagctgctgaccggcagcgagagagtgcccgtgctggagaccacccccgtgggcaagatcgaccacagcgtgagctacccccccggcgccgtgaccgagcacaaggtgaagaccgacgaggtggtgaccctgacccccagaatcggccccaaggtgagcctgagccccggccccgagcagaagtacgagaccgagggcagcagcaccaccggcttcaccagcagcctgagccccttcagcacccacatcacccagctgatggaggagaccaccaccgagaagaccagcctggaggacatcgacctgggcagcggcctgttcgagaagcccaaggccaccgagctgatcgagttcagcaccatcaaggtgaccgtgcccagcgacatcaccaccgccttcagcagcgtggacagactgcacaccaccagcgccttcaagcccagcagcgccatcaccaagaagccccccctgatcgacagagagcccggcgaggagaccaccagcgacatggtgatcatcggcgagagcaccagccacgtgccccccaccaccctggaggacatcgtggccaaggagaccgagaccgacatcgacagagagtacttcaccaccagcagcccccccgccacccagcccaccagaccccccaccgtggaggacaaggaggccttcggcccccaggccctgagcaccccccagccccccgccagcaccaagttccaccccgacatcaacgtgtacatcatcgaggtgagagagaacaagaccggccccgacagatgcaagatgaacccctgcctgaacggcggcacctgctaccccaccgagaccagctacgtgtgcacctgcgtgcccggctacagcggcgaccagtgcgagctggacttcgacgagtgccacagcaacccctgcagaaacggcgccacctgcgtggacggcttcaacaccttcagatgcctgtgcctgcccagctacgtgggcgccctgtgcgagcaggacaccgagacctgcgactacggctggcacaagttccagggccagtgctacaagtacttcgcccacagaagaacctgggacgccgccgagagagagtgcagactgcagggcgcccacctgaccagcatcctgagccacgaggagcagatgttcgtgaacagagtgggccacgactaccagtggatcggcctgaacgacaagatgttcgagcacgacttcagatggaccgacggcagcaccctgcagtacgagaactggagacccaaccagcccgacagcttcttcagcgccggcgaggactgcgtggtgatcatctggcacgagaacggccagtggaacgacgtgccctgcaactaccacctgacctacacctgcaagaagggcaccgtggcctgcggccagccccccgtggtggagaacgccaagaccttcggcaagatgaagcccagatacgagatcaacagcctgatcagataccactgcaaggacggcttcatccagagacacctgcccaccatcagatgcctgggcaacggcagatgggccatccccaagatcacctgcatgaaccccagcgcctaccagagaacctacagcatgaagtacttcaagaacagcagcagcgccaaggacaacagcatcaacaccagcaagcacgaccacagatggagcagaagatggcaggagagcagaagatag

SEQ ID NO: 13459 - DNA, 7230 bp, synthetic construct
  misc_feature 1..7230: note = Description of Artificial Sequence: Synthetic coding sequence
  source 1..7230: mol_type = other DNA
atgttcatcaacatcaagagcatcctgtggatgtgcagcaccctgatcgtgacccacgccctgcacaaggtgaaggtgggcaagagcccccccgtgagaggcagcctgagcggcaaggtgagcctgccctgccacttcagcaccatgcccaccctgccccccagctacaacaccagcgagttcctgagaatcaagtggagcaagatcgaggtggacaagaacggcaaggacctgaaggagaccaccgtgctggtggcccagaacggcaacatcaagatcggccaggactacaagggcagagtgagcgtgcccacccaccccgaggccgtgggcgacgccagcctgaccgtggtgaagctgctggccagcgacgccggcctgtacagatgcgacgtgatgtacggcatcgaggacacccaggacaccgtgagcctgaccgtggacggcgtggtgttccactacagagccgccaccagcagatacaccctgaacttcgaggccgcccagaaggcctgcctggacgtgggcgccgtgatcgccacccccgagcagctgttcgccgcctacgaggacggcttcgagcagtgcgacgccggctggctggccgaccagaccgtgagataccccatcagagcccccagagtgggctgctacggcgacaagatgggcaaggccggcgtgagaacctacggcttcagaagcccccaggagacctacgacgtgtactgctacgtggaccacctggacggcgacgtgttccacctgaccgtgcccagcaagttcaccttcgaggaggccgccaaggagtgcgagaaccaggacgccagactggccaccgtgggcgagctgcaggccgcctggagaaacggcttcgaccagtgcgactacggctggctgagcgacgccagcgtgagacaccccgtgaccgtggccagagcccagtgcggcggcggcctgctgggcgtgagaaccctgtacagattcgagaaccagaccggcttccccccccccgacagcagattcgacgcctactgcttcaagagaagaatgagcgacctgagcgtgatcggccaccccatcgacagcgagagcaaggaggacgagccctgcagcgaggagaccgaccccgtgcacgacctgatggccgagatcctgcccgagttccccgacatcatcgagatcgacctgtaccacagcgaggagaacgaggaggaggaggaggagtgcgccaacgccaccgacgtgaccaccacccccagcgtgcagtacatcaacggcaagcacctggtgaccaccgtgcccaaggaccccgaggccgccgaggccagaagaggccagttcgagagcgtggcccccagccagaacttcagcgacagcagcgagagcgacacccaccccttcgtgatcgccaagaccgagctgagcaccgccgtgcagcccaacgagagcaccgagaccaccgagagcctggaggtgacctggaagcccgagacctaccccgagaccagcgagcacttcagcggcggcgagcccgacgtgttccccaccgtgcccttccacgaggagttcgagagcggcaccgccaagaagggcgccgagagcgtgaccgagagagacaccgaggtgggccaccaggcccacgagcacaccgagcccgtgagcctgttccccgaggagagcagcggcgagatcgccatcgaccaggagagccagaagatcgccttcgccagagccaccgaggtgaccttcggcgaggaggtggagaagagcaccagcgtgacctacacccccaccatcgtgcccagcagcgccagcgcctacgtgagcgaggaggaggccgtgaccctgatcggcaacccctggcccgacgacctgctgagcaccaaggagagctgggtggaggccacccccagacaggtggtggagctgagcggcagcagcagcatccccatcaccgagggcagcggcgaggccgaggaggacgaggacaccatgttcaccatggtgaccgacctgagccagagaaacaccaccgacaccctgatcaccctggacaccagcagaatcatcaccgagagcttcttcgaggtgcccgccaccaccatctaccccgtgagcgagcagcccagcgccaaggtggtgcccaccaagttcgtgagcgagaccgacaccagcgagtggatcagcagcaccaccgtggaggagaagaagagaaaggaggaggagggcaccaccggcaccgccagcaccttcgaggtgtacagcagcacccagagaagcgaccagctgatcctgcccttcgagctggagagccccaacgtggccaccagcagcgacagcggcaccagaaagagcttcatgagcctgaccacccccacccagagcgagagagagatgaccgacagcacccccgtgttcaccgagaccaacaccctggagaacctgggcgcccagaccaccgagcacagcagcatccaccagcccggcgtgcaggagggcctgaccaccctgcccagaagccccgccagcgtgttcatggagcagggcagcggcgaggccgccgccgaccccgagaccaccaccgtgagcagcttcagcctgaacgtggagtacgccatccaggccgagaaggaggtggccggcaccctgagcccccacgtggagaccaccttcagcaccgagcccaccggcctggtgctgagcaccgtgatggacagagtggtggccgagaacatcacccagaccagcagagagatcgtgatcagcgagagactgggcgagcccaactacggcgccgagatcagaggcttcagcaccggcttccccctggaggaggacttcagcggcgacttcagagagtacagcaccgtgagccaccccatcgccaaggaggagaccgtgatgatggagggcagcggcgacgccgccttcagagacacccagaccagccccagcaccgtgcccaccagcgtgcacatcagccacatcagcgacagcgagggccccagcagcaccatggtgagcaccagcgccttcccctgggaggagttcaccagcagcgccgagggcagcggcgagcagctggtgaccgtgagcagcagcgtggtgcccgtgctgcccagcgccgtgcagaagttcagcggcaccgccagcagcatcatcgacgagggcctgggcgaggtgggcaccgtgaacgagatcgacagaagaagcaccatcctgcccaccgccgaggtggagggcaccaaggcccccgtggagaaggaggaggtgaaggtgagcggcaccgtgagcaccaacttcccccagaccatcgagcccgccaagctgtggagcagacaggaggtgaaccccgtgagacaggagatcgagagcgagaccaccagcgaggagcagatccaggaggagaagagcttcgagagcccccagaacagccccgccaccgagcagaccatcttcgacagccagaccttcaccgagaccgagctgaagaccaccgactacagcgtgctgaccaccaagaagacctacagcgacgacaaggagatgaaggaggaggacaccagcctggtgaacatgagcacccccgaccccgacgccaacggcctggagagctacaccaccctgcccgaggccaccgagaagagccacttcttcctggccaccgccctggtgaccgagagcatccccgccgagcacgtggtgaccgacagccccatcaagaaggaggagagcaccaagcacttccccaagggcatgagacccaccatccaggagagcgacaccgagctgctgttcagcggcctgggcagcggcgaggaggtgctgcccaccctgcccaccgagagcgtgaacttcaccgaggtggagcagatcaacaacaccctgtacccccacaccagccaggtggagagcaccagcagcgacaagatcgaggacttcaacagaatggagaacgtggccaaggaggtgggccccctggtgagccagaccgacatcttcgagggcagcggcagcgtgaccagcaccaccctgatcgagatcctgagcgacaccggcgccgagggccccaccgtggcccccctgcccttcagcaccgacatcggccacccccagaaccagaccgtgagatgggccgaggagatccagaccagcagaccccagaccatcaccgagcaggacagcaacaagaacagcagcaccgccgagatcaacgagaccaccaccagcagcaccgacttcctggccagagcctacggcttcgagatggccaaggagttcgtgaccagcgcccccaagcccagcgacctgtactacgagcccagcggcgagggcagcggcgaggtggacatcgtggacagcttccacaccagcgccaccacccaggccaccagacaggagagcagcaccaccttcgtgagcgacggcagcctggagaagcaccccgaggtgcccagcgccaaggccgtgaccgccgacggcttccccaccgtgagcgtgatgctgcccctgcacagcgagcagaacaagagcagccccgaccccaccagcaccctgagcaacaccgtgagctacgagagaagcaccgacggcagcttccaggacagattcagagagttcgaggacagcaccctgaagcccaacagaaagaagcccaccgagaacatcatcatcgacctggacaaggaggacaaggacctgatcctgaccatcaccgagagcaccatcctggagatcctgcccgagctgaccagcgacaagaacaccatcatcgacatcgaccacaccaagcccgtgtacgaggacatcctgggcatgcagaccgacatcgacaccgaggtgcccagcgagccccacgacagcaacgacgagagcaacgacgacagcacccaggtgcaggagatctacgaggccgccgtgaacctgagcctgaccgaggagaccttcgagggcagcgccgacgtgctggccagctacacccaggccacccacgacgagagcatgacctacgaggacagaagccagctggaccacatgggcttccacttcaccaccggcatccccgcccccagcaccgagaccgagctggacgtgctgctgcccaccgccaccagcctgcccatccccagaaagagcgccaccgtgatccccgagatcgagggcatcaaggccgaggccaaggccctggacgacatgttcgagagcagcaccctgagcgacggccaggccatcgccgaccagagcgagatcatccccaccctgggccagttcgagagaacccaggaggagtacgaggacaagaagcacgccggccccagcttccagcccgagttcagcagcggcgccgaggaggccctggtggaccacaccccctacctgagcatcgccaccacccacctgatggaccagagcgtgaccgaggtgcccgacgtgatggagggcagcaaccccccctactacaccgacaccaccctggccgtgagcaccttcgccaagctgagcagccagacccccagcagccccctgaccatctacagcggcagcgaggccagcggccacaccgagatcccccagcccagcgccctgcccggcatcgacgtgggcagcagcgtgatgagcccccaggacagcttcaaggagatccacgtgaacatcgaggccaccttcaagcccagcagcgaggagtacctgcacatcaccgagccccccagcctgagccccgacaccaagctggagcccagcgaggacgacggcaagcccgagctgctggaggagatggaggccagccccaccgagctgatcgccgtggagggcaccgagatcctgcaggacttccagaacaagaccgacggccaggtgagcggcgaggccatcaagatgttccccaccatcaagacccccgaggccggcaccgtgatcaccaccgccgacgagatcgagctggagggcgccacccagtggccccacagcaccagcgccagcgccacctacggcgtggaggccggcgtggtgccctggctgagcccccagaccagcgagagacccaccctgagcagcagccccgagatcaaccccgagacccaggccgccctgatcagaggccaggacagcaccatcgccgccagcgagcagcaggtggccgccagaatcctggacagcaacgaccaggccaccgtgaaccccgtggagttcaacaccgaggtggccaccccccccttcagcctgctggagaccagcaacgagaccgacttcctgatcggcatcaacgaggagagcgtggagggcaccgccatctacctgcccggccccgacagatgcaagatgaacccctgcctgaacggcggcacctgctaccccaccgagaccagctacgtgtgcacctgcgtgcccggctacagcggcgaccagtgcgagctggacttcgacgagtgccacagcaacccctgcagaaacggcgccacctgcgtggacggcttcaacaccttcagatgcctgtgcctgcccagctacgtgggcgccctgtgcgagcaggacaccgagacctgcgactacggctggcacaagttccagggccagtgctacaagtacttcgcccacagaagaacctgggacgccgccgagagagagtgcagactgcagggcgcccacctgaccagcatcctgagccacgaggagcagatgttcgtgaacagagtgggccacgactaccagtggatcggcctgaacgacaagatgttcgagcacgacttcagatggaccgacggcagcaccctgcagtacgagaactggagacccaaccagcccgacagcttcttcagcgccggcgaggactgcgtggtgatcatctggcacgagaacggccagtggaacgacgtgccctgcaactaccacctgacctacacctgcaagaagggcaccgtggcctgcggccagccccccgtggtggagaacgccaagaccttcggcaagatgaagcccagatacgagatcaacagcctgatcagataccactgcaaggacggcttcatccagagacacctgcccaccatcagatgcctgggcaacggcagatgggccatccccaagatcacctgcatgaaccccagcgcctaccagagaacctacagcatgaagtacttcaagaacagcagcagcgccaaggacaacagcatcaacaccagcaagcacgaccacagatggagcagaagatggcaggagagcagaagatag

SEQ ID NO: 13460 - DNA, 4785 bp, synthetic construct
  misc_feature 1..4785: note = Description of Artificial Sequence: Synthetic coding sequence
  source 1..4785: mol_type = other DNA
atgcccaccctgccccccagctacaacaccagcgagttcctgagaatcaagtggagcaagatcgaggtggacaagaacggcaaggacctgaaggagaccaccgtgctggtggcccagaacggcaacatcaagatcggccaggactacaagggcagagtgagcgtgcccacccaccccgaggccgtgggcgacgccagcctgaccgtggtgaagctgctggccagcgacgccggcctgtacagatgcgacgtgatgtacggcatcgaggacacccaggacaccgtgagcctgaccgtggacggcgtggtgttccactacagagccgccaccagcagatacaccctgaacttcgaggccgcccagaaggcctgcctggacgtgggcgccgtgatcgccacccccgagcagctgttcgccgcctacgaggacggcttcgagcagtgcgacgccggctggctggccgaccagaccgtgagataccccatcagagcccccagagtgggctgctacggcgacaagatgggcaaggccggcgtgagaacctacggcttcagaagcccccaggagacctacgacgtgtactgctacgtggaccacctggacggcgacgtgttccacctgaccgtgcccagcaagttcaccttcgaggaggccgccaaggagtgcgagaaccaggacgccagactggccaccgtgggcgagctgcaggccgcctggagaaacggcttcgaccagtgcgactacggctggctgagcgacgccagcgtgagacaccccgtgaccgtggccagagcccagtgcggcggcggcctgctgggcgtgagaaccctgtacagattcgagaaccagaccggcttccccccccccgacagcagattcgacgcctactgcttcaagcccaaggaggccaccaccatcgacctgagcatcctggccgagaccgccagccccagcctgagcaaggagccccagatggtgagcgacagaaccacccccatcatccccctggtggacgagctgcccgtgatccccaccgagttcccccccgtgggcaacatcgtgagcttcgagcagaaggccaccgtgcagccccaggccatcaccgacagcctggccaccaagctgcccacccccaccggcagcaccaagaagccctgggacatggacgactacagccccagcgccagcggccccctgggcaagctggacatcagcgagatcaaggaggaggtgctgcagagcaccaccggcgtgagccactacgccaccgacagctgggacggcgtggtggaggacaagcagacccaggagagcgtgacccagatcgagcagatcgaggtgggccccctggtgaccagcatggagatcctgaagcacatccccagcaaggagttccccgtgaccgagacccccctggtgaccgccagaatgatcctggagagcaagaccgagaagaagatggtgagcaccgtgagcgagctggtgaccaccggccactacggcttcaccctgggcgaggaggacgacgaggacagaaccctgaccgtgggcagcgacgagagcaccctgatcttcgaccagatccccgaggtgatcaccgtgagcaagaccagcgaggacaccatccacacccacctggaggacctggagagcgtgagcgccagcaccaccgtgagccccctgatcatgcccgacaacaacggcagcagcatggacgactgggaggagagacagaccagcggcagaatcaccgaggagttcctgggcaagtacctgagcaccacccccttccccagccagcacagaaccgagatcgagctgttcccctacagcggcgacaagatcctggtggagggcatcagcaccgtgatctaccccagcctgcagaccgagatgacccacagaagagagagaaccgagaccctgatccccgagatgagaaccgacacctacaccgacgagatccaggaggagatcaccaagagccccttcatgggcaagaccgaggaggaggtgttcagcggcatgaagctgagcaccagcctgagcgagcccatccacgtgaccgagagcagcgtggagatgaccaagagcttcgacttccccaccctgatcaccaagctgagcgccgagcccaccgaggtgagagacatggaggaggacttcaccgccacccccggcaccaccaagtacgacgagaacatcaccaccgtgctgctggcccacggcaccctgagcgtggaggccgccaccgtgagcaagtggagctgggacgaggacaacaccaccagcaagcccctggagagcaccgagcccagcgccagcagcaagctgccccccgccctgctgaccaccgtgggcatgaacggcaaggacaaggacatccccagcttcaccgaggacggcgccgacgagttcaccctgatccccgacagcacccagaagcagctggaggaggtgaccgacgaggacatcgccgcccacggcaagttcaccatcagattccagcccaccaccagcaccggcatcgccgagaagagcaccctgagagacagcaccaccgaggagaaggtgccccccatcaccagcaccgagggccaggtgtacgccaccatggagggcagcgccctgggcgaggtggaggacgtggacctgagcaagcccgtgagcaccgtgccccagttcgcccacaccagcgaggtggagggcctggccttcgtgagctacagcagcacccaggagcccaccacctacgtggacagcagccacaccatccccctgagcgtgatccccaagaccgactggggcgtgctggtgcccagcgtgcccagcgaggacgaggtgctgggcgagcccagccaggacatcctggtgatcgaccagaccagactggaggccaccatcagccccgagaccatgagaaccaccaagatcaccgagggcaccacccaggaggagttcccctggaaggagcagaccgccgagaagcccgtgcccgccctgagcagcaccgcctggacccccaaggaggccgtgacccccctggacgagcaggagggcgacggcagcgcctacaccgtgagcgaggacgagctgctgaccggcagcgagagagtgcccgtgctggagaccacccccgtgggcaagatcgaccacagcgtgagctacccccccggcgccgtgaccgagcacaaggtgaagaccgacgaggtggtgaccctgacccccagaatcggccccaaggtgagcctgagccccggccccgagcagaagtacgagaccgagggcagcagcaccaccggcttcaccagcagcctgagccccttcagcacccacatcacccagctgatggaggagaccaccaccgagaagaccagcctggaggacatcgacctgggcagcggcctgttcgagaagcccaaggccaccgagctgatcgagttcagcaccatcaaggtgaccgtgcccagcgacatcaccaccgccttcagcagcgtggacagactgcacaccaccagcgccttcaagcccagcagcgccatcaccaagaagccccccctgatcgacagagagcccggcgaggagaccaccagcgacatggtgatcatcggcgagagcaccagccacgtgccccccaccaccctggaggacatcgtggccaaggagaccgagaccgacatcgacagagagtacttcaccaccagcagcccccccgccacccagcccaccagaccccccaccgtggaggacaaggaggccttcggcccccaggccctgagcaccccccagccccccgccagcaccaagttccaccccgacatcaacgtgtacatcatcgaggtgagagagaacaagaccggccccgacagatgcaagatgaacccctgcctgaacggcggcacctgctaccccaccgagaccagctacgtgtgcacctgcgtgcccggctacagcggcgaccagtgcgagctggacttcgacgagtgccacagcaacccctgcagaaacggcgccacctgcgtggacggcttcaacaccttcagatgcctgtgcctgcccagctacgtgggcgccctgtgcgagcaggacaccgagacctgcgactacggctggcacaagttccagggccagtgctacaagtacttcgcccacagaagaacctgggacgccgccgagagagagtgcagactgcagggcgcccacctgaccagcatcctgagccacgaggagcagatgttcgtgaacagagtgggccacgactaccagtggatcggcctgaacgacaagatgttcgagcacgacttcagatggaccgacggcagcaccctgcagtacgagaactggagacccaaccagcccgacagcttcttcagcgccggcgaggactgcgtggtgatcatctggcacgagaacggccagtggaacgacgtgccctgcaactaccacctgacctacacctgcaagaagggcaccgtggcctgcggccagccccccgtggtggagaacgccaagaccttcggcaagatgaagcccagatacgagatcaacagcctgatcagataccactgcaaggacggcttcatccagagacacctgcccaccatcagatgcctgggcaacggcagatgggccatccccaagatcacctgcatgaaccccagcgcctaccagagaacctacagcatgaagtacttcaagaacagcagcagcgccaaggacaacagcatcaacaccagcaagcacgaccacagatggagcagaagatggcaggagagcagaagatag

SEQ ID NO: 13461 - DNA, 1968 bp, synthetic construct
  misc_feature 1..1968: note = Description of Artificial Sequence: Synthetic coding sequence
  source 1..1968: mol_type = other DNA
atgttcatcaacatcaagagcatcctgtggatgtgcagcaccctgatcgtgacccacgccctgcacaaggtgaaggtgggcaagagcccccccgtgagaggcagcctgagcggcaaggtgagcctgccctgccacttcagcaccatgcccaccctgccccccagctacaacaccagcgagttcctgagaatcaagtggagcaagatcgaggtggacaagaacggcaaggacctgaaggagaccaccgtgctggtggcccagaacggcaacatcaagatcggccaggactacaagggcagagtgagcgtgcccacccaccccgaggccgtgggcgacgccagcctgaccgtggtgaagctgctggccagcgacgccggcctgtacagatgcgacgtgatgtacggcatcgaggacacccaggacaccgtgagcctgaccgtggacggcgtggtgttccactacagagccgccaccagcagatacaccctgaacttcgaggccgcccagaaggcctgcctggacgtgggcgccgtgatcgccacccccgagcagctgttcgccgcctacgaggacggcttcgagcagtgcgacgccggctggctggccgaccagaccgtgagataccccatcagagcccccagagtgggctgctacggcgacaagatgggcaaggccggcgtgagaacctacggcttcagaagcccccaggagacctacgacgtgtactgctacgtggaccacctggacggcgacgtgttccacctgaccgtgcccagcaagttcaccttcgaggaggccgccaaggagtgcgagaaccaggacgccagactggccaccgtgggcgagctgcaggccgcctggagaaacggcttcgaccagtgcgactacggctggctgagcgacgccagcgtgagacaccccgtgaccgtggccagagcccagtgcggcggcggcctgctgggcgtgagaaccctgtacagattcgagaaccagaccggcttccccccccccgacagcagattcgacgcctactgcttcaagagacccgacagatgcaagatgaacccctgcctgaacggcggcacctgctaccccaccgagaccagctacgtgtgcacctgcgtgcccggctacagcggcgaccagtgcgagctggacttcgacgagtgccacagcaacccctgcagaaacggcgccacctgcgtggacggcttcaacaccttcagatgcctgtgcctgcccagctacgtgggcgccctgtgcgagcaggacaccgagacctgcgactacggctggcacaagttccagggccagtgctacaagtacttcgcccacagaagaacctgggacgccgccgagagagagtgcagactgcagggcgcccacctgaccagcatcctgagccacgaggagcagatgttcgtgaacagagtgggccacgactaccagtggatcggcctgaacgacaagatgttcgagcacgacttcagatggaccgacggcagcaccctgcagtacgagaactggagacccaaccagcccgacagcttcttcagcgccggcgaggactgcgtggtgatcatctggcacgagaacggccagtggaacgacgtgccctgcaactaccacctgacctacacctgcaagaagggcaccgtggcctgcggccagccccccgtggtggagaacgccaagaccttcggcaagatgaagcccagatacgagatcaacagcctgatcagataccactgcaaggacggcttcatccagagacacctgcccaccatcagatgcctgggcaacggcagatgggccatccccaagatcacctgcatgaaccccagcgcctaccagagaacctacagcatgaagtacttcaagaacagcagcagcgccaaggacaacagcatcaacaccagcaagcacgaccacagatggagcagaagatggcaggagagcagaagatag

SEQ ID NO: 13462 - DNA, 1440 bp, synthetic construct
  misc_feature 1..1440: note = Description of Artificial Sequence: Synthetic coding sequence
  source 1..1440: mol_type = other DNA
atggccagcaccatcaaggaggccctgagcgtggtgagcgaggaccagagcctgttcgagtgcgcctacggcaccccccacctggccaagaccgagatgaccgccagcagcagcagcgactacggccagaccagcaagatgagccccagagtgccccagcaggactggctgagccagccccccgccagagtgaccatcaagatggagtgcaaccccagccaggtgaacggcagcagaaacagccccgacgagtgcagcgtggccaagggcggcaagatggtgggcagccccgacaccgtgggcatgaactacggcagctacatggaggagaagcacatgcccccccccaacatgaccaccaacgagagaagagtgatcgtgcccgccgaccccaccctgtggagcaccgaccacgtgagacagtggctggagtgggccgtgaaggagtacggcctgcccgacgtgaacatcctgctgttccagaacatcgacggcaaggagctgtgcaagatgaccaaggacgacttccagagactgacccccagctacaacgccgacatcctgctgagccacctgcactacctgagagagacccccctgccccacctgaccagcgacgacgtggacaaggccctgcagaacagccccagactgatgcacgccagaaacaccggcggcgccgccttcatcttccccaacaccagcgtgtaccccgaggccacccagagaatcaccaccagacccgacctgccctacgagccccccagaagaagcgcctggaccggccacggccaccccaccccccagagcaaggccgcccagcccagccccagcaccgtgcccaagaccgaggaccagagaccccagctggacccctaccagatcctgggccccaccagcagcagactggccaaccccggcagcggccagatccagctgtggcagttcctgctggagctgctgagcgacagcagcaacagcagctgcatcacctgggagggcaccaacggcgagttcaagatgaccgaccccgacgaggtggccagaagatggggcgagagaaagagcaagcccaacatgaactacgacaagctgagcagagccctgagatactactacgacaagaacatcatgaccaaggtgcacggcaagagatacgcctacaagttcgacttccacggcatcgcccaggccctgcagccccacccccccgagagcagcctgtacaagtaccccagcgacctgccctacatgggcagctaccacgcccacccccagaagatgaacttcgtggccccccacccccccgccctgcccgtgaccagcagcagcttcttcgccgcccccaacccctactggaacagccccaccggcggcatctaccccaacaccagactgcccaccagccacatgcccagccacctgggcacctactactag

SEQ ID NO: 13463 - DNA, 1092 bp, synthetic construct
  misc_feature 1..1092: note = Description of Artificial Sequence: Synthetic coding sequence
  source 1..1092: mol_type = other DNA
atggtgggcagccccgacaccgtgggcatgaactacggcagctacatggaggagaagcacatgcccccccccaacatgaccaccaacgagagaagagtgatcgtgcccgccgaccccaccctgtggagcaccgaccacgtgagacagtggctggagtgggccgtgaaggagtacggcctgcccgacgtgaacatcctgctgttccagaacatcgacggcaaggagctgtgcaagatgaccaaggacgacttccagagactgacccccagctacaacgccgacatcctgctgagccacctgcactacctgagagagacccccctgccccacctgaccagcgacgacgtggacaaggccctgcagaacagccccagactgatgcacgccagaaacaccgacctgccctacgagccccccagaagaagcgcctggaccggccacggccaccccaccccccagagcaaggccgcccagcccagccccagcaccgtgcccaagaccgaggaccagagaccccagctggacccctaccagatcctgggccccaccagcagcagactggccaaccccggcagcggccagatccagctgtggcagttcctgctggagctgctgagcgacagcagcaacagcagctgcatcacctgggagggcaccaacggcgagttcaagatgaccgaccccgacgaggtggccagaagatggggcgagagaaagagcaagcccaacatgaactacgacaagctgagcagagccctgagatactactacgacaagaacatcatgaccaaggtgcacggcaagagatacgcctacaagttcgacttccacggcatcgcccaggccctgcagccccacccccccgagagcagcctgtacaagtaccccagcgacctgccctacatgggcagctaccacgcccacccccagaagatgaacttcgtggccccccacccccccgccctgcccgtgaccagcagcagcttcttcgccgcccccaacccctactggaacagccccaccggcggcatctaccccaacaccagactgcccaccagccacatgcccagccacctgggcacctactactag

SEQ ID NO: 13464 - DNA, 1389 bp, synthetic construct
  misc_feature 1..1389: note = Description of Artificial Sequence: Synthetic coding sequence
  source 1..1389: mol_type = other DNA
atgatccagaccgtgcccgaccccgccgcccacatcaaggaggccctgagcgtggtgagcgaggaccagagcctgttcgagtgcgcctacggcaccccccacctggccaagaccgagatgaccgccagcagcagcagcgactacggccagaccagcaagatgagccccagagtgccccagcaggactggctgagccagccccccgccagagtgaccatcaagatggagtgcaaccccagccaggtgaacggcagcagaaacagccccgacgagtgcagcgtggccaagggcggcaagatggtgggcagccccgacaccgtgggcatgaactacggcagctacatggaggagaagcacatgcccccccccaacatgaccaccaacgagagaagagtgatcgtgcccgccgaccccaccctgtggagcaccgaccacgtgagacagtggctggagtgggccgtgaaggagtacggcctgcccgacgtgaacatcctgctgttccagaacatcgacggcaaggagctgtgcaagatgaccaaggacgacttccagagactgacccccagctacaacgccgacatcctgctgagccacctgcactacctgagagagacccccctgccccacctgaccagcgacgacgtggacaaggccctgcagaacagccccagactgatgcacgccagaaacaccgacctgccctacgagccccccagaagaagcgcctggaccggccacggccaccccaccccccagagcaaggccgcccagcccagccccagcaccgtgcccaagaccgaggaccagagaccccagctggacccctaccagatcctgggccccaccagcagcagactggccaaccccggcagcggccagatccagctgtggcagttcctgctggagctgctgagcgacagcagcaacagcagctgcatcacctgggagggcaccaacggcgagttcaagatgaccgaccccgacgaggtggccagaagatggggcgagagaaagagcaagcccaacatgaactacgacaagctgagcagagccctgagatactactacgacaagaacatcatgaccaaggtgcacggcaagagatacgcctacaagttcgacttccacggcatcgcccaggccctgcagccccacccccccgagagcagcctgtacaagtaccccagcgacctgccctacatgggcagctaccacgcccacccccagaagatgaacttcgtggccccccacccccccgccctgcccgtgaccagcagcagcttcttcgccgcccccaacccctactggaacagccccaccggcggcatctaccccaacaccagactgcccaccagccacatgcccagccacctgggcacctactactag

SEQ ID NO: 13465 - DNA, 1461 bp, synthetic construct
  misc_feature 1..1461: note = Description of Artificial Sequence: Synthetic coding sequence
  source 1..1461: mol_type = other DNA
atgatccagaccgtgcccgaccccgccgcccacatcaaggaggccctgagcgtggtgagcgaggaccagagcctgttcgagtgcgcctacggcaccccccacctggccaagaccgagatgaccgccagcagcagcagcgactacggccagaccagcaagatgagccccagagtgccccagcaggactggctgagccagccccccgccagagtgaccatcaagatggagtgcaaccccagccaggtgaacggcagcagaaacagccccgacgagtgcagcgtggccaagggcggcaagatggtgggcagccccgacaccgtgggcatgaactacggcagctacatggaggagaagcacatgcccccccccaacatgaccaccaacgagagaagagtgatcgtgcccgccgaccccaccctgtggagcaccgaccacgtgagacagtggctggagtgggccgtgaaggagtacggcctgcccgacgtgaacatcctgctgttccagaacatcgacggcaaggagctgtgcaagatgaccaaggacgacttccagagactgacccccagctacaacgccgacatcctgctgagccacctgcactacctgagagagacccccctgccccacctgaccagcgacgacgtggacaaggccctgcagaacagccccagactgatgcacgccagaaacaccggcggcgccgccttcatcttccccaacaccagcgtgtaccccgaggccacccagagaatcaccaccagacccgacctgccctacgagccccccagaagaagcgcctggaccggccacggccaccccaccccccagagcaaggccgcccagcccagccccagcaccgtgcccaagaccgaggaccagagaccccagctggacccctaccagatcctgggccccaccagcagcagactggccaaccccggcagcggccagatccagctgtggcagttcctgctggagctgctgagcgacagcagcaacagcagctgcatcacctgggagggcaccaacggcgagttcaagatgaccgaccccgacgaggtggccagaagatggggcgagagaaagagcaagcccaacatgaactacgacaagctgagcagagccctgagatactactacgacaagaacatcatgaccaaggtgcacggcaagagatacgcctacaagttcgacttccacggcatcgcccaggccctgcagccccacccccccgagagcagcctgtacaagtaccccagcgacctgccctacatgggcagctaccacgcccacccccagaagatgaacttcgtggccccccacccccccgccctgcccgtgaccagcagcagcttcttcgccgcccccaacccctactggaacagccccaccggcggcatctaccccaacaccagactgcccaccagccacatgcccagccacctgggcacctactactag

SEQ ID NO: 13466 - DNA, 1461 bp, synthetic construct; identical to SEQ ID NO: 13465
  misc_feature 1..1461: note = Description of Artificial Sequence: Synthetic coding sequence
  source 1..1461: mol_type = other DNA

SEQ ID NO: 13467 - DNA, 516 bp, synthetic construct
  misc_feature 1..516: note = Description of Artificial Sequence: Synthetic coding sequence
  source 1..516: mol_type = other DNA
atggccagcaccatcaaggaggccctgagcgtggtgagcgaggaccagagcctgttcgagtgcgcctacggcaccccccacctggccaagaccgagatgaccgccagcagcagcagcgactacggccagaccagcaagatgagccccagagtgccccagcaggactggctgagccagccccccgccagagtgaccatcaagatggagtgcaaccccagccaggtgaacggcagcagaaacagccccgacgagtgcagcgtggccaagggcggcaagatggtgggcagccccgacaccgtgggcatgaactacggcagctacatggaggagaagcacatgcccccccccaacatgaccaccaacgagagaagagtgatcgtgcccgccgacctgccctacgagccccccagaagaagcgcctggaccggccacggccaccccaccccccagagcaagggcaccgtgctggcccccatgaccctgagcttcatgagccaggccgtggacgactgctag

SEQ ID NO: 13468 - DNA, 1389 bp, synthetic construct; identical to SEQ ID NO: 13464
  misc_feature 1..1389: note = Description of Artificial Sequence: Synthetic coding sequence
  source 1..1389: mol_type = other DNA

SEQ ID NO: 13469 - DNA, 1164 bp, synthetic construct
  misc_feature 1..1164: note = Description of Artificial Sequence: Synthetic coding sequence
  source 1..1164: mol_type = other DNA
atggtgggcagccccgacaccgtgggcatgaactacggcagctacatggaggagaagcacatgcccccccccaacatgaccaccaacgagagaagagtgatcgtgcccgccgaccccaccctgtggagcaccgaccacgtgagacagtggctggagtgggccgtgaaggagtacggcctgcccgacgtgaacatcctgctgttccagaacatcgacggcaaggagctgtgcaagatgaccaaggacgacttccagagactgacccccagctacaacgccgacatcctgctgagccacctgcactacctgagagagacccccctgccccacctgaccagcgacgacgtggacaaggccctgcagaacagccccagactgatgcacgccagaaacaccggcggcgccgccttcatcttccccaacaccagcgtgtaccccgaggccacccagagaatcaccaccagacccgacctgccctacgagccccccagaagaagcgcctggaccggccacggccaccccaccccccagagcaaggccgcccagcccagccccagcaccgtgcccaagaccgaggaccagagaccccagctggacccctaccagatcctgggccccaccagcagcagactggccaaccccggcagcggccagatccagctgtggcagttcctgctggagctgctgagcgacagcagcaacagcagctgcatcacctgggagggcaccaacggcgagttcaagatgaccgaccccgacgaggtggccagaagatggggcgagagaaagagcaagcccaacatgaactacgacaagctgagcagagccctgagatactactacgacaagaacatcatgaccaaggtgcacggcaagagatacgcctacaagttcgacttccacggcatcgcccaggccctgcagccccacccccccgagagcagcctgtacaagtaccccagcgacctgccctacatgggcagctaccacgcccacccccagaagatgaacttcgtggccccccacccccccgccctgcccgtgaccagcagcagcttcttcgccgcccccaacccctactggaacagccccaccggcggcatctaccccaacaccagactgcccaccagccacatgcccagccacctgggcacctactactag

SEQ ID NO: 13470 - DNA, 1410 bp, synthetic construct
  misc_feature 1..1410: note = Description of Artificial Sequence: Synthetic coding sequence
  source 1..1410: mol_type = other DNA
atgaacgacttcggcatcaagaacatggaccaggtggcccccgtggccaacagctacagaggcaccctgaagagacagcccgccttcgacaccttcgacggcagcctgttcgccgtgttccccagcctgaacgaggagcagaccctgcaggaggtgcccaccggcctggacagcatcagccacgacagcgccaactgcgagctgcccctgctgaccccctgcagcaaggccgtgatgagccaggccctgaaggccaccttcagcggcttcaagaaggagcagagaagactgggcatccccaagaacccctggctgtggagcgagcagcaggtgtgccagtggctgctgtgggccaccaacgagttcagcctggtgaacgtgaacctgcagagattcggcatgaacggccagatgctgtgcaacctgggcaaggagagattcctggagctggcccccgacttcgtgggcgacatcctgtgggagcacctggagcagatgatcaaggagaaccaggagaagaccgaggaccagtacgaggagaacagccacctgaccagcgtgccccactggatcaacagcaacaccctgggcttcggcaccgagcaggccccctacggcatgcagacccagaactaccccaagggcggcctgctggacagcatgtgccccgccagcacccccagcgtgctgagcagcgagcaggagttccagatgttccccaagagcagactgagcagcgtgagcgtgacctactgcagcgtgagccaggacttccccggcagcaacctgaacctgctgaccaacaacagcggcacccccaaggaccacgacagccccgagaacggcgccgacagcttcgagagcagcgacagcctgctgcagagctggaacagccagagcagcctgctggacgtgcagagagtgcccagcttcgagagcttcgaggacgactgcagccagagcctgtgcctgaacaagcccaccatgagcttcaaggactacatccaggagagaagcgaccccgtggagcagggcaagcccgtgatccccgccgccgtgctggccggcttcaccggcagcggccccatccagctgtggcagttcctgctggagctgctgagcgacaagagctgccagagcttcatcagctggaccggcgacggctgggagttcaagctggccgaccccgacgaggtggccagaagatggggcaagagaaagaacaagcccaagatgaactacgagaagctgagcagaggcctgagatactactacgacaagaacatcatccacaagaccagcggcaagagatacgtgtacagattcgtgtgcgacctgcagaacctgctgggcttcacccccgaggagctgcacgccatcctgggcgtgcagcccgacaccgaggactag

SEQ ID NO: 13471 - DNA, 1410 bp, synthetic construct; identical to SEQ ID NO: 13470
  misc_feature 1..1410: note = Description of Artificial Sequence: Synthetic coding sequence
  source 1..1410: mol_type = other DNA

SEQ ID NO: 13472 - DNA, 507 bp, synthetic construct
  misc_feature 1..507: note = Description of Artificial Sequence: Synthetic coding sequence
  source 1..507: mol_type = other DNA
atgaacgacttcggcatcaagaacatggaccaggtggcccccgtggccaacagctacagaggcaccctgaagagacagcccgccttcgacaccttcgacggcagcctgttcgccgtgttccccagcctgaacgaggagcagaccctgcaggaggtgcccaccggcctggacagcatcagccacgacagcgccaactgcgagctgcccctgctgaccccctgcagcaaggccgtgatgagccaggccctgaaggccaccttcagcggcttcaagaaggagcagagaagactgggcatccccaagaacccctggctgtggagcgagcagcaggtgtgccagtggctgctgtgggccaccaacgagttcagcctggtgaacgtgaacctgcagagattcggcatgaacggccagatgctgtgcaacctgggcaaggagagattcctggagctggcccccgacttcgtgggcgacatcctgtgggagcacctggagcagatgatcaagtag

SEQ ID NO: 13473 - DNA, 813 bp, synthetic construct
  misc_feature 1..813: note = Description of Artificial Sequence: Synthetic coding sequence
  source 1..813: mol_type = other DNA
atgaacgacttcggcatcaagaacatggaccaggtggcccccgtggccaacagctacagaggcaccctgaagagacagcccgccttcgacaccttcgacggcagcctgttcgccgtgttccccagcctgaacgaggagcagaccctgcaggaggtgcccaccggcctggacagcatcagccacgacagcgccaactgcgagctgcccctgctgaccccctgcagcaaggccgtgatgagccaggccctgaaggccaccttcagcggcttcaagaaggagcagagaagactgggcatccccaagaacccctggctgtggagcgagcagcaggtgtgccagtggctgctgtgggccaccaacgagttcagcctggtgaacgtgaacctgcagagattcggcatgaacggccagatgctgtgcaacctgggcaaggagagattcctggagctggcccccgacttcgtgggcgacatcctgtgggagcacctggagcagatgatcaaggagaaccaggagaagaccgaggaccagtacgaggagaacagccacctgaccagcgtgccccactggatcaacagcaacaccctgggcttcggcaccgagcaggccccctacggcatgcagacccagaactaccccaagggcggcctgctggacagcatgtgccccgccagcacccccagcgtgctgagcagcgagcaggagttccagatgttccccaagagcagactgagcagcgtgagcgtgacctactgcagcgtgagccaggacttccccggcagcaacctgaacctgctgaccaacaacagctag

SEQ ID NO: 13474 - DNA, 570 bp, synthetic construct
  misc_feature 1..570: note = Description of Artificial Sequence: Synthetic coding sequence
  source 1..570: mol_type = other DNA
atgaccgagtacaagctggtggtggtgggcgccggcggcgtgggcaagagcgccctgaccatccagctgatccagaaccacttcgtggacgagtacgaccccaccatcgaggacagctacagaaagcaggtggtgatcgacggcgagacctgcctgctggacatcctggacaccgccggccaggaggagtacagcgccatgagagaccagtacatgagaaccggcgagggcttcctgtgcgtgttcgccatcaacaacaccaagagcttcgaggacatccaccagtacagagagcagatcaagagagtgaaggacagcgacgacgtgcccatggtgctggtgggcaacaagtgcgacctggccgccagaaccgtggagagcagacaggcccaggacctggccagaagctacggcatcccctacatcgagaccagcgccaagaccagacagggcgtggaggacgccttctacaccctggtgagagagatcagacagcacaagctgagaaagctgaacccccccgacgagagcggccccggctgcatgagctgcaagtgcgtgctgagctag

SEQ ID NO: 13475 - DNA, 513 bp, synthetic construct
  misc_feature 1..513: note = Description of Artificial Sequence: Synthetic coding sequence
  source 1..513: mol_type = other DNA
atgaccgagtacaagctggtggtggtgggcgccggcggcgtgggcaagagcgccctgaccatccagctgatccagaaccacttcgtggacgagtacgaccccaccatcgaggacagctacagaaagcaggtggtgatcgacggcgagacctgcctgctggacatcctggacaccgccggccaggaggagtacagcgccatgagagaccagtacatgagaaccggcgagggcttcctgtgcgtgttcgccatcaacaacaccaagagcttcgaggacatccaccagtacagagagcagatcaagagagtgaaggacagcgacgacgtgcccatggtgctggtgggcaacaagtgcgacctggccgccagaaccgtggagagcagacaggcccaggacctggccagaagctacggcatcccctacatcgagaccagcgccaagaccagacagggcagcagaagcggcagcagcagcagcagcggcaccctgtgggacccccccggccccatgtag

SEQ ID NO: 13476 - DNA, 570 bp, synthetic construct; identical to SEQ ID NO: 13474
  misc_feature 1..570: note = Description of Artificial Sequence: Synthetic coding sequence
  source 1..570: mol_type = other DNA

SEQ ID NO: 13477 - DNA, 513 bp, synthetic construct; identical to SEQ ID NO: 13475
  misc_feature 1..513: note = Description of Artificial Sequence: Synthetic coding sequence
  source 1..513: mol_type = other DNA

SEQ ID NO: 13478 - DNA, 570 bp, synthetic construct; identical to SEQ ID NO: 13474
  misc_feature 1..570: note = Description of Artificial Sequence: Synthetic coding sequence
  source 1..570: mol_type = other DNA

SEQ ID NO: 13479 - DNA, 513 bp, synthetic construct; identical to SEQ ID NO: 13475
  misc_feature 1..513: note = Description of Artificial Sequence: Synthetic coding sequence
  source 1..513: mol_type = other DNA

SEQ ID NO: 13480 - DNA, 609 bp, synthetic construct
  misc_feature 1..609: note = Description of Artificial Sequence: Synthetic coding sequence
  source 1..609: mol_type = other DNA
atgctgccccccggcaccgccaccctgctgaccctgctgctggccgccggcagcctgggccagaagccccagagacccagaagacccgccagccccatcagcaccatccagcccaaggccaacttcgacgcccagcagttcgccggcacctggctgctggtggccgtgggcagcgcctgcagattcctgcaggagcagggccacagagccgaggccaccaccctgcacgtggccccccagggcaccgccatggccgtgagcaccttcagaaagctggacggcatctgctggcaggtgagacagctgtacggcgacaccggcgtgctgggcagattcctgctgcaggccagagacgccagaggcgccgtgcacgtggtggtggccgagaccgactaccagagcttcgccgtgctgtacctggagagagccggccagctgagcgtgaagctgtacgccagaagcctgcccgtgagcgacagcgtgctgagcggcttcgagcagagagtgcaggaggcccacctgaccgaggaccagatcttctacttccccaagtacggcttctgcgaggccgccgaccagttccacgtgctggacgaggtgagaagatag

SEQ ID NO: 13481 - DNA, 522 bp, synthetic construct
  misc_feature 1..522: note = Description of Artificial Sequence: Synthetic coding sequence
  source 1..522: mol_type = other DNA
ggcttcctggtgcccctgtggctgatgagaaactgcttcagactgcaggaggagatgctgcagagagaggaggccgagaacaccctgcagagcttcagacaggacgtggacaacgccagcctggccagactggacctggagagaaaggtggagagcctgcaggaggagatcgccttcctgaagaagctgcacgaggaggagatccaggagctgcaggcccagatccaggagcagcacgtgcagatcgacgtggacgtgagcaagcccgacctgaccgccgccctgagagacgtgagacagcagtacgagagcgtggccgccaagaacctgcaggaggccgaggagtggtacaagagcaagttcgccgacctgagcgaggccgccaacagaaacaacgacgccctgagacaggccaagcaggagagcaccgagtacagaagacaggtgcagagcctgacctgcgaggtggacgccctgaagggcaccgtgagcaccaaccccgccgtgaaggagggcaagtag

SEQ ID NO: 13482 - DNA, 687 bp, synthetic construct
  misc_feature 1..687: note = Description of Artificial Sequence: Synthetic coding sequence
  source 1..687: mol_type = other DNA
atgagaaactgcttcagactgcaggaggagatgctgcagagagaggaggccgagaacaccctgcagagcttcagacaggacgtggacaacgccagcctggccagactggacctggagagaaaggtggagagcctgcaggaggagatcgccttcctgaagaagctgcacgaggaggagatccaggagctgcaggcccagatccaggagcagcacgtgcagatcgacgtggacgtgagcaagcccgacctgaccgccgccctgagagacgtgagacagcagtacgagagcgtggccgccaagaacctgcaggaggccgaggagtggtacaagagcaagttcgccgacctgagcgaggccgccaacagaaacaacgacgccctgagacaggccaagcaggagagcaccgagtacagaagacaggtgcagagcctgacctgcgaggtggacgccctgaagggcaccaacgagagcctggagagacagatgagagagatggaggagaacttcgccgtggaggccgccaactaccaggacaccatcggcagactgcaggacgagatccagaacatgaaggaggagatggccagacacctgagagagtaccaggacctgctgaacgtgaagatggccctggacatcgagatcgccacctacagaaagctgctggagggcgaggagagcagatag

SEQ ID NO: 13483 - DNA, 1296 bp, synthetic construct
  misc_feature 1..1296: note = Description of Artificial Sequence: Synthetic coding sequence
  source 1..1296: mol_type = other DNA
atgagcaccagaagcgtgagcagcagcagctacagaagaatgttcggcggccccggcaccgccagcagacccagcagcagcagaagctacgtgaccaccagcaccagaacctacagcctgggcagcgccctgagacccagcaccagcagaagcctgtacgccagcagccccggcggcgtgtacgccaccagaagcagcgccgtgagactgagaagcagcgtgcccggcgtgagactgctgcaggacagcgtggacttcagcctggccgacgccatcaacaccgagttcaagaacaccagaaccaacgagaaggtggagctgcaggagctgaacgacagattcgccaactacatcgacaaggtgagattcctggagcagcagaacaagatcctgctggccgagctggagcagctgaagggccagggcaagagcagactgggcgacctgtacgaggaggagatgagagagctgagaagacaggtggaccagctgaccaacgacaaggccagagtggaggtggagagagacaacctggccgaggacatcatgagactgagagagaagctgcaggaggagatgctgcagagagaggaggccgagaacaccctgcagagcttcagacaggacgtggacaacgccagcctggccagactggacctggagagaaaggtggagagcctgcaggaggagatcgccttcctgaagaagctgcacgaggaggagatccaggagctgcaggcccagatccaggagcagcacgtgcagatcgacgtggacgtgagcaagcccgacctgaccgccgccctgagagacgtgagacagcagtacgagagcgtggccgccaagaacctgcaggaggccgaggagtggtacaagagcaagttcgccgacctgagcgaggccgccaacagaaacaacgacgccctgagacaggccaagcaggagagcaccgagtacagaagacaggtgcagagcctgacctgcgaggtggacgccctgaagggcaccaacgagagcctggagagacagatgagagagatggaggagaacttcgccgtggaggccgccaactaccaggacaccatcggcagactgcaggacgagatccagaacatgaaggaggagatggccagacacctgagagagtaccaggacctgctgaacgtgaagatggccctggacatcgagatcgccacctacagaaagctgctggagggcgaggagagcagaatcagcctgcccctgcccaacttcagcagcctgaacctgagaggcaagcacttcatcagcctgtag

SEQ ID NO: 13484 - DNA, 1401 bp, synthetic construct
  misc_feature 1..1401: note = Description of Artificial Sequence: Synthetic coding sequence
  source 1..1401: mol_type = other DNA
atgagcaccagaagcgtgagcagcagcagctacagaagaatgttcggcggccccggcaccgccagcagacccagcagcagcagaagctacgtgaccaccagcaccagaacctacagcctgggcagcgccctgagacccagcaccagcagaagcctgtacgccagcagccccggcggcgtgtacgccaccagaagcagcgccgtgagactgagaagcagcgtgcccggcgtgagactgctgcaggacagcgtggacttcagcctggccgacgccatcaacaccgagttcaagaacaccagaaccaacgagaaggtggagctgcaggagctgaacgacagattcgccaactacatcgacaaggtgagattcctggagcagcagaacaagatcctgctggccgagctggagcagctgaagggccagggcaagagcagactgggcgacctgtacgaggaggagatgagagagctgagaagacaggtggaccagctgaccaacgacaaggccagagtggaggtggagagagacaacctggccgaggacatcatgagactgagagagaagctgcaggaggagatgctgcagagagaggaggccgagaacaccctgcagagcttcagacaggacgtggacaacgccagcctggccagactggacctggagagaaaggtggagagcctgcaggaggagatcgccttcctgaagaagctgcacgaggaggagatccaggagctgcaggcccagatccaggagcagcacgtgcagatcgacgtggacgtgagcaagcccgacctgaccgccgccctgagagacgtgagacagcagtacgagagcgtggccgccaagaacctgcaggaggccgaggagtggtacaagagcaagttcgccgacctgagcgaggccgccaacagaaacaacgacgccctgagacaggccaagcaggagagcaccgagtacagaagacaggtgcagagcctgacctgcgaggtggacgccctgaagggcaccaacgagagcctggagagacagatgagagagatggaggagaacttcgccgtggaggccgccaactaccaggacaccatcggcagactgcaggacgagatccagaacatgaaggaggagatggccagacacctgagagagtaccaggacctgctgaacgtgaagatggccctggacatcgagatcgccacctacagaaagctgctggagggcgaggagagcagaatcagcctgcccctgcccaacttcagcagcctgaacctgagagagaccaacctggacagcctgcccctggtggacacccacagcaagagaaccctgctgatcaagaccgtggagaccagagacggccaggtgatcaacgagaccagccagcaccacgacgacctggagtag

SEQ ID NO: 13485 - DNA, 1224 bp, synthetic construct
  misc_feature 1..1224: note = Description of Artificial Sequence: Synthetic coding sequence
  source 1..1224: mol_type = other DNA
atgttcggcggccccggcaccgccagcagacccagcagcagcagaagctacgtgaccaccagcaccagaacctacagcctgggcagcgccctgagacccagcaccagcagaagcctgtacgccagcagccccggcggcgtgtacgccaccagaagcagcgccgtgagactgagaagcagcgtgcccggcgtgagactgctgcaggacagcgtggacttcagcctggccgacgccatcaacaccgagttcaagaacaccagaaccaacgagaaggtggagctgcaggagctgaacgacagattcgccaactacatcgacaaggtgagattcctggagcagcagaacaagatcctgctggccgagctggagcagctgaagggccagggcaagagcagactgggcgacctgtacgaggaggagatgagagagctgagaagacaggtggaccagctgaccaacgacaaggccagagtggaggtggagagagacaacctggccgaggacatcatgagactgagagagaagctgcaggaggagatgctgcagagagaggaggccgagaacaccctgcagagcttcagacaggacgtggacaacgccagcctggccagactggacctggagagaaaggtggagagcctgcaggaggagatcgccttcctgaagaagctgcacgaggaggagatccaggagctgcaggcccagatccaggagcagcacgtgcagatcgacgtggacgtgagcaagcccgacctgaccgccgccctgagagacgtgagacagcagtacgagagcgtggccgccaagaacctgcaggaggccgaggagtggtacaagagcaagttcgccgacctgagcgaggccgccaacagaaacaacgacgccctgagacaggccaagcaggagagcaccgagtacagaagacaggtgcagagcctgacctgcgaggtggacgccctgaagggcaccaacgagagcctggagagacagatgagagagatggaggagaacttcgccgtggaggccgccaactaccaggacaccatcggcagactgcaggacgagatccagaacatgaaggaggagatggccagacacctgagagagtaccaggacctgctgaacgtgaagatggccctggacatcgagatcgccacctacagaaagctgctggagggcgaggagagcagaatcctgtgcctgttccagaccttccccccctag

SEQ ID NO: 13486 - DNA, 2256 bp, synthetic construct
  misc_feature 1..2256: note = Description of Artificial Sequence: Synthetic coding sequence
  source 1..2256: mol_type = other DNA
atggaggacctgagcagccccgacagcaccctgctgcagggcggccacaacctgctgagcagcgccagcttccaggaggccgtgaccttcaaggacgtgatcgtggacttcacccaggaggagtggaagcagctggaccccggccagagagacctgttcagagacgtgaccctggagaactacacccacctggtgagcatcggcctgcaggtgagcaagcccgacgtgatcagccagctggagcagggcaccgagccctggatcatggagcccagcatccccgtgggcacctgcgccgactgggagaccagactggagaacagcgtgagcgcccccgagcccgacatcagcgaggaggagctgagccccgaggtgatcgtggagaagcacaagagagacgacagctggagcagcaacctgctggagagctgggagtacgagggcagcctggagagacagcaggccaaccagcagaccctgcccaaggagatcaaggtgaccgagaagaccatccccagctgggagaagggccccgtgaacaacgagttcggcaagagcgtgaacgtgagcagcaacctggtgacccaggagcccagccccgaggagaccagcaccaagagaagcatcaagcagaacagcaaccccgtgaagaaggagaagagctgcaagtgcaacgagtgcggcaaggccttcagctactgcagcgccctgatcagacaccagagaacccacaccggcgagaagccctacaagtgcaacgagtgcgagaaggccttcagcagaagcgagaacctgatcaaccaccagagaatccacaccggcgacaagccctacaagtgcgaccagtgcggcaagggcttcatcgagggccccagcctgacccagcaccagagaatccacaccggcgagaagccctacaagtgcgacgagtgcggcaaggccttcagccagagaacccacctggtgcagcaccagagaatccacaccggcgagaagccctacacctgcaacgagtgcggcaaggccttcagccagagaggccacttcatggagcaccagaagatccacaccggcgagaagcccttcaagtgcgacgagtgcgacaagaccttcaccagaagcacccacctgacccagcaccagaagatccacaccggcgagaagacctacaagtgcaacgagtgcggcaaggccttcaacggccccagcaccttcatcagacaccacatgatccacaccggcgagaagccctacgagtgcaacgagtgcggcaaggccttcagccagcacagcaacctgacccagcaccagaagacccacaccggcgagaagccctacgactgcgccgagtgcggcaagagcttcagctactggagcagcctggcccagcacctgaagatccacaccggcgagaagccctacaagtgcaacgagtgcggcaaggccttcagctactgcagcagcctgacccagcacagaagaatccacaccagagagaagcccttcgagtgcagcgagtgcggcaaggccttcagctacctgagcaacctgaaccagcaccagaagacccacacccaggagaaggcctacgagtgcaaggagtgcggcaaggccttcatcagaagcagcagcctggccaagcacgagagaatccacaccggcgagaagccctaccagtgccacgagtgcggcaagaccttcagctacggcagcagcctgatccagcacagaaagatccacaccggcgagagaccctacaagtgcaacgagtgcggcagagccttcaaccagaacatccacctgacccagcacaagagaatccacaccggcgccaagccctacgagtgcgccgagtgcggcaaggccttcagacactgcagcagcctggcccagcaccagaagacccacaccgaggagaagccctaccagtgcaacaagtgcgagaagaccttcagccagagcagccacctgacccagcaccagagaatccacaccggcgagaagccctacaagtgcaacgagtgcgacaaggccttcagcagaagcacccacctgaccgagcaccagaacacccacaccggcgagaagccctacaactgcaacgagtgcagaaagaccttcagccagagcacctacctgatccagcaccagagaatccacagcggcgagaagcccttcggctgcaacgactgcggcaagagcttcagatacagaagcgccctgaacaagcaccagagactgcaccccggcatctag

SEQ ID NO: 13487 - DNA, 3201 bp, synthetic construct
  misc_feature 1..3201: note = Description of Artificial Sequence: Synthetic coding sequence
  source 1..3201: mol_type = other DNA
atgcccgtgttccacaccagaaccatcgagagcatcctggagcccgtggcccagcagatcagccacctggtgatcatgcacgaggagggcgaggtggacggcaaggccatccccgacctgaccgcccccgtggccgccgtgcaggccgccgtgagcaacctggtgagagtgggcaaggagaccgtgcagaccaccgaggaccagatcctgaagagagacatgccccccgccttcatcaaggtggagaacgcctgcaccaagctggtgcaggccgcccagatgctgcagagcgacccctacagcgtgcccgccagagactacctgatcgacggcagcagaggcatcctgagcggcaccagcgacctgctgctgaccttcgacgaggccgaggtgagaaagatcatcagagtgtgcaagggcatcctggagtacctgaccgtggccgaggtggtggagaccatggaggacctggtgacctacaccaagaacctgggccccggcatgaccaagatggccaagatgatcgacgagagacagcaggagctgacccaccaggagcacagagtgatgctggtgaacagcatgaacaccgtgaaggagctgctgcccgtgctgatcagcgccatgaagatcttcgtgaccaccaagaacagcaagaaccagggcatcgaggaggccctgaagaacagaaacttcaccgtggagaagatgagcgccgagatcaacgagatcatcagagtgctgcagctgaccagctgggacgaggacgcctgggccagcaaggacaccgaggccatgaagagagccctggccagcatcgacagcaagctgaaccaggccaagggctggctgagagaccccagcgccagccccggcgacgccggcgagcaggccatcagacagatcctggacgaggccggcaaggtgggcgagctgtgcgccggcaaggagagaagagagatcctgggcacctgcaagatgctgggccagatgaccgaccaggtggccgacctgagagccagaggccagggcagcagccccgtggccatgcagaaggcccagcaggtgagccagggcctggacgtgctgaccgccaaggtggagaacgccgccagaaagctggaggccatgaccaacagcaagcagagcatcgccaagaagatcgacgccgcccagaactggctggccgaccccaacggcggccccgagggcgaggagcagatcagaggcgccctggccgaggccagaaagatcgccgagctgtgcgacgaccccaaggagagagacgacatcctgagaagcctgggcgagatcagcgccctgaccagcaagctggccgacctgagaagacagggcaagggcgacagccccgaggccagagccctggccaagcaggtggccaccgccctgcagaacctgcagaccaagaccaacagagccgtggccaacagcagacccgccaaggccgccgtgcacctggagggcaagatcgagcaggcccagagatggatcgacaaccccaccgtggacgacagaggcgtgggccaggccgccatcagaggcctggtggccgagggccacagactggccaacgtgatgatgggcccctacagacaggacctgctggccaagtgcgacagagtggaccagctgaccgcccagctggccgacctggccgccagaggcgagggcgagagcccccaggccagagccctggccagccagctgcaggacagcctgaaggacctgaaggccagaatgcaggaggccatgacccaggaggtgagcgacgtgttcagcgacaccaccacccccatcaagctgctggccgtggccgccaccgccccccccgacgcccccaacagagaggaggtgttcgacgagagagccgccaacttcgagaaccacagcggcaagctgggcgccaccgccgagaaggccgccgccgtgggcaccgccaacaagagcaccgtggagggcatccaggccagcgtgaagaccgccagagagctgaccccccaggtggtgagcgccgccagaatcctgctgagaaaccccggcaaccaggccgcctacgagcacttcgagaccatgaagaaccagtggatcgacaacgtggagaagatgaccggcctggtggacgaggccatcgacaccaagagcctgctggacgccagcgaggaggccatcaagaaggacctggacaagtgcaaggtggccatggccaacatccagccccagatgctggtggccggcgccaccagcatcgccagaagagccaacagaatcctgctggtggccaagagagaggtggagaacagcgaggaccccaagttcagagaggccgtgaaggccgccagcgacgagctgagcaagaccatcagccccatggtgatggacgccaaggccgtggccggcaacatcagcgaccccggcctgcagaagagcttcctggacagcggctacagaatcctgggcgccgtggccaaggtgagagaggccttccagccccaggagcccgacttccccccccccccccccgacctggagcagctgagactgaccgacgagctggccccccccaagccccccctgcccgagggcgaggtgcccccccccagaccccccccccccgaggagaaggacgaggagttccccgagcagaaggccggcgaggtgatcaaccagcccatgatgatggccgccagacagctgcacgacgaggccagaaagtggagcagcaagggcaacgacatcatcgccgccgccaagagaatggccctgctgatggccgagatgagcagactggtgagaggcggcagcggcaccaagagagccctgatccagtgcgccaaggacatcgccaaggccagcgacgaggtgaccagactggccaaggaggtggccaagcagtgcaccgacaagagaatcagaaccaacctgctgcaggtgtgcgagagaatccccaccatcagcacccagctgaagatcctgagcaccgtgaaggccaccatgctgggcagaaccaacatcagcgacgaggagagcgagcaggccaccgagatgctggtgcacaacgcccagaacctgatgcagagcgtgaaggagaccgtgagagaggccgaggccgccagcatcaagatcagaaccgacgccggcttcaccctgagatgggtgagaaagaccccctggtaccagtag

SEQ ID NO: 13488 - DNA, 2784 bp, synthetic construct
  misc_feature 1..2784: note = Description of Artificial Sequence: Synthetic coding sequence
  source 1..2784: mol_type = other DNA
atgctgcagagcgacccctacagcgtgcccgccagagactacctgatcgacggcagcagaggcatcctgagcggcaccagcgacctgctgctgaccttcgacgaggccgaggtgagaaagatcatcagagtgtgcaagggcatcctggagtacctgaccgtggccgaggtggtggagaccatggaggacctggtgacctacaccaagaacctgggccccggcatgaccaagatggccaagatgatcgacgagagacagcaggagctgacccaccaggagcacagagtgatgctggtgaacagcatgaacaccgtgaaggagctgctgcccgtgctgatcagcgccatgaagatcttcgtgaccaccaagaacagcaagaaccagggcatcgaggaggccctgaagaacagaaacttcaccgtggagaagatgagcgccgagatcaacgagatcatcagagtgctgcagctgaccagctgggacgaggacgcctgggccagcaaggacaccgaggccatgaagagagccctggccagcatcgacagcaagctgaaccaggccaagggctggctgagagaccccagcgccagccccggcgacgccggcgagcaggccatcagacagatcctggacgaggccggcaaggtgggcgagctgtgcgccggcaaggagagaagagagatcctgggcacctgcaagatgctgggccagatgaccgaccaggtggccgacctgagagccagaggccagggcagcagccccgtggccatgcagaaggcccagcaggtgagccagggcctggacgtgctgaccgccaaggtggagaacgccgccagaaagctggaggccatgaccaacagcaagcagagcatcgccaagaagatcgacgccgcccagaactggctggccgaccccaacggcggccccgagggcgaggagcagatcagaggcgccctggccgaggccagaaagatcgccgagctgtgcgacgaccccaaggagagagacgacatcctgagaagcctgggcgagatcagcgccctgaccagcaagctggccgacctgagaagacagggcaagggcgacagccccgaggccagagccctggccaagcaggtggccaccgccctgcagaacctgcagaccaagaccaacagagccgtggccaacagcagacccgccaaggccgccgtgcacctggagggcaagatcgagcaggcccagagatggatcgacaaccccaccgtggacgacagaggcgtgggccaggccgccatcagaggcctggtggccgagggccacagactggccaacgtgatgatgggcccctacagacaggacctgctggccaagtgcgacagagtggaccagctgaccgcccagctggccgacctggccgccagaggcgagggcgagagcccccaggccagagccctggccagccagctgcaggacagcctgaaggacctgaaggccagaatgcaggaggccatgacccaggaggtgagcgacgtgttcagcgacaccaccacccccatcaagctgctggccgtggccgccaccgccccccccgacgcccccaacagagaggaggtgttcgacgagagagccgccaacttcgagaaccacagcggcaagctgggcgccaccgccgagaaggccgccgccgtgggcaccgccaacaagagcaccgtggagggcatccaggccagcgtgaagaccgccagagagctgaccccccaggtggtgagcgccgccagaatcctgctgagaaaccccggcaaccaggccgcctacgagcacttcgagaccatgaagaaccagtggatcgacaacgtggagaagatgaccggcctggtggacgaggccatcgacaccaagagcctgctggacgccagcgaggaggccatcaagaaggacctggacaagtgcaaggtggccatggccaacatccagccccagatgctggtggccggcgccaccagcatcgccagaagagccaacagaatcctgctggtggccaagagagaggtggagaacagcgaggaccccaagttcagagaggccgtgaaggccgccagcgacgagctgagcaagaccatcagccccatggtgatggacgccaaggccgtggccggcaacatcagcgaccccggcctgcagaagagcttcctggacagcggctacagaatcctgggcgccgtggccaaggtgagagaggccttccagccccaggagcccgacttccccccccccccccccgacctggagcagctgagactgaccgacgagctggccccccccaagccccccctgcccgagggcgaggtgcccccccccagaccccccccccccgaggagaaggacgaggagttccccgagcagaaggccggcgaggtgatcaaccagcccatgatgatggccgccagacagctgcacgacgaggccagaaagtggagcagcaagcccggcatccccgccgccgaggtgggcatcggcgtggtggccgaggccgacgccgccgacgccgccggcttccccgtgccccccgacatggaggacgactacgagcccgagctgctgctgatgcccagcaaccagcccgtgaaccagcccatcctggccgccgcccagagcctgcacagagaggccaccaagtggagcagcaagggcaacgacatcatcgccgccgccaagagaatggccctgctgatggccgagatgagcagactggtgagaggcggcagcgtgcccagaaccagccccagaccccagatgagatag

SEQ ID NO: 13489 - DNA, 984 bp, synthetic construct
  misc_feature 1..984: note = Description of Artificial Sequence: Synthetic coding sequence
  source 1..984: mol_type = other DNA
atgcccgtgttccacaccagaaccatcgagagcatcctggagcccgtggcccagcagatcagccacctggtgatcatgcacgaggagggcgaggtggacggcaaggccatccccgacctgaccgcccccgtggccgccgtgcaggccgccgtgagcaacctggtgagagtgggcaaggagaccgtgcagaccaccgaggaccagatcctgaagagagacatgccccccgccttcatcaaggtggagaacgcctgcaccaagctggtgcaggccgcccagatgctgcagagcgacccctacagcgtgcccgccagagactacctgatcgacggcagcagaggcatcctgagcggcaccagcgacctgctgctgaccttcgacgaggccgaggtgcccccccccagaccccccccccccgaggagaaggacgaggagttccccgagcagaaggccggcgaggtgatcaaccagcccatgatgatggccgccagacagctgcacgacgaggccagaaagtggagcagcaagggcaacgacatcatcgccgccgccaagagaatggccctgctgatggccgagatgagcagactggtgagaggcggcagcggcaccaagagagccctgatccagtgcgccaaggacatcgccaaggccagcgacgaggtgaccagactggccaaggaggtggccaagcagtgcaccgacaagagaatcagaaccaacctgctgcaggtgtgcgagagaatccccaccatcagcacccagctgaagatcctgagcaccgtgaaggccaccatgctgggcagaaccaacatcagcgacgaggagagcgagcaggccaccgagatgctggtgcacaacgcccagaacctgatgcagagcgtgaaggagaccgtgagagaggccgaggccgccagcatcaagatcagaaccgacgccggcttcaccctgagatgggtgagaaagaccccctggtaccagtag

SEQ ID NO: 13490 - DNA, 2421 bp, synthetic construct
  misc_feature 1..2421: note = Description of Artificial Sequence: Synthetic coding sequence
  source 1..2421: mol_type = other DNA
ggccagatgaccgaccaggtggccgacctgagagccagaggccagggcagcagccccgtggccatgcagaaggcccagcaggtgagccagggcctggacgtgctgaccgccaaggtggagaacgccgccagaaagctggaggccatgaccaacagcaagcagagcatcgccaagaagatcgacgccgcccagaactggctggccgaccccaacggcggccccgagggcgaggagcagatcagaggcgccctggccgaggccagaaagatcgccgagctgtgcgacgaccccaaggagagagacgacatcctgagaagcctgggcgagatcagcgccctgaccagcaagctggccgacctgagaagacagggcaagggcgacagccccgaggccagagccctggccaagcaggtggccaccgccctgcagaacctgcagaccaagaccaacagagccgtggccaacagcagacccgccaaggccgccgtgcacctggagggcaagatcgagcaggcccagagatggatcgacaaccccaccgtggacgacagaggcgtgggccaggccgccatcagaggcctggtggccgagggccacagactggccaacgtgatgatgggcccctacagacaggacctgctggccaagtgcgacagagtggaccagctgaccgcccagctggccgacctggccgccagaggcgagggcgagagcccccaggccagagccctggccagccagctgcaggacagcctgaaggacctgaaggccagaatgcaggaggccatgacccaggaggtgagcgacgtgttcagcgacaccaccacccccatcaagctgctggccgtggccgccaccgccccccccgacgcccccaacagagaggaggtgttcgacgagagagccgccaacttcgagaaccacagcggcaagctgggcgccaccgccgagaaggccgccgccgtgggcaccgccaacaagagcaccgtggagggcatccaggccagcgtgaagaccgccagagagctgaccccccaggtggtgagcgccgccagaatcctgctgagaaaccccggcaaccaggccgcctacgagcacttcgagaccatgaagaaccagtggatcgacaacgtggagaagatgaccggcctggtggacgaggccatcgacaccaagagcctgctggacgccagcgaggaggccatcaagaaggacctggacaagtgcaaggtggccatggccaacatccagccccagatgctggtggccggcgccaccagcatcgccagaagagccaacagaatcctgctggtggccaagagagaggtggagaacagcgaggaccccaagttcagagaggccgtgaaggccgccagcgacgagctgagcaagaccatcagccccatggtgatggacgccaaggccgtggccggcaacatcagcgaccccggcctgcagaagagcttcctggacagcggctacagaatcctgggcgccgtggccaaggtgagagaggccttccagccccaggagcccgacttccccccccccccccccgacctggagcagctgagactgaccgacgagctggccccccccaagccccccctgcccgagggcgaggtgcccccccccagaccccccccccccgaggagaaggacgaggagttccccgagcagaaggccggcgaggtgatcaaccagcccatgatgatggccgccagacagctgcacgacgaggccagaaagtggagcagcaagcccggcatccccgccgccgaggtgggcatcggcgtggtggccgaggccgacgccgccgacgccgccggcttccccgtgccccccgacatggaggacgactacgagcccgagctgctgctgatgcccagcaaccagcccgtgaaccagcccatcctggccgccgcccagagcctgcacagagaggccaccaagtggagcagcaagggcaacgacatcatcgccgccgccaagagaatggccctgctgatggccgagatgagcagactggtgagaggcggcagcggcaccaagagagccctgatccagtgcgccaaggacatcgccaaggccagcgacgaggtgaccagactggccaaggaggtggccaagcagtgcaccgacaagagaatcagaaccaacctgctgcaggtgtgcgagagaatccccaccatcagcacccagctgaagatcctgagcaccgtgaaggccaccatgctgggcagaaccaacatcagcgacgaggagagcgagcaggccaccgagatgctggtgcacaacgcccagaacctgatgcagagcgtgaaggagaccgtgagagaggccgaggccgccagcatcaagatcagaaccgacgccggcttcaccctgagatgggtgagaaagaccccctggtaccagtag

SEQ ID NO: 13491 - DNA, 3021 bp, synthetic construct
  misc_feature 1..3021: note = Description of Artificial Sequence: Synthetic coding sequence
  source 1..3021: mol_type = other DNA
atgccccccgccttcatcaaggtggagaacgcctgcaccaagctggtgcaggccgcccagatgctgcagagcgacccctacagcgtgcccgccagagactacctgatcgacggcagcagaggcatcctgagcggcaccagcgacctgctgctgaccttcgacgaggccgaggtgagaaagatcatcagagtgtgcaagggcatcctggagtacctgaccgtggccgaggtggtggagaccatggaggacctggtgacctacaccaagaacctgggccccggcatgaccaagatggccaagatgatcgacgagagacagcaggagctgacccaccaggagcacagagtgatgctggtgaacagcatgaacaccgtgaaggagctgctgcccgtgctgatcagcgccatgaagatcttcgtgaccaccaagaacagcaagaaccagggcatcgaggaggccctgaagaacagaaacttcaccgtggagaagatgagcgccgagatcaacgagatcatcagagtgctgcagctgaccagctgggacgaggacgcctgggccagcaaggacaccgaggccatgaagagagccctggccagcatcgacagcaagctgaaccaggccaagggctggctgagagaccccagcgccagccccggcgacgccggcgagcaggccatcagacagatcctggacgaggccggcaaggtgggcgagctgtgcgccggcaaggagagaagagagatcctgggcacctgcaagatgctgggccagatgaccgaccaggtggccgacctgagagccagaggccagggcagcagccccgtggccatgcagaaggcccagcaggtgagccagggcctggacgtgctgaccgccaaggtggagaacgccgccagaaagctggaggccatgaccaacagcaagcagagcatcgccaagaagatcgacgccgcccagaactggctggccgaccccaacggcggccccgagggcgaggagcagatcagaggcgccctggccgaggccagaaagatcgccgagctgtgcgacgaccccaaggagagagacgacatcctgagaagcctgggcgagatcagcgccctgaccagcaagctggccgacctgagaagacagggcaagggcgacagccccgaggccagagccctggccaagcaggtggccaccgccctgcagaacctgcagaccaagaccaacagagccgtggccaacagcagacccgccaaggccgccgtgcacctggagggcaagatcgagcaggcccagagatggatcgacaaccccaccgtggacgacagaggcgtgggccaggccgccatcagaggcctggtggccgagggccacagactggccaacgtgatgatgggcccctacagacaggacctgctggccaagtgcgacagagtggaccagctgaccgcccagctggccgacctggccgccagaggcgagggcgagagcccccaggccagagccctggccagccagctgcaggacagcctgaaggacctgaaggccagaatgcaggaggccatgacccaggaggtgagcgacgtgttcagcgacaccaccacccccatcaagctgctggccgtggccgccaccgccccccccgacgcccccaacagagaggaggtgttcgacgagagagccgccaacttcgagaaccacagcggcaagctgggcgccaccgccgagaaggccgccgccgtgggcaccgccaacaagagcaccgtggagggcatccaggccagcgtgaagaccgccagagagctgaccccccaggtggtgagcgccgccagaatcctgctgagaaaccccggcaaccaggccgcctacgagcacttcgagaccatgaagaaccagtggatcgacaacgtggagaagatgaccggcctggtggacgaggccatcgacaccaagagcctgctggacgccagcgaggaggccatcaagaaggacctggacaagtgcaaggtggccatggccaacatccagccccagatgctggtggccggcgccaccagcatcgccagaagagccaacagaatcctgctggtggccaagagagaggtggagaacagcgaggaccccaagttcagagaggccgtgaaggccgccagcgacgagctgagcaagaccatcagccccatggtgatggacgccaaggccgtggccggcaacatcagcgaccccggcctgcagaagagcttcctggacagcggctacagaatcctgggcgccgtggccaaggtgagagaggccttccagccccaggagcccgacttccccccccccccccccgacctggagcagctgagactgaccgacgagctggccccccccaagccccccctgcccgagggcgaggtgcccccccccagaccccccccccccgaggagaaggacgaggagttccccgagcagaaggccggcgaggtgatcaaccagcccatgatgatggccgccagacagctgcacgacgaggccagaaagtggagcagcaagggcaacgacatcatcgccgccgccaagagaatggccctgctgatggccgagatgagcagactggtgagaggcggcagcggcaccaagagagccctgatccagtgcgccaaggacatcgccaaggccagcgacgaggtgaccagactggccaaggaggtggccaagcagtgcaccgacaagagaatcagaaccaacctgctgcaggtgtgcgagagaatccccaccatcagcacccagctgaagatcctgagcaccgtgaaggccaccatgctgggcagaaccaacatcagcgacgaggagagcgagcaggccaccgagatgctggtgcacaacgcccagaacctgatgcagagcgtgaaggagaccgtgagagagctgaagctgctgcagagcaagttcgagcagatgctggacctgcactgcgccggcctggagagactgcccggcaccagcagacacctggccgagcccggctggcacagaaacctgtactag

SEQ ID NO: 13492 - DNA, 570 bp, synthetic construct
  misc_feature 1..570: note = Description of Artificial Sequence: Synthetic coding sequence
  source 1..570: mol_type = other DNA
atgaccgagtacaagctggtggtggtgggcgccggcggcgtgggcaagagcgccctgaccatccagctgatccagaaccacttcgtggacgagtacgaccccaccatcgaggacagctacagaaagcaggtggtgatcgacggcgagacctgcctgctggacatcctggacaccgccggccaggaggagtacagcgccatgagagaccagtacatgagaaccggcgagggcttcctgtgcgtgttcgccatcaacaacaccaagagcttcgaggacatccaccactacagagagcagatcaagagagtgaaggacagcgaggacgtgcccatggtgctggtgggcaacaagtgcgacctgcccagcagaaccgtggacaccaagcaggcccaggacctggccagaagctacggcatccccttcatcgagaccagcgccaagaccagacagagagtggaggacgccttctacaccctggtgagagagatcagacagtacagactgaagaagatcagcaaggaggagaagacccccggctgcgtgaagatcaagaagtgcatcatcatgtag

SEQ ID NO: 13493 - DNA, 567 bp, synthetic construct
  misc_feature 1..567: note = Description of Artificial Sequence: Synthetic coding sequence
  source 1..567: mol_type = other DNA
atgaccgagtacaagctggtggtggtgggcgccggcggcgtgggcaagagcgccctgaccatccagctgatccagaaccacttcgtggacgagtacgaccccaccatcgaggacagctacagaaagcaggtggtgatcgacggcgagacctgcctgctggacatcctggacaccgccggccaggaggagtacagcgccatgagagaccagtacatgagaaccggcgagggcttcctgtgcgtgttcgccatcaacaacaccaagagcttcgaggacatccaccactacagagagcagatcaagagagtgaaggacagcgaggacgtgcccatggtgctggtgggcaacaagtgcgacctgcccagcagaaccgtggacaccaagcaggcccaggacctggccagaagctacggcatccccttcatcgagaccagcgccaagaccagacagggcgtggacgacgccttctacaccctggtgagagagatcagaaagcacaaggagaagatgagcaaggacggcaagaagaagaagaagaagagcaagaccaagtgcgtgatcatgtag

SEQ ID NO: 13494 - DNA, 228 bp, synthetic construct
  misc_feature 1..228: note = Description of Artificial Sequence: Synthetic coding sequence
  source 1..228: mol_type = other DNA
atgaccgagtacaagctggtggtggtgggcgccggcggcgtgggcaagagcgccctgaccatccagctgatccagaaccacttcgtggacgagtacgaccccaccatcgagggcgtggacgacgccttctacaccctggtgagagagatcagaaagcacaaggagaagatgagcaaggacggcaagaagaagaagaagaagagcaagaccaagtgcgtgatcatgtag

SEQ ID NO: 13495 - DNA, 2931 bp, synthetic construct
  misc_feature 1..2931: note = Description of Artificial Sequence: Synthetic coding sequence
  source 1..2931: mol_type = other DNA
atgagaggcgccagaggcgcctgggacttcctgtgcgtgctgctgctgctgctgagagtgcagaccggcagcagccagcccagcgtgagccccggcgagcccagcccccccagcatccaccccggcaagagcgacctgatcgtgagagtgggcgacgagatcagactgctgtgcaccgaccccggcttcgtgaagtggaccttcgagatcctggacgagaccaacgagaacaagcagaacgagtggatcaccgagaaggccgaggccaccaacaccggcaagtacacctgcaccaacaagcacggcctgagcaacagcatctacgtgttcgtgagagaccccgccaagctgttcctggtggacagaagcctgtacggcaaggaggacaacgacaccctggtgagatgccccctgaccgaccccgaggtgaccaactacagcctgaagggctgccagggcaagcccctgcccaaggacctgagattcatccccgaccccaaggccggcatcatgatcaagagcgtgaagagagcctaccacagactgtgcctgcactgcagcgtggaccaggagggcaagagcgtgctgagcgagaagttcatcctgaaggtgagacccgccttcaaggccgtgcccgtggtgagcgtgagcaaggccagctacctgctgagagagggcgaggagttcaccgtgacctgcaccatcaaggacgtgagcagcagcgtgtacagcacctggaagagagagaacagccagaccaagctgcaggagaagtacaacagctggcaccacggcgacttcaactacgagagacaggccaccctgaccatcagcagcgccagagtgaacgacagcggcgtgttcatgtgctacgccaacaacaccttcggcagcgccaacgtgaccaccaccctggaggtggtggacaagggcttcatcaacatcttccccatgatcaacaccaccgtgttcgtgaacgacggcgagaacgtggacctgatcgtggagtacgaggccttccccaagcccgagcaccagcagtggatctacatgaacagaaccttcaccgacaagtgggaggactaccccaagagcgagaacgagagcaacatcagatacgtgagcgagctgcacctgaccagactgaagggcaccgagggcggcacctacaccttcctggtgagcaacagcgacgtgaacgccgccatcgccttcaacgtgtacgtgaacaccaagcccgagatcctgacctacgacagactggtgaacggcatgctgcagtgcgtggccgccggcttccccgagcccaccatcgactggtacttctgccccggcaccgagcagagatgcagcgccagcgtgctgcccgtggacgtgcagaccctgaacagcagcggcccccccttcggcaagctggtggtgcagagcagcatcgacagcagcgccttcaagcacaacggcaccgtggagtgcaaggcctacaacgacgtgggcaagaccagcgcctacttcaacttcgccttcaagggcaacaacaaggagcagatccacccccacaccctgttcacccccctgctgatcggcttcgtgatcgtggccggcatgatgtgcatcatcgtgatgatcctgacctacaagtacctgcagaagcccatgtacgaggtgcagtggaaggtggtggaggagatcaacggcaacaactacgtgtacatcgaccccacccagctgccctacgaccacaagtgggagttccccagaaacagactgagcttcggcaagaccctgggcgccggcgccttcggcaaggtggtggaggccaccgcctacggcctgatcaagagcgacgccgccatgaccgtggccgtgaagatgctgaagcccagcgcccacctgaccgagagagaggccctgatgagcgagctgaaggtgctgagctacctgggcaaccacatgaacatcgtgaacctgctgggcgcctgcaccatcggcggccccaccctggtgatcaccgagtactgctgctacggcgacctgctgaacttcctgagaagaaagagagacagcttcatctgcagcaagcaggaggaccacgccgaggccgccctgtacaagaacctgctgcacagcaaggagagcagctgcagcgacagcaccaacgagtacatggacatgaagcccggcgtgagctacgtggtgcccaccaaggccgacaagagaagaagcgtgagaatcggcagctacatcgagagagacgtgacccccgccatcatggaggacgacgagctggccctggacctggaggacctgctgagcttcagctaccaggtggccaagggcatggccttcctggccagcaagaactgcatccacagagacctggccgccagaaacatcctgctgacccacggcagaatcaccaagatctgcgacttcggcctggccagagacatcaagaacgacagcaactacgtggtgaagggcaacgccagactgcccgtgaagtggatggcccccgagagcatcttcaactgcgtgtacaccttcgagagcgacgtgtggagctacggcatcttcctgtgggagctgttcagcctgggcagcagcccctaccccggcatgcccgtggacagcaagttctacaagatgatcaaggagggcttcagaatgctgagccccgagcacgcccccgccgagatgtacgacatcatgaagacctgctgggacgccgaccccctgaagagacccaccttcaagcagatcgtgcagctgatcgagaagcagatcagcgagagcaccaaccacatctacagcaacctggccaactgcagccccaacagacagaagcccgtggtggaccacagcgtgagaatcaacagcgtgggcagcaccgccagcagcagccagcccctgctggtgcacgacgacgtgtag

SEQ ID NO: 13496 - DNA, 2919 bp, synthetic construct
  misc_feature 1..2919: note = Description of Artificial Sequence: Synthetic coding sequence
  source 1..2919: mol_type = other DNA
atgagaggcgccagaggcgcctgggacttcctgtgcgtgctgctgctgctgctgagagtgcagaccggcagcagccagcccagcgtgagccccggcgagcccagcccccccagcatccaccccggcaagagcgacctgatcgtgagagtgggcgacgagatcagactgctgtgcaccgaccccggcttcgtgaagtggaccttcgagatcctggacgagaccaacgagaacaagcagaacgagtggatcaccgagaaggccgaggccaccaacaccggcaagtacacctgcaccaacaagcacggcctgagcaacagcatctacgtgttcgtgagagaccccgccaagctgttcctggtggacagaagcctgtacggcaaggaggacaacgacaccctggtgagatgccccctgaccgaccccgaggtgaccaactacagcctgaagggctgccagggcaagcccctgcccaaggacctgagattcatccccgaccccaaggccggcatcatgatcaagagcgtgaagagagcctaccacagactgtgcctgcactgcagcgtggaccaggagggcaagagcgtgctgagcgagaagttcatcctgaaggtgagacccgccttcaaggccgtgcccgtggtgagcgtgagcaaggccagctacctgctgagagagggcgaggagttcaccgtgacctgcaccatcaaggacgtgagcagcagcgtgtacagcacctggaagagagagaacagccagaccaagctgcaggagaagtacaacagctggcaccacggcgacttcaactacgagagacaggccaccctgaccatcagcagcgccagagtgaacgacagcggcgtgttcatgtgctacgccaacaacaccttcggcagcgccaacgtgaccaccaccctggaggtggtggacaagggcttcatcaacatcttccccatgatcaacaccaccgtgttcgtgaacgacggcgagaacgtggacctgatcgtggagtacgaggccttccccaagcccgagcaccagcagtggatctacatgaacagaaccttcaccgacaagtgggaggactaccccaagagcgagaacgagagcaacatcagatacgtgagcgagctgcacctgaccagactgaagggcaccgagggcggcacctacaccttcctggtgagcaacagcgacgtgaacgccgccatcgccttcaacgtgtacgtgaacaccaagcccgagatcctgacctacgacagactggtgaacggcatgctgcagtgcgtggccgccggcttccccgagcccaccatcgactggtacttctgccccggcaccgagcagagatgcagcgccagcgtgctgcccgtggacgtgcagaccctgaacagcagcggcccccccttcggcaagctggtggtgcagagcagcatcgacagcagcgccttcaagcacaacggcaccgtggagtgcaaggcctacaacgacgtgggcaagaccagcgcctacttcaacttcgccttcaaggagcagatccacccccacaccctgttcacccccctgctgatcggcttcgtgatcgtggccggcatgatgtgcatcatcgtgatgatcctgacctacaagtacctgcagaagcccatgtacgaggtgcagtggaaggtggtggaggagatcaacggcaacaactacgtgtacatcgaccccacccagctgccctacgaccacaagtgggagttccccagaaacagactgagcttcggcaagaccctgggcgccggcgccttcggcaaggtggtggaggccaccgcctacggcctgatcaagagcgacgccgccatgaccgtggccgtgaagatgctgaagcccagcgcccacctgaccgagagagaggccctgatgagcgagctgaaggtgctgagctacctgggcaaccacatgaacatcgtgaacctgctgggcgcctgcaccatcggcggccccaccctggtgatcaccgagtactgctgctacggcgacctgctgaacttcctgagaagaaagagagacagcttcatctgcagcaagcaggaggaccacgccgaggccgccctgtacaagaacctgctgcacagcaaggagagcagctgcagcgacagcaccaacgagtacatggacatgaagcccggcgtgagctacgtggtgcccaccaaggccgacaagagaagaagcgtgagaatcggcagctacatcgagagagacgtgacccccgccatcatggaggacgacgagctggccctggacctggaggacctgctgagcttcagctaccaggtggccaagggcatggccttcctggccagcaagaactgcatccacagagacctggccgccagaaacatcctgctgacccacggcagaatcaccaagatctgcgacttcggcctggccagagacatcaagaacgacagcaactacgtggtgaagggcaacgccagactgcccgtgaagtggatggcccccgagagcatcttcaactgcgtgtacaccttcgagagcgacgtgtggagctacggcatcttcctgtgggagctgttcagcctgggcagcagcccctaccccggcatgcccgtggacagcaagttctacaagatgatcaaggagggcttcagaatgctgagccccgagcacgcccccgccgagatgtacgacatcatgaagacctgctgggacgccgaccccctgaagagacccaccttcaagcagatcgtgcagctgatcgagaagcagatcagcgagagcaccaaccacatctacagcaacctggccaactgcagccccaacagacagaagcccgtggtggaccacagcgtgagaatcaacagcgtgggcagcaccgccagcagcagccagcccctgctggtgcacgacgacgtgtag

SEQ ID NO: 13497 - DNA, 1242 bp, synthetic construct
  misc_feature 1..1242: note = Description of Artificial Sequence: Synthetic coding sequence
  source 1..1242: mol_type = other DNA
atgagaggcgccagaggcgcctgggacttcctgtgcgtgctgctgctgctgctgagagtgcagaccggcagcagccagcccagcgtgagccccggcgagcccagcccccccagcatccaccccggcaagagcgacctgatcgtgagagtgggcgacgagatcagactgctgtgcaccgaccccggcttcgtgaagtggaccttcgagatcctggacgagaccaacgagaacaagcagaacgagtggatcaccgagaaggccgaggccaccaacaccggcaagtacacctgcaccaacaagcacggcctgagcaacagcatctacgtgttcgtgagagaccccgccaagctgttcctggtggacagaagcctgtacggcaaggaggacaacgacaccctggtgagatgccccctgaccgaccccgaggtgaccaactacagcctgaagggctgccagggcaagcccctgcccaaggacctgagattcatccccgaccccaaggccggcatcatgatcaagagcgtgaagagagcctaccacagactgtgcctgcactgcagcgtggaccaggagggcaagagcgtgctgagcgagaagttcatcctgaaggtgagacccgccttcaaggccgtgcccgtggtgagcgtgagcaaggccagctacctgctgagagagggcgaggagttcaccgtgacctgcaccatcaaggacgtgagcagcagcgtgtacagcacctggaagagagagaacagccagaccaagctgcaggagaagtacaacagctggcaccacggcgacttcaactacgagagacaggccaccctgaccatcagcagcgccagagtgaacgacagcggcgtgttcatgtgctacgccaacaacaccttcggcagcgccaacgtgaccaccaccctggaggtggtggacaagggcttcatcaacatcttccccatgatcaacaccaccgtgttcgtgaacgacggcgagaacgtggacctgatcgtggagtacgaggccttccccaagcccgagcaccagcagtggatctacatgaacagaaccttcaccgacaagtgggaggactaccccaagagcgagaacgagagcaacatcagatacgtgagcgagctgcacctgaccagactgaagggcaccgagggcggcacctacaccttcctggtgagcaacagcgacgtgaacgccgccatcgccttcaacgtgtacgtgaacagcaagctgtag

SEQ ID NO: 13498 - DNA, 1212 bp, synthetic construct
  misc_feature 1..1212: note = Description of Artificial Sequence: Synthetic coding sequence
  source 1..1212: mol_type = other DNA
atggccagcgagctggccatgagcaacagcgacctgcccaccagccccctggccatggagtacgtgaacgacttcgacctgatgaagttcgaggtgaagaaggagcccgtggagaccgacagaatcatcagccagtgcggcagactgatcgccggcggcagcctgagcagcacccccatgagcaccccctgcagcagcgtgccccccagccccagcttcagcgcccccagccccggcagcggcagcgagcagaaggcccacctggaggactactactggatgaccggctacccccagcagctgaaccccgaggccctgggcttcagccccgaggacgccgtggaggccctgatcagcaacagccaccagctgcagggcggcttcgacggctacgccagaggcgcccagcagctggccgccgccgccggcgccggcgccggcgccagcctgggcggcagcggcgaggagatgggccccgccgccgccgtggtgagcgccgtgatcgccgccgccgccgcccagagcggcgccggcccccactaccaccaccaccaccaccacgccgccggccaccaccaccaccccaccgccggcgcccccggcgccgccggcagcgccgccgccagcgccggcggcgccggcggcgccggcggcggcggccccgccagcgccggcggcggcggcggcggcggcggcggcggcggcggcggcggcgccgccggcgccggcggcgccctgcacccccaccacgccgccggcggcctgcacttcgacgacagattcagcgacgagcagctggtgaccatgagcgtgagagagctgaacagacagctgagaggcgtgagcaaggaggaggtgatcagactgaagcagaagagaagaaccctgaagaacagaggctacgcccagagctgcagattcaagagagtgcagcagagacacgtgctggagagcgagaagaaccagctgctgcagcaggtggaccacctgaagcaggagatcagcagactggtgagagagagagacgcctacaaggagaagtacgagaagctggtgagcagcggcttcagagagaacggcagcagcagcgacaaccccagcagccccgagttcttcatcaccgagcccaccagaaagctggagcccagcgtgggctacgccaccttctggaagccccagcacagagtgctgaccagcgtgttcaccaagtag

SEQ ID NO: 13499 - DNA, 1122 bp, synthetic construct
  misc_feature 1..1122: note = Description of Artificial Sequence: Synthetic coding sequence
  source 1..1122: mol_type = other DNA
atggccagcgagctggccatgagcaacagcgacctgcccaccagccccctggccatggagtacgtgaacgacttcgacctgatgaagttcgaggtgaagaaggagcccgtggagaccgacagaatcatcagccagtgcggcagactgatcgccggcggcagcctgagcagcacccccatgagcaccccctgcagcagcgtgccccccagccccagcttcagcgcccccagccccggcagcggcagcgagcagaaggcccacctggaggactactactggatgaccggctacccccagcagctgaaccccgaggccctgggcttcagccccgaggacgccgtggaggccctgatcagcaacagccaccagctgcagggcggcttcgacggctacgccagaggcgcccagcagctggccgccgccgccggcgccggcgccggcgccagcctgggcggcagcggcgaggagatgggccccgccgccgccgtggtgagcgccgtgatcgccgccgccgccgcccagagcggcgccggcccccactaccaccaccaccaccaccacgccgccggccaccaccaccaccccaccgccggcgcccccggcgccgccggcagcgccgccgccagcgccggcggcgccggcggcgccggcggcggcggccccgccagcgccggcggcggcggcggcggcggcggcggcggcggcggcggcggcgccgccggcgccggcggcgccctgcacccccaccacgccgccggcggcctgcacttcgacgacagattcagcgacgagcagctggtgaccatgagcgtgagagagctgaacagacagctgagaggcgtgagcaaggaggaggtgatcagactgaagcagaagagaagaaccctgaagaacagaggctacgcccagagctgcagattcaagagagtgcagcagagacacgtgctggagagcgagaagaaccagctgctgcagcaggtggaccacctgaagcaggagatcagcagactggtgagagagagagacgcctacaaggagaagtacgagaagctggtgagcagcggcttcagagagaacggcagcagcagcgacaaccccagcagccccgagttcttcatgtag

SEQ ID NO: 13500 - DNA, 1062 bp, synthetic construct
  misc_feature 1..1062: note = Description of Artificial Sequence: Synthetic coding sequence
  source 1..1062: mol_type = other DNA
atggccgccgagctggccatgggcgccgagctgcccagcagccccctggccatcgagtacgtgaacgacttcgacctgatgaagttcgaggtgaagaaggagccccccgaggccgagagattctgccacagactgccccccggcagcctgagcagcacccccctgagcaccccctgcagcagcgtgcccagcagccccagcttctgcgcccccagccccggcaccggcggcggcggcggcgccggcggcggcggcggcagcagccaggccggcggcgcccccggcccccccagcggcggccccggcgccgtgggcggcaccagcggcaagcccgccctggaggacctgtactggatgagcggctaccagcaccacctgaaccccgaggccctgaacctgacccccgaggacgccgtggaggccctgatcggcagcggccaccacggcgcccaccacggcgcccaccaccccgccgccgccgccgcctacgaggccttcagaggccccggcttcgccggcggcggcggcgccgacgacatgggcgccggccaccaccacggcgcccaccacgccgcccaccaccaccacgccgcccaccaccaccaccaccaccaccaccaccacggcggcgccggccacggcggcggcgccggccaccacgtgagactggaggagagattcagcgacgaccagctggtgagcatgagcgtgagagagctgaacagacagctgagaggcttcagcaaggaggaggtgatcagactgaagcagaagagaagaaccctgaagaacagaggctacgcccagagctgcagattcaagagagtgcagcagagacacatcctggagagcgagaagtgccagctgcagagccaggtggagcagctgaagctggaggtgggcagactggccaaggagagagacctgtacaaggagaagtacgagaagctggccggcagaggcggccccggcagcgccggcggcgccggcttccccagagagcccagccccccccaggccggccccggcggcgccaagggcaccgccgacttcttcctgtag

SEQ ID NO: 13501 - DNA, 972 bp, synthetic construct
  misc_feature 1..972: note = Description of Artificial Sequence: Synthetic coding sequence
  source 1..972: mol_type = other DNA
atggccgccgagctgagcatgggccccgagctgcccaccagccccctggccatggagtacgtgaacgacttcgacctgctgaagttcgacgtgaagaaggagcccctgggcagagccgagagacccggcagaccctgcaccagactgcagcccgccggcagcgtgagcagcacccccctgagcaccccctgcagcagcgtgcccagcagccccagcttcagccccaccgagcagaagacccacctggaggacctgtactggatggccagcaactaccagcagatgaaccccgaggccctgaacctgacccccgaggacgccgtggaggccctgatcggcagccaccccgtgccccagcccctgcagagcttcgacagcttcagaggcgcccaccaccaccaccaccaccaccacccccacccccaccacgcctaccccggcgccggcgtggcccacgacgagctgggcccccacgcccacccccaccaccaccaccaccaccaggccagccccccccccagcagcgccgccagccccgcccagcagctgcccaccagccaccccggccccggcccccacgccaccgccagcgccaccgccgccggcggcaacggcagcgtggaggacagattcagcgacgaccagctggtgagcatgagcgtgagagagctgaacagacacctgagaggcttcaccaaggacgaggtgatcagactgaagcagaagagaagaaccctgaagaacagaggctacgcccagagctgcagatacaagagagtgcagcagaagcaccacctggagaacgagaagacccagctgatccagcaggtggagcagctgaagcaggaggtgagcagactggccagagagagagacgcctacaaggtgaagtgcgagaagctggccaacagcggcttcagagaggccggcagcaccagcgacagccccagcagccccgagttcttcctgtag

SEQ ID NO: 13502 - DNA, 972 bp, synthetic construct; identical to SEQ ID NO: 13501
  misc_feature 1..972: note = Description of Artificial Sequence: Synthetic coding sequence
  source 1..972: mol_type = other DNA

SEQ ID NO: 13503 - DNA, 1233 bp, synthetic construct
  misc_feature 1..1233: note = Description of Artificial Sequence: Synthetic coding sequence
  source 1..1233: mol_type = other DNA
atggccaagagaagcagaagcgaggacgaggacgacgacctgcagtacgccgaccacgactacgaggtgccccagcagaagggcctgaagaagctgtggaacagagtgaagtggaccagagacgaggacgacaagctgaagaagctggtggagcagcacggcaccgacgactggaccctgatcgccagccacctgcagaacagaagcgacttccagtgccagcacagatggcagaaggtgctgaaccccgagctgatcaagggcccctggaccaaggaggaggaccagagagtgatcgagctggtgcagaagtacggcaagaagagaaagatgagagtgggccacagccccggcagcgagctgagagacggcagcctgaacgacggcggcaacatggccctgaagcacacccccctgaagaccctgcccttcagccccagccagttcttcaacacctgccccggcaacgagcagctgaacatcgagaaccccagcttcaccagcacccccatctgcggccagaaggccctgatcaccacccccctgcacaaggagaccacccccaaggaccagaaggagaacgtgggcttcagaacccccaccatcagaagaagcatcctgggcaccacccccagaacccccacccccttcaagaacgccctggccgcccaggagaagaagtacggccccctgaagatcgtgagccagcccctggccttcctggaggaggacatcagagaggtgctgaaggaggagaccggcaccgacctgttcctgaaggaggaggacgagcccgcctacaagagctgcaagcaggagaacaccgccagcggcaagaaggtgagaaagagcctggtgctggacaactgggagaaggaggagagcggcacccagctgctgaccgaggacatcagcgacatgcagagcgagaacagattcaccaccagcctgctgatgatccccctgctggagatccacgacaacagatgcaacctgatccccgagaagcaggacatcaacagcaccaacaagacctacaccctgaccaagaagaagcccaaccccaacaccagcaaggtggtgaagctggagaagaacctgcagagcaactgcgagtgggagaccgtggtgtacggcaagaccgaggaccagctgatcatgaccgagcaggccagaagatacctgagcacctacaccgccaccagcagcaccagcagagccctgatcctgtag

SEQ ID NO: 13504 - DNA, 2259 bp, synthetic construct
  misc_feature 1..2259: note = Description of Artificial Sequence: Synthetic coding sequence
  source 1..2259: mol_type = other DNA
atggccaagagaagcagaagcgaggacgaggacgacgacctgcagtacgccgaccacgactacgaggtgccccagcagaagggcctgaagaagctgtggaacagagtgaagtggaccagagacgaggacgacaagctgaagaagctggtggagcagcacggcaccgacgactggaccctgatcgccagccacctgcagaacagaagcgacttccagtgccagcacagatggcagaaggtgctgaaccccgagctgatcaagggcccctggaccaaggaggaggaccagagagtgatcgagctggtgcagaagtacggccccaagagatggagcctgatcgccaagcacctgaagggcagaatcggcaagcagtgcagagagagatggcacaaccacctgaaccccgaggtgaagaagagcagctggaccgaggaggaggacagaatcatctacgaggcccacaagagactgggcaacagatgggccgagatcgccaagctgctgcccggcagaaccgacaacagcatcaagaaccactggaacagcaccatgagaagaaaggtggagcaggagggctacctgcaggacggcatcaagagcgagagaagcagcagcaagctgcagcacaagccctgcgccgccatggaccacatgcagacccagaaccagttctacatccccgtgcagatccccggctaccagtacgtgagccccgagggcaactgcatcgagcacgtgcagcccaccagcgccttcatccagcagcccttcatcgacgaggaccccgacaaggagaagaagatcaaggagctggagatgctgctgatgagcgccgagaacgaggtgagaagaaagagaatccccagccagcccggcagcttcagcagctggagcggcagcttcctgatggacgacaacatgagcaacaccctgaacagcctggacgagcacaccagcgagttctacagcatggacgagaaccagcccgtgagcgcccagcagaacagccccaccaagttcctggccgtggaggccaacgccgtgctgagcagcctgcagaccatccccgagttcgccgagaccctggagctgatcgagagcgaccccgtggcctggagcgacgtgaccagcttcgacatcagcgacgccgccgccagccccatcaagagcacccccgtgaagctgatgagaatccagcacaacgagggcgccatggagtgccagttcaacgtgagcctggtgctggagggcaagaagaacacctgcaacggcggcaacagcgaggccgtgcccctgaccagccccaacatcgccaagttcagcaccccccccgccatcctgagaaagaagagaaagatgagagtgggccacagccccggcagcgagctgagagacggcagcctgaacgacggcggcaacatggccctgaagcacacccccctgaagaccctgcccttcagccccagccagttcttcaacacctgccccggcaacgagcagctgaacatcgagaaccccagcttcaccagcacccccatctgcggccagaaggccctgatcaccacccccctgcacaaggagaccacccccaaggaccagaaggagaacgtgggcttcagaacccccaccatcagaagaagcatcctgggcaccacccccagaacccccacccccttcaagaacgccctggccgcccaggagaagaagtacggccccctgaagatcgtgagccagcccctggccttcctggaggaggacatcagagaggtgctgaaggaggagaccggcaccgacctgttcctgaaggaggaggacgagcccgcctacaagagctgcaagcaggagaacaccgccagcggcaagaaggtgagaaagagcctggtgctggacaactgggagaaggaggagagcggcacccagctgctgaccgaggacatcagcgacatgcagagcgagaacagattcaccaccagcctgctgatgatccccctgctggagatccacgacaacagatgcaacctgatccccgagaagcaggacatcaacagcaccaacaagacctacaccctgaccaagaagaagcccaaccccaacaccagcaaggtggtgaagctggagaagaacctgcagagcaactgcgagtgggagaccgtggtgtacggcaagaccgaggaccagctgatcatgaccgagcaggccagaagatacctgagcacctacaccgccaccagcagcaccagcagagccctgatcctgtag

SEQ ID NO: 13505 - DNA, 2079 bp, synthetic construct
  misc_feature 1..2079: note = Description of Artificial Sequence: Synthetic coding sequence
  source 1..2079: mol_type = other DNA
atggccaagagaagcagaagcgaggacgaggacgacgacctgcagtacgccgaccacgactacgaggtgccccagcagaagggcctgaagaagctgtggaacagagtgaagtggaccagagacgaggacgacaagctgaagaagctggtggagcagcacggcaccgacgactggaccctgatcgccagccacctgcagaacagaagcgacttccagtgccagcacagatggcagaaggtgctgaaccccgagctgatcaagggcccctggaccaaggaggaggaccagagagtgatcgagctggtgcagaagtacggccccaagagatggagcctgatcgccaagcacctgaagggcagaatcggcaagcagtgcagagagagatggcacaaccacctgaaccccgaggtgaagaagagcagctggaccgaggaggaggacagaatcatctacgaggcccacaagagactgggcaacagatgggccgagatcgccaagctgctgcccggcagaaccgacaacagcatcaagaaccactggaacagcaccatgagaagaaaggtggagcaggagggctacctgcaggacggcatcaagagcgagagaagcagcagcaagctgcagcacaagccctgcgccgccatggaccacatgcagacccagaaccagttctacatccccgtgcagatccccggctaccagtacgtgagccccgagggcaactgcatcgagcacgtgcagcccaccagcgccttcatccagcagcccttcatcgacgaggaccccgacaaggagaagaagatcaaggagctggagatgctgctgatgagcgccgagaacgaggtgagaagaaagagaatccccagccagcccggcagcttcagcagctggagcggcagcttcctgatggacgacaacatgagcaacaccctgaacagcctggacgagcacaccagcgagttctacagcatggacgagaaccagcccgtgagcgcccagcagaacagccccaccaagttcctggccgtggaggccaacgccgtgctgagcagcctgcagaccatccccgagttcgccgagaccctggagctgatcgagagcgaccccgtggcctggagcgacgtgaccagcttcgacatcagcgacgccgccgccagccccatcaagagcacccccgtgaagctgatgagaatccagcacaacgagggcgccatggagtgccagttcaacgtgagcctggtgctggagggcaagaagaacacctgcaacggcggcaacagcgaggccgtgcccctgaccagccccaacatcgccaagttcagcaccccccccgccatcctgagaaagaagagaaagatgagagtgggccacagccccggcagcgagctgagagacggcagcctgaacgacggcggcaacatggccctgaagcacacccccctgaagaccctgcccttcagccccagccagttcttcaacacctgccccggcaacgagcagctgaacatcgagaaccccagcttcaccagcacccccatctgcggccagaaggccctgatcaccacccccctgcacaaggagaccacccccaaggaccagaaggagaacgtgggcttcagaacccccaccatcagaagaagcatcctgggcaccacccccagaacccccacccccttcaagaacgccctggccgcccaggagaagaagtacggccccctgaagatcgtgagccagcccctggccttcctggaggaggacatcagagaggtgctgaaggaggagaccggcaccgacctgttcctgaaggaggaggacgagcccgcctacaagagctgcaagcaggagaacaccgccagcggcaagaaggtgagaaagagcctggtgctggacaactgggagaaggaggagagcggcacccagctgctgaccgaggacatcagcgacatgcagagcaactgcgagtgggagaccgtggtgtacggcaagaccgaggaccagctgatcatgaccgagcaggccagaagatacctgagcacctacaccgccaccagcagcaccagcagagccctgatcctgtag

SEQ ID NO: 13506 - DNA, 711 bp, synthetic construct
  misc_feature 1..711: note = Description of Artificial Sequence: Synthetic coding sequence
  source 1..711: mol_type = other DNA
atgtgcgtgtgcgccggctgcagagccgcccccagcagaagaggcgccggccccctgcaggtggccggcggctggagcgagggcgccgacatggactacgacagctaccagcactacttctacgactacgactgcggcgaggacttctacagaagcaccgcccccagcgaggacatctggaagaagttcgagctggtgcccagcccccccaccagccccccctggggcctgggccccggcgccggcgaccccgcccccggcatcggcccccccgagccctggcccggcggctgcaccggcgacgaggccgagagcagaggccacagcaagggctggggcagaaactacgccagcatcatcagaagagactgcatgtggagcggcttcagcgccagagagagactggagagagccgtgagcgacagactggcccccggcgcccccagaggcaacccccccaaggccagcgccgcccccgactgcacccccagcctggaggccggcaaccccgcccccgccgccccctgccccctgggcgagcccaagacccaggcctgcagcggcagcgagagccccagcgacagcggcaaggacctgcccgagcccagcaagagaggccccccccacggctggcccaagctgtgcccctgcctgagaagcggcatcggcagcagccaggccctgggccccagcccccccctgttcggctag

SEQ ID NO: 13507 - DNA, 1095 bp, synthetic construct
  misc_feature 1..1095: note = Description of Artificial Sequence: Synthetic coding sequence
  source 1..1095: mol_type = other DNA
atggactacgacagctaccagcactacttctacgactacgactgcggcgaggacttctacagaagcaccgcccccagcgaggacatctggaagaagttcgagctggtgcccagcccccccaccagccccccctggggcctgggccccggcgccggcgaccccgcccccggcatcggcccccccgagccctggcccggcggctgcaccggcgacgaggccgagagcagaggccacagcaagggctggggcagaaactacgccagcatcatcagaagagactgcatgtggagcggcttcagcgccagagagagactggagagagccgtgagcgacagactggcccccggcgcccccagaggcaacccccccaaggccagcgccgcccccgactgcacccccagcctggaggccggcaaccccgcccccgccgccccctgccccctgggcgagcccaagacccaggcctgcagcggcagcgagagccccagcgacagcgagaacgaggagatcgacgtggtgaccgtggagaagagacagagcctgggcatcagaaagcccgtgaccatcaccgtgagagccgaccccctggacccctgcatgaagcacttccacatcagcatccaccagcagcagcacaactacgccgccagattcccccccgagagctgcagccaggaggaggccagcgagagaggcccccaggaggaggtgctggagagagacgccgccggcgagaaggaggacgaggaggacgaggagatcgtgagccccccccccgtggagagcgaggccgcccagagctgccaccccaagcccgtgagcagcgacaccgaggacgtgaccaagagaaagaaccacaacttcctggagagaaagagaagaaacgacctgagaagcagattcctggccctgagagaccaggtgcccaccctggccagctgcagcaaggcccccaaggtggtgatcctgagcaaggccctggagtacctgcaggccctggtgggcgccgagaagagaatggccaccgagaagagacagctgagatgcagacagcagcagctgcagaagagaatcgcctacctgaccggctactag

SEQ ID NO: 13508 - DNA, 1185 bp, synthetic construct
  misc_feature 1..1185: note = Description of Artificial Sequence: Synthetic coding sequence
  source 1..1185: mol_type = other DNA
atgtgcgtgtgcgccggctgcagagccgcccccagcagaagaggcgccggccccctgcaggtggccggcggctggagcgagggcgccgacatggactacgacagctaccagcactacttctacgactacgactgcggcgaggacttctacagaagcaccgcccccagcgaggacatctggaagaagttcgagctggtgcccagcccccccaccagccccccctggggcctgggccccggcgccggcgaccccgcccccggcatcggcccccccgagccctggcccggcggctgcaccggcgacgaggccgagagcagaggccacagcaagggctggggcagaaactacgccagcatcatcagaagagactgcatgtggagcggcttcagcgccagagagagactggagagagccgtgagcgacagactggcccccggcgcccccagaggcaacccccccaaggccagcgccgcccccgactgcacccccagcctggaggccggcaaccccgcccccgccgccccctgccccctgggcgagcccaagacccaggcctgcagcggcagcgagagccccagcgacagcgagaacgaggagatcgacgtggtgaccgtggagaagagacagagcctgggcatcagaaagcccgtgaccatcaccgtgagagccgaccccctggacccctgcatgaagcacttccacatcagcatccaccagcagcagcacaactacgccgccagattcccccccgagagctgcagccaggaggaggccagcgagagaggcccccaggaggaggtgctggagagagacgccgccggcgagaaggaggacgaggaggacgaggagatcgtgagccccccccccgtggagagcgaggccgcccagagctgccaccccaagcccgtgagcagcgacaccgaggacgtgaccaagagaaagaaccacaacttcctggagagaaagagaagaaacgacctgagaagcagattcctggccctgagagaccaggtgcccaccctggccagctgcagcaaggcccccaaggtggtgatcctgagcaaggccctggagtacctgcaggccctggtgggcgccgagaagagaatggccaccgagaagagacagctgagatgcagacagcagcagctgcagaagagaatcgcctacctgaccggctactag

SEQ ID NO: 13509 - DNA, 621 bp, synthetic construct
  misc_feature 1..621: note = Description of Artificial Sequence: Synthetic coding sequence
  source 1..621: mol_type = other DNA
atggactacgacagctaccagcactacttctacgactacgactgcggcgaggacttctacagaagcaccgcccccagcgaggacatctggaagaagttcgagctggtgcccagcccccccaccagccccccctggggcctgggccccggcgccggcgaccccgcccccggcatcggcccccccgagccctggcccggcggctgcaccggcgacgaggccgagagcagaggccacagcaagggctggggcagaaactacgccagcatcatcagaagagactgcatgtggagcggcttcagcgccagagagagactggagagagccgtgagcgacagactggcccccggcgcccccagaggcaacccccccaaggccagcgccgcccccgactgcacccccagcctggaggccggcaaccccgcccccgccgccccctgccccctgggcgagcccaagacccaggcctgcagcggcagcgagagccccagcgacagcggcaaggacctgcccgagcccagcaagagaggccccccccacggctggcccaagctgtgcccctgcctgagaagcggcatcggcagcagccaggccctgggccccagcccccccctgttcggctag

SEQ ID NO: 13510 - DNA, 303 bp, synthetic construct
  misc_feature 1..303: note = Description of Artificial Sequence: Synthetic coding sequence
  source 1..303: mol_type = other DNA
atggactacgacagctaccagcactacttctacgactacgactgcggcgaggacttctacagaagcaccgcccccagcgaggacatctggaagaagttcgagctggtgcccagcccccccaccagccccccctggggcctgggccccggcgccggcgaccccgcccccggcatcggcccccccgagccctggcccggcggctgcaccggcgacgaggccgagagcagaggccacagcaagggctggggcagaaactacgccagcatcatcagaagagactgcatgtggagcggcttcagctag

SEQ ID NO: 13511 - DNA, 642 bp, synthetic construct
  misc_feature 1..642: note = Description of Artificial Sequence: Synthetic coding sequence
  source 1..642: mol_type = other DNA
atgcccagaagagccgagaactgggacgaggccgaggtgggcgccgaggaggccggcgtggaggagtacggccccgaggaggacggcggcgaggagagcggcgccgaggagagcggccccgaggagagcggccccgaggagctgggcgccgaggaggagatggaggccggcagacccagacccgtgctgagaagcgtgaacagcagagagcccagccaggtgatcttctgcaacagaagccccagagtggtgctgcccgtgtggctgaacttcgacggcgagccccagccctaccccaccctgccccccggcaccggcagaagaatccacagctacagaggccacctgtggctgttcagagacgccggcacccacgacggcctgctggtgaaccagaccgagctgttcgtgcccagcctgaacgtggacggccagcccatcttcgccaacatcaccctgcccgtgtacaccctgaaggagagatgcctgcaggtggtgagaagcctggtgaagcccgagaactacagaagactggacatcgtgagaagcctgtacgaggacctggaggaccaccccaacgtgcagaaggacctggagagactgacccaggagagaatcgcccaccagagaatgggcgactag

SEQ ID NO: 13512 - DNA, 519 bp, synthetic construct
  misc_feature 1..519: note = Description of Artificial Sequence: Synthetic coding sequence
  source 1..519: mol_type = other DNA
atgcccagaagagccgagaactgggacgaggccgaggtgggcgccgaggaggccggcgtggaggagtacggccccgaggaggacggcggcgaggagagcggcgccgaggagagcggccccgaggagagcggccccgaggagctgggcgccgaggaggagatggaggccggcagacccagacccgtgctgagaagcgtgaacagcagagagcccagccaggtgatcttctgcaacagaagccccagagtggtgctgcccgtgtggctgaacttcgacggcgagccccagccctaccccaccctgccccccggcaccggcagaagaatccacagctacagagtgtacaccctgaaggagagatgcctgcaggtggtgagaagcctggtgaagcccgagaactacagaagactggacatcgtgagaagcctgtacgaggacctggaggaccaccccaacgtgcagaaggacctggagagactgacccaggagagaatcgcccaccagagaatgggcgactag

SEQ ID NO: 13513 - DNA, 396 bp, synthetic construct
  misc_feature 1..396: note = Description of Artificial Sequence: Synthetic coding sequence
  source 1..396: mol_type = other DNA
atgcccagaagagccgagaactgggacgaggccgaggtgggcgccgaggaggccggcgtggaggagtacggccccgaggaggacagctacagaggccacctgtggctgttcagagacgccggcacccacgacggcctgctggtgaaccagaccgagctgttcgtgcccagcctgaacgtggacggccagcccatcttcgccaacatcaccctgcccgtgtacaccctgaaggagagatgcctgcaggtggtgagaagcctggtgaagcccgagaactacagaagactggacatcgtgagaagcctgtacgaggacctggaggaccaccccaacgtgcagaaggacctggagagactgacccaggagagaatcgcccaccagagaatgggcgactag

SEQ ID NO: 13514 - DNA, 1281 bp, synthetic construct
  misc_feature 1..1281: note = Description of Artificial Sequence: Synthetic coding sequence
  source 1..1281: mol_type = other DNA
atggtgcacttctgcggcctgctgaccctgcacagagagcccgtgcccctgaagagcatcagcgtgagcgtgaacatctacgagttcgtggccggcgtgagcgccaccctgaactacgagaacgaggagaaggtgcccctggaggccttcttcgtgttccccatggacgaggacagcgccgtgtacagcttcgaggccctggtggacggcaagaagatcgtggccgagctgcaggacaagatgaaggccagaaccaactacgagaaggccatcagccagggccaccaggccttcctgctggagggcgacagcagcagcagagacgtgttcagctgcaacgtgggcaacctgcagcccggcagcaaggccgccgtgaccctgaagtacgtgcaggagctgcccctggaggccgacggcgccctgagattcgtgctgcccgccgtgctgaaccccagataccagttcagcggcagcagcaaggacagctgcctgaacgtgaagacccccatcgtgcccgtggaggacctgccctacaccctgagcatggtggccaccatcgacagccagcacggcatcgagaaggtgcagagcaactgccccctgagccccaccgagtacctgggcgaggacaagaccagcgcccaggtgagcctggccgccggccacaagttcgacagagacgtggagctgctgatctactacaacgaggtgcacacccccagcgtggtgctggagatgggcatgcccaacatgaagcccggccacctgatgggcgaccccagcgccatggtgagcttctaccccaacatccccgaggaccagcccagcaacacctgcggcgagttcatcttcctgatggacagaagcggcagcatgcagagccccatgagcagccaggacaccagccagctgagaatccaggccgccaaggagaccctgatcctgctgctgaagagcctgcccatcggctgctacttcaacatctacggcttcggcagcagctacgaggcctgcttccccgagagcgtgaagtacacccagcagaccatggaggaggccctgggcagagtgaagctgatgcaggccgacctgggcggcaccgagatcctggcccccctgcagaacatctacagaggccccagcatccccggccaccccctgcaggtgttcgagagaccctacaccctgaccgtgctgctgctgcacctgagccccgagggcaacctgtgcgtgatcagacccagacacagcagatggaccatcaccgtgagcgtgggctag

SEQ ID NO: 13515 - DNA, 2361 bp, synthetic construct
  misc_feature 1..2361: note = Description of Artificial Sequence: Synthetic coding sequence
  source 1..2361: mol_type = other DNA
atggtgcacttctgcggcctgctgaccctgcacagagagcccgtgcccctgaagagcatcagcgtgagcgtgaacatctacgagttcgtggccggcgtgagcgccaccctgaactacgagaacgaggagaaggtgcccctggaggccttcttcgtgttccccatggacgaggacagcgccgtgtacagcttcgaggccctggtggacggcaagaagatcgtggccgagctgcaggacaagatgaaggccagaaccaactacgagaaggccatcagccagggccaccaggccttcctgctggagggcgacagcagcagcagagacgtgttcagctgcaacgtgggcaacctgcagcccggcagcaaggccgccgtgaccctgaagtacgtgcaggagctgcccctggaggccgacggcgccctgagattcgtgctgcccgccgtgctgaaccccagataccagttcagcggcagcagcaaggacagctgcctgaacgtgaagacccccatcgtgcccgtggaggacctgccctacaccctgagcatggtggccaccatcgacagccagcacggcatcgagaaggtgcagagcaactgccccctgagccccaccgagtacctgggcgaggacaagaccagcgcccaggtgagcctggccgccggccacaagttcgacagagacgtggagctgctgatctactacaacgaggtgcacacccccagcgtggtgctggagatgggcatgcccaacatgaagcccggccacctgatgggcgaccccagcgccatggtgagcttctaccccaacatccccgaggaccagcccagcaacacctgcggcgagttcatcttcctgatggacagaagcggcagcatgcagagccccatgagcagccaggacaccagccagctgagaatccaggccgccaaggagaccctgatcctgctgctgaagagcctgcccatcggctgctacttcaacatctacggcttcggcagcagctacgaggcctgcttccccgagagcgtgaagtacacccagcagaccatggaggaggccctgggcagagtgaagctgatgcaggccgacctgggcggcaccgagatcctggcccccctgcagaacatctacagaggccccagcatccccggccaccccctgcagctgttcgtgttcaccgacggcgaggtgaccgacaccttcagcgtgatcaaggaggtgagaatcaacagacagaagcacagatgcttcagcttcggcatcggcgagggcaccagcaccagcctgatcaagggcatcgccagagccagcggcggcaccagcgagttcatcaccggcaaggacagaatgcagagcaaggccctgagaaccctgaagagaagcctgcagcccgtggtggaggacgtgagcctgagctggcacctgccccccggcctgagcgccaagatgctgagccccgagcagaccgtgatcttcagaggccagagactgatcagctacgcccagctgaccggcagaatgcccgccgccgagaccaccggcgaggtgtgcctgaagtacaccctgcagggcaagaccttcgaggacaaggtgaccttccccctgcagcccaagcccgacgtgaacctgaccatccacagactggccgccaagagcctgctgcagaccaaggacatgggcctgagagagacccccgccagcgacaagaaggacgccctgaacctgagcctggagagcggcgtgatcagcagcttcaccgccttcatcgccatcaacaaggagctgaacaagcccgtgcagggccccctggcccacagagacgtgcccagacccatcctgctgggcgccagcgcccccctgaagatcaagtgccagagcggcttcagaaaggccctgcacagcgacagaccccccagcgccagccagcccagaggcgagctgatgtgctacaaggccaagaccttccagatggacgactacagcctgtgcggcctgatcagccacaaggaccagcacagccccggcttcggcgagaaccacctggtgcagctgatctaccaccagaacgccaacggcagctgggacctgaacgaggacctggccaagatcctgggcatgagcctggaggagatcatggccgcccagcccgccgagctggtggacagcagcggctgggccaccatcctggccgtgatctggctgcacagcaacggcaaggacctgaagtgcgagtgggagctgctggagagaaaggccgtggcctggatgagagcccacgccggcagcaccatgcccagcgtggtgaaggccgccatcaccttcctgaagagcagcgtggaccccgccatcttcgccttctag

SEQ ID NO: 13516 - DNA, 1248 bp, synthetic construct
  misc_feature 1..1248: note = Description of Artificial Sequence: Synthetic coding sequence
  source 1..1248: mol_type = other DNA
atggtgcacttctgcggcctgctgaccctgcacagagagcccgtgcccctgaagagcatcagcgtgagcgtgaacatctacgagttcgtggccggcgtgagcgccaccctgaactacgagaacgaggagaaggtgcccctggaggccttcttcgtgttccccatggacgaggacagcgccgtgtacagcttcgaggccctggtggacggcaagaagatcgtggccgagctgcaggacaagatgaaggccagaaccaactacgagaaggccatcagccagggccaccaggccttcctgctggagggcgacagcagcagcagagacgtgttcagctgcaacgtgggcaacctgcagcccggcagcaaggccgccgtgaccctgaagtacgtgcaggagctgcccctggaggccgacggcgccctgagattcgtgctgcccgccgtgctgaaccccagataccagttcagcggcagcagcaaggacagctgcctgaacgtgaagacccccatcgtgcccgtggaggacctgccctacaccctgagcatggtggccaccatcgacagccagcacggcatcgagaaggtgcagagcaactgccccctgagccccaccgagtacctgggcgaggacaagaccagcgcccaggtgagcctggccgccggccacaagttcgacagagacgtggagctgctgatctactacaacgaggtgcacacccccagcgtggtgctggagatgggcatgcccaacatgaagcccggccacctgatgggcgaccccagcgccatggtgagcttctaccccaacatccccgaggaccagcccagcaacacctgcggcgagttcatcttcctgatggacagaagcggcagcatgcagagccccatgagcagccaggacaccagccagctgagaatccaggccgccaaggagaccctgatcctgctgctgaagagcctgcccatcggctgctacttcaacatctacggcttcggcagcagctacgaggcctgcttccccgagagcgtgaagtacacccagcagaccatggaggaggccctgggcagagtgaagctgatgcaggccgacctgggcggcaccgagatcctggcccccctgcagaacatctacagaggccccagcatccccggccaccccctgcagctgttcgtgttcaccgacggcgaggtgaccgacaccttcagcgtgatcaaggaggtgagaatcaacagacagaagcacagatag

SEQ ID NO: 13517 - DNA, 2361 bp, synthetic construct; identical to SEQ ID NO: 13515
  misc_feature 1..2361: note = Description of Artificial Sequence: Synthetic coding sequence
  source 1..2361: mol_type = other DNA

SEQ ID NO: 13518 - DNA, 1248 bp, synthetic construct; identical to SEQ ID NO: 13516
  misc_feature 1..1248: note = Description of Artificial Sequence: Synthetic coding sequence
  source 1..1248: mol_type = other DNA

SEQ ID NO: 13519 - DNA, 2301 bp, synthetic construct
  misc_feature 1..2301: note = Description of Artificial Sequence: Synthetic coding sequence
  source 1..2301: mol_type = other DNA
atggccgccctgagcggcggcggcggcggcggcgccgagcccggccaggccctgttcaacggcgacatggagcccgaggccggcgccggcgccggcgccgccgccagcagcgccgccgaccccgccatccccgaggaggtgtggaacatcaagcagatgatcaagctgacccaggagcacatcgaggccctgctggacaagttcggcggcgagcacaacccccccagcatctacctggaggcctacgaggagtacaccagcaagctggacgccctgcagcagagagagcagcagctgctggagagcctgggcaacggcaccgacttcagcgtgagcagcagcgccagcatggacaccgtgaccagcagcagcagcagcagcctgagcgtgctgcccagcagcctgagcgtgttccagaaccccaccgacgtggccagaagcaaccccaagagcccccagaagcccatcgtgagagtgttcctgcccaacaagcagagaaccgtggtgcccgccagatgcggcgtgaccgtgagagacagcctgaagaaggccctgatgatgagaggcctgatccccgagtgctgcgccgtgtacagaatccaggacggcgagaagaagcccatcggctgggacaccgacatcagctggctgaccggcgaggagctgcacgtggaggtgctggagaacgtgcccctgaccacccacaacttcgtgagaaagaccttcttcaccctggccttctgcgacttctgcagaaagctgctgttccagggcttcagatgccagacctgcggctacaagttccaccagagatgcagcaccgaggtgcccctgatgtgcgtgaactacgaccagctggacctgctgttcgtgagcaagttcttcgagcaccaccccatcccccaggaggaggccagcctggccgagaccgccctgaccagcggcagcagccccagcgcccccgccagcgacagcatcggcccccagatcctgaccagccccagccccagcaagagcatccccatcccccagcccttcagacccgccgacgaggaccacagaaaccagttcggccagagagacagaagcagcagcgcccccaacgtgcacatcaacaccatcgagcccgtgaacatcgacgacctgatcagagaccagggcttcagaggcgacggcggcagcaccaccggcctgagcgccaccccccccgccagcctgcccggcagcctgaccaacgtgaaggccctgcagaagagccccggcccccagagagagagaaagagcagcagcagcagcgaggacagaaacagaatgaagaccctgggcagaagagacagcagcgacgactgggagatccccgacggccagatcaccgtgggccagagaatcggcagcggcagcttcggcaccgtgtacaagggcaagtggcacggcgacgtggccgtgaagatgctgaacgtgaccgcccccaccccccagcagctgcaggccttcaagaacgaggtgggcgtgctgagaaagaccagacacgtgaacatcctgctgttcatgggctacagcaccaagccccagctggccatcgtgacccagtggtgcgagggcagcagcctgtaccaccacctgcacatcatcgagaccaagttcgagatgatcaagctgatcgacatcgccagacagaccgcccagggcatggactacctgcacgccaagagcatcatccacagagacctgaagagcaacaacatcttcctgcacgaggacctgaccgtgaagatcggcgacttcggcctggccaccgtgaagagcagatggagcggcagccaccagttcgagcagctgagcggcagcatcctgtggatggcccccgaggtgatcagaatgcaggacaagaacccctacagcttccagagcgacgtgtacgccttcggcatcgtgctgtacgagctgatgaccggccagctgccctacagcaacatcaacaacagagaccagatcatcttcatggtgggcagaggctacctgagccccgacctgagcaaggtgagaagcaactgccccaaggccatgaagagactgatggccgagtgcctgaagaagaagagagacgagagacccctgttcccccagatcctggccagcatcgagctgctggccagaagcctgcccaagatccacagaagcgccagcgagcccagcctgaacagagccggcttccagaccgaggacttcagcctgtacgcctgcgccagccccaagacccccatccaggccggcggctacggcgccttccccgtgcactag

SEQ ID NO: 13520 - DNA, 1947 bp, synthetic construct
  misc_feature 1..1947: note = Description of Artificial Sequence: Synthetic coding sequence
  source 1..1947: mol_type = other DNA
atggagcacatccagggcgcctggaagaccatcagcaacggcttcggcttcaaggacgccgtgttcgacggcagcagctgcatcagccccaccatcgtgcagcagttcggctaccagagaagagccagcgacgacggcaagctgaccgaccccagcaagaccagcaacaccatcagagtgttcctgcccaacaagcagagaaccgtggtgaacgtgagaaacggcatgagcctgcacgactgcctgatgaaggccctgaaggtgagaggcctgcagcccgagtgctgcgccgtgttcagactgctgcacgagcacaagggcaagaaggccagactggactggaacaccgacgccgccagcctgatcggcgaggagctgcaggtggacttcctggaccacgtgcccctgaccacccacaacttcgccagaaagaccttcctgaagctggccttctgcgacatctgccagaagttcctgctgaacggcttcagatgccagacctgcggctacaagttccacgagcactgcagcaccaaggtgcccaccatgtgcgtggactggagcaacatcagacagctgctgctgttccccaacagcaccatcggcgacagcggcgtgcccgccctgcccagcctgaccatgagaagaatgagagagagcgtgagcagaatgcccgtgagcagccagcacagatacagcaccccccacgccttcaccttcaacaccagcagccccagcagcgagggcagcctgagccagagacagagaagcaccagcacccccaacgtgcacatggtgagcaccaccctgcccgtggacagcagaatgatcgaggacgccatcagaagccacagcgagagcgccagccccagcgccctgagcagcagccccaacaacctgagccccaccggctggagccagcccaagacccccgtgcccgcccagagagagagagcccccgtgagcggcacccaggagaagaacaagatcagacccagaggccagagagacagcagctactactgggagatcgaggccagcgaggtgatgctgagcaccagaatcggcagcggcagcttcggcaccgtgtacaagggcaagtggcacggcgacgtggccgtgaagatcctgaaggtggtggaccccacccccgagcagttccaggccttcagaaacgaggtggccgtgctgagaaagaccagacacgtgaacatcctgctgttcatgggctacatgaccaaggacaacctggccatcgtgacccagtggtgcgagggcagcagcctgtacaagcacctgcacgtgcaggagaccaagttccagatgttccagctgatcgacatcgccagacagaccgcccagggcatggactacctgcacgccaagaacatcatccacagagacatgaagagcaacaacatcttcctgcacgagggcctgaccgtgaagatcggcgacttcggcctggccaccgtgaagagcagatggagcggcagccagcaggtggagcagcccaccggcagcgtgctgtggatggcccccgaggtgatcagaatgcaggacaacaaccccttcagcttccagagcgacgtgtacagctacggcatcgtgctgtacgagctgatgaccggcgagctgccctacagccacatcaacaacagagaccagatcatcttcatggtgggcagaggctacgccagccccgacctgagcaagctgtacaagaactgccccaaggccatgaagagactggtggccgactgcgtgaagaaggtgaaggaggagagacccctgttcccccagatcctgagcagcatcgagctgctgcagcacagcctgcccaagatcaacagaagcgccagcgagcccagcctgcacagagccgcccacaccgaggacatcaacgcctgcaccctgaccaccagccccagactgcccgtgttctag

SEQ ID NO: 13521 - DNA, 2007 bp, synthetic construct
  misc_feature 1..2007: note = Description of Artificial Sequence: Synthetic coding sequence
  source 1..2007: mol_type = other DNA
atggagcacatccagggcgcctggaagaccatcagcaacggcttcggcttcaaggacgccgtgttcgacggcagcagctgcatcagccccaccatcgtgcagcagttcggctaccagagaagagccagcgacgacggcaagctgaccgaccccagcaagaccagcaacaccatcagagtgttcctgcccaacaagcagagaaccgtggtgaacgtgagaaacggcatgagcctgcacgactgcctgatgaaggccctgaaggtgagaggcctgcagcccgagtgctgcgccgtgttcagactgctgcacgagcacaagggcaagaaggccagactggactggaacaccgacgccgccagcctgatcggcgaggagctgcaggtggacttcctggaccacgtgcccctgaccacccacaacttcgccagaaagaccttcctgaagctggccttctgcgacatctgccagaagttcctgctgaacggcttcagatgccagacctgcggctacaagttccacgagcactgcagcaccaaggtgcccaccatgtgcgtggactggagcaacatcagacagctgctgctgttccccaacagcaccatcggcgacagcggcgtgcccgccctgcccagcctgaccatgagaagaatgagagagagcgtgagcagaatgcccgtgagcagccagcacagatacagcaccccccacgccttcaccttcaacaccagcagccccagcagcgagggcagcctgagccagagacagagaagcaccagcacccccaacgtgcacatggtgagcaccaccctgcccgtggacagcagaatgatcgagaacaacaacctgagcgccagccccagagcctggagcagaagattctgcctgagaggcagagacgccatcagaagccacagcgagagcgccagccccagcgccctgagcagcagccccaacaacctgagccccaccggctggagccagcccaagacccccgtgcccgcccagagagagagagcccccgtgagcggcacccaggagaagaacaagatcagacccagaggccagagagacagcagctactactgggagatcgaggccagcgaggtgatgctgagcaccagaatcggcagcggcagcttcggcaccgtgtacaagggcaagtggcacggcgacgtggccgtgaagatcctgaaggtggtggaccccacccccgagcagttccaggccttcagaaacgaggtggccgtgctgagaaagaccagacacgtgaacatcctgctgttcatgggctacatgaccaaggacaacctggccatcgtgacccagtggtgcgagggcagcagcctgtacaagcacctgcacgtgcaggagaccaagttccagatgttccagctgatcgacatcgccagacagaccgcccagggcatggactacctgcacgccaagaacatcatccacagagacatgaagagcaacaacatcttcctgcacgagggcctgaccgtgaagatcggcgacttcggcctggccaccgtgaagagcagatggagcggcagccagcaggtggagcagcccaccggcagcgtgctgtggatggcccccgaggtgatcagaatgcaggacaacaaccccttcagcttccagagcgacgtgtacagctacggcatcgtgctgtacgagctgatgaccggcgagctgccctacagccacatcaacaacagagaccagatcatcttcatggtgggcagaggctacgccagccccgacctgagcaagctgtacaagaactgccccaaggccatgaagagactggtggccgactgcgtgaagaaggtgaaggaggagagacccctgttcccccagatcctgagcagcatcgagctgctgcagcacagcctgcccaagatcaacagaagcgccagcgagcccagcctgcacagagccgcccacaccgaggacatcaacgcctgcaccctgaccaccagccccagactgcccgtgttctag

SEQ ID NO: 13522 - DNA, 1302 bp, synthetic construct
  misc_feature 1..1302: note = Description of Artificial Sequence: Synthetic coding sequence
  source 1..1302: mol_type = other DNA
atgtgcgtggactggagcaacatcagacagctgttcagccagcacagatacagcaccccccacgccttcaccttcaacaccagcagccccagcagcgagggcagcctgagccagagacagagaagcaccagcacccccaacgtgcacatggtgagcaccaccctgcccgtggacagcagaatgatcgaggacgccatcagaagccacagcgagagcgccagccccagcgccctgagcagcagccccaacaacctgagccccaccggctggagccagcccaagacccccgtgcccgcccagagagagagagcccccgtgagcggcacccaggagaagaacaagatcagacccagaggccagagagacagcagctactactgggagatcgaggccagcgaggtgatgctgagcaccagaatcggcagcggcagcttcggcaccgtgtacaagggcaagtggcacggcgacgtggccgtgaagatcctgaaggtggtggaccccacccccgagcagttccaggccttcagaaacgaggtggccgtgctgagaaagaccagacacgtgaacatcctgctgttcatgggctacatgaccaaggacaacctggccatcgtgacccagtggtgcgagggcagcagcctgtacaagcacctgcacgtgcaggagaccaagttccagatgttccagctgatcgacatcgccagacagaccgcccagggcatggactacctgcacgccaagaacatcatccacagagacatgaagagcaacaacatcttcctgcacgagggcctgaccgtgaagatcggcgacttcggcctggccaccgtgaagagcagatggagcggcagccagcaggtggagcagcccaccggcagcgtgctgtggatggcccccgaggtgatcagaatgcaggacaacaaccccttcagcttccagagcgacgtgtacagctacggcatcgtgctgtacgagctgatgaccggcgagctgccctacagccacatcaacaacagagaccagatcatcttcatggtgggcagaggctacgccagccccgacctgagcaagctgtacaagaactgccccaaggccatgaagagactggtggccgactgcgtgaagaaggtgaaggaggagagacccctgttcccccagatcctgagcagcatcgagctgctgcagcacagcctgcccaagatcaacagaagcgccagcgagcccagcctgcacagagccgcccacaccgaggacatcaacgcctgcaccctgaccaccagccccagactgcccgtgttctag

SEQ ID NO: 13523 - DNA, 1704 bp, synthetic construct
  misc_feature 1..1704: note = Description of Artificial Sequence: Synthetic coding sequence
  source 1..1704: mol_type = other DNA
atgatggccaacagccagatcctgctgagacaggccaccctgagcgtgttcagctgcagaaccagcaaggagcagtgcaagaaggccagactggactggaacaccgacgccgccagcctgatcggcgaggagctgcaggtggacttcctggaccacgtgcccctgaccacccacaacttcgccagaaagaccttcctgaagctggccttctgcgacatctgccagaagttcctgctgaacggcttcagatgccagacctgcggctacaagttccacgagcactgcagcaccaaggtgcccaccatgtgcgtggactggagcaacatcagacagctgctgctgttccccaacagcaccatcggcgacagcggcgtgcccgccctgcccagcctgaccatgagaagaatgagagagagcgtgagcagaatgcccgtgagcagccagcacagatacagcaccccccacgccttcaccttcaacaccagcagccccagcagcgagggcagcctgagccagagacagagaagcaccagcacccccaacgtgcacatggtgagcaccaccctgcccgtggacagcagaatgatcgaggacgccatcagaagccacagcgagagcgccagccccagcgccctgagcagcagccccaacaacctgagccccaccggctggagccagcccaagacccccgtgcccgcccagagagagagagcccccgtgagcggcacccaggagaagaacaagatcagacccagaggccagagagacagcagctactactgggagatcgaggccagcgaggtgatgctgagcaccagaatcggcagcggcagcttcggcaccgtgtacaagggcaagtggcacggcgacgtggccgtgaagatcctgaaggtggtggaccccacccccgagcagttccaggccttcagaaacgaggtggccgtgctgagaaagaccagacacgtgaacatcctgctgttcatgggctacatgaccaaggacaacctggccatcgtgacccagtggtgcgagggcagcagcctgtacaagcacctgcacgtgcaggagaccaagttccagatgttccagctgatcgacatcgccagacagaccgcccagggcatggactacctgcacgccaagaacatcatccacagagacatgaagagcaacaacatcttcctgcacgagggcctgaccgtgaagatcggcgacttcggcctggccaccgtgaagagcagatggagcggcagccagcaggtggagcagcccaccggcagcgtgctgtggatggcccccgaggtgatcagaatgcaggacaacaaccccttcagcttccagagcgacgtgtacagctacggcatcgtgctgtacgagctgatgaccggcgagctgccctacagccacatcaacaacagagaccagatcatcttcatggtgggcagaggctacgccagccccgacctgagcaagctgtacaagaactgccccaaggccatgaagagactggtggccgactgcgtgaagaaggtgaaggaggagagacccctgttcccccagatcctgagcagcatcgagctgctgcagcacagcctgcccaagatcaacagaagcgccagcgagcccagcctgcacagagccgcccacaccgaggacatcaacgcctgcaccctgaccaccagccccagactgcccgtgttctag

SEQ ID NO: 13524 - DNA, 1611 bp, synthetic construct
  misc_feature 1..1611: note = Description of Artificial Sequence: Synthetic coding sequence
  source 1..1611: mol_type = other DNA
atgggcagcaacaagagcaagcccaaggacgccagccagagaagaagaagcctggagcccgccgagaacgtgcacggcgccggcggcggcgccttccccgccagccagacccccagcaagcccgccagcgccgacggccacagaggccccagcgccgccttcgcccccgccgccgccgagcccaagctgttcggcggcttcaacagcagcgacaccgtgaccagcccccagagagccggccccctggccggcggcgtgaccaccttcgtggccctgtacgactacgagagcagaaccgagaccgacctgagcttcaagaagggcgagagactgcagatcgtgaacaacaccgagggcgactggtggctggcccacagcctgagcaccggccagaccggctacatccccagcaactacgtggcccccagcgacagcatccaggccgaggagtggtacttcggcaagatcaccagaagagagagcgagagactgctgctgaacgccgagaaccccagaggcaccttcctggtgagagagagcgagaccaccaagggcgcctactgcctgagcgtgagcgacttcgacaacgccaagggcctgaacgtgaagcactacaagatcagaaagctggacagcggcggcttctacatcaccagcagaacccagttcaacagcctgcagcagctggtggcctactacagcaagcacgccgacggcctgtgccacagactgaccaccgtgtgccccaccagcaagccccagacccagggcctggccaaggacgcctgggagatccccagagagagcctgagactggaggtgaagctgggccagggctgcttcggcgaggtgtggatgggcacctggaacggcaccaccagagtggccatcaagaccctgaagcccggcaccatgagccccgaggccttcctgcaggaggcccaggtgatgaagaagctgagacacgagaagctggtgcagctgtacgccgtggtgagcgaggagcccatctacatcgtgaccgagtacatgagcaagggcagcctgctggacttcctgaagggcgagaccggcaagtacctgagactgccccagctggtggacatggccgcccagatcgccagcggcatggcctacgtggagagaatgaactacgtgcacagagacctgagagccgccaacatcctggtgggcgagaacctggtgtgcaaggtggccgacttcggcctggccagactgatcgaggacaacgagtacaccgccagacagggcgccaagttccccatcaagtggaccgcccccgaggccgccctgtacggcagattcaccatcaagagcgacgtgtggagcttcggcatcctgctgaccgagctgaccaccaagggcagagtgccctaccccggcatggtgaacagagaggtgctggaccaggtggagagaggctacagaatgccctgcccccccgagtgccccgagagcctgcacgacctgatgtgccagtgctggagaaaggagcccgaggagagacccaccttcgagtacctgcaggccttcctggaggactacttcaccagcaccgagccccagtaccagcccggcgagaacctgtag

SEQ ID NO: 13525 - DNA, 1629 bp, synthetic construct
  misc_feature 1..1629: note = Description of Artificial Sequence: Synthetic coding sequence
  source 1..1629: mol_type = other DNA
atgggcagcaacaagagcaagcccaaggacgccagccagagaagaagaagcctggagcccgccgagaacgtgcacggcgccggcggcggcgccttccccgccagccagacccccagcaagcccgccagcgccgacggccacagaggccccagcgccgccttcgcccccgccgccgccgagcccaagctgttcggcggcttcaacagcagcgacaccgtgaccagcccccagagagccggccccctggccggcggcgtgaccaccttcgtggccctgtacgactacgagagcagaaccgagaccgacctgagcttcaagaagggcgagagactgcagatcgtgaacaacaccagaaaggtggacgtgagagagggcgactggtggctggcccacagcctgagcaccggccagaccggctacatccccagcaactacgtggcccccagcgacagcatccaggccgaggagtggtacttcggcaagatcaccagaagagagagcgagagactgctgctgaacgccgagaaccccagaggcaccttcctggtgagagagagcgagaccaccaagggcgcctactgcctgagcgtgagcgacttcgacaacgccaagggcctgaacgtgaagcactacaagatcagaaagctggacagcggcggcttctacatcaccagcagaacccagttcaacagcctgcagcagctggtggcctactacagcaagcacgccgacggcctgtgccacagactgaccaccgtgtgccccaccagcaagccccagacccagggcctggccaaggacgcctgggagatccccagagagagcctgagactggaggtgaagctgggccagggctgcttcggcgaggtgtggatgggcacctggaacggcaccaccagagtggccatcaagaccctgaagcccggcaccatgagccccgaggccttcctgcaggaggcccaggtgatgaagaagctgagacacgagaagctggtgcagctgtacgccgtggtgagcgaggagcccatctacatcgtgaccgagtacatgagcaagggcagcctgctggacttcctgaagggcgagaccggcaagtacctgagactgccccagctggtggacatggccgcccagatcgccagcggcatggcctacgtggagagaatgaactacgtgcacagagacctgagagccgccaacatcctggtgggcgagaacctggtgtgcaaggtggccgacttcggcctggccagactgatcgaggacaacgagtacaccgccagacagggcgccaagttccccatcaagtggaccgcccccgaggccgccctgtacggcagattcaccatcaagagcgacgtgtggagcttcggcatcctgctgaccgagctgaccaccaagggcagagtgccctaccccggcatggtgaacagagaggtgctggaccaggtggagagaggctacagaatgccctgcccccccgagtgccccgagagcctgcacgacctgatgtgccagtgctggagaaaggagcccgaggagagacccaccttcgagtacctgcaggccttcctggaggactacttcaccagcaccgagccccagtaccagcccggcgagaacctgtag

SEQ ID NO: 13526 - DNA, 1611 bp, synthetic construct; identical to SEQ ID NO: 13524
  misc_feature 1..1611: note = Description of Artificial Sequence: Synthetic coding sequence
  source 1..1611: mol_type = other DNA

SEQ ID NO: 13527 - DNA, 1611 bp, synthetic construct; identical to SEQ ID NO: 13524
  misc_feature 1..1611: note = Description of Artificial Sequence: Synthetic coding sequence
  source 1..1611: mol_type = other DNA

SEQ ID NO: 13528 - DNA, 1611 bp, synthetic construct; identical to SEQ ID NO: 13524
  misc_feature 1..1611: note = Description of Artificial Sequence: Synthetic coding sequence
  source 1..1611: mol_type = other DNA

SEQ ID NO: 13529 - DNA, 423 bp, synthetic construct
  misc_feature 1..423: note = Description of Artificial Sequence: Synthetic coding sequence
  source 1..423: mol_type = other DNA
atgcccctggtgaagagaaacatcgaccccagacacctgtgccacaccgccctgcccagaggcatcaagaacgagctggagtgcgtgaccaacatcagcctggccaacatcatcagacagctgagcagcctgagcaagtacgccgaggacatcttcggcgagctgttcaacgaggcccacagcttcagcttcagagtgaacagcctgcaggagagagtggacagactgagcgtgagcgtgacccagctggaccccaaggaggaggagctgagcctgcaggacatcaccatgagaaaggccttcagaagcagcaccatccaggaccagcagctgttcgacagaaagaccctgcccatccccctgcaggagacctacgacgtgtgcgagcagcccccccccctgaacatcctgaccccctactag

SEQ ID NO: 13530 - DNA, 1680 bp, synthetic construct
  misc_feature 1..1680: note = Description of Artificial Sequence: Synthetic coding sequence
  source 1..1680: mol_type = other DNA
atgcccctggtgaagagaaacatcgaccccagacacctgtgccacaccgccctgcccagaggcatcaagaacgagctggagtgcgtgaccaacatcagcctggccaacatcatcagacagctgagcagcctgagcaagtacgccgaggacatcttcggcgagctgttcaacgaggcccacagcttcagcttcagagtgaacagcctgcaggagagagtggacagactgagcgtgagcgtgacccagctggaccccaaggaggaggagctgagcctgcaggacatcaccatgagaaaggccttcagaagcagcaccatccaggaccagcagctgttcgacagaaagaccctgcccatccccctgcaggagacctacgacgtgtgcgagcagcccccccccctgaacatcctgaccccctacagagacgacggcaaggagggcctgaagttctacaccaaccccagctacttcttcgacctgtggaaggagaagatgctgcaggacaccgaggacaagagaaaggagaagagaaagcagaagcagaagaacctggacagaccccacgagcccgagaaggtgcccagagccccccacgacagaagaagagagtggcagaagctggcccagggccccgagctggccgaggacgacgccaacctgctgcacaagcacatcgaggtggccaacggccccgccagccacttcgagaccagaccccagacctacgtggaccacatggacggcagctacagcctgagcgccctgcccttcagccagatgagcgagctgctgaccagagccgaggagagagtgctggtgagaccccacgagccccccccccccccccccatgcacggcgccggcgacgccaagcccatccccacctgcatcagcagcgccaccggcctgatcgagaacagaccccagagccccgccaccggcagaacccccgtgttcgtgagccccacccccccccccccccccccccccctgcccagcgccctgagcaccagcagcctgagagccagcatgaccagcaccccccccccccccgtgcccccccccccccccccccccgccaccgccctgcaggcccccgccgtgccccccccccccgcccccctgcagatcgcccccggcgtgctgcaccccgcccccccccccatcgccccccccctggtgcagcccagcccccccgtggccagagccgcccccgtgtgcgagaccgtgcccgtgcaccccctgccccagggcgaggtgcagggcctgccccccccccccccccccccccccctgcccccccccggcatcagacccagcagccccgtgaccgtgaccgccctggcccacccccccagcggcctgcaccccacccccagcaccgcccccggcccccacgtgcccctgatgccccccagcccccccagccaggtgatccccgccagcgagcccaagagacaccccagcaccctgcccgtgatcagcgacgccagaagcgtgctgctggaggccatcagaaagggcatccagctgagaaaggtggaggagcagagagagcaggaggccaagcacgagagaatcgagaacgacgtggccaccatcctgagcagaagaatcgccgtggagtacagcgacagcgaggacgacagcgagttcgacgaggtggactggctggagtag

SEQ ID NO: 13531 - DNA, 423 bp, synthetic construct; identical to SEQ ID NO: 13529
  misc_feature 1..423: note = Description of Artificial Sequence: Synthetic coding sequence
  source 1..423: mol_type = other DNA

SEQ ID NO: 13532 - DNA, 1680 bp, synthetic construct; identical to SEQ ID NO: 13530
  misc_feature 1..1680: note = Description of Artificial Sequence: Synthetic coding sequence
  source 1..1680: mol_type = other DNA

SEQ ID NO: 13533 - DNA, 1680 bp, synthetic construct; identical to SEQ ID NO: 13530
  misc_feature 1..1680: note = Description of Artificial Sequence: Synthetic coding sequence
  source 1..1680: mol_type = other DNA

SEQ ID NO: 13534 - DNA, 1680 bp, synthetic construct; identical to SEQ ID NO: 13530
  misc_feature 1..1680: note = Description of Artificial Sequence: Synthetic coding sequence
  source 1..1680: mol_type = other DNA

SEQ ID NO: 13535 - DNA, 1680 bp, synthetic construct; identical to SEQ ID NO: 13530
  misc_feature 1..1680: note = Description of Artificial Sequence: Synthetic coding sequence
  source 1..1680: mol_type = other DNA

SEQ ID NO: 13536 - DNA, 270 bp, synthetic construct
  misc_feature 1..270: note = Description of Artificial Sequence: Synthetic coding sequence
  source 1..270: mol_type = other DNA
atgcccctggtgaagagaaacatcgaccccagacacctgtgccacaccgccctgcccagaggcatcaagaacgagctggagtgcgtgaccaacatcagcctggccaacatcatcagacagctgagcagcctgagcaagtacgccgaggacatcttcggcgagctgttcaacgaggcccacagcttcagcttcagagtgaacagcctgcaggagagagtggacagactgagcgtgagcgtgacccagctggaccccaaggaggaggagtag

SEQ ID NO: 13537 - DNA, 543 bp, synthetic construct
  misc_feature 1..543: note = Description of Artificial Sequence: Synthetic coding sequence
  source 1..543: mol_type = other DNA
atgcccctggtgaagagaaacatcgaccccagacacctgtgccacaccgccctgcccagaggcatcaagaacgagctggagtgcgtgaccaacatcagcctggccaacatcatcagacagctgagcagcctgagcaagtacgccgaggacatcttcggcgagctgttcaacgaggcccacagcttcagcttcagagtgaacagcctgcaggagagagtggacagactgagcgtgagcgtgacccagctggaccccaaggaggaggagctgagcctgcaggacatcaccatgagaaaggccttcagaagcagcaccatccaggaccagcagctgttcgacagaaagaccctgcccatccccctgcaggagacctacgacgtgtgcgagcagcccccccccctgaacatcctgaccccctacagagacgacggcaaggagggcctgaagttctacaccaaccccagctacttcttcgacctgtggaaggagaagatgctgcaggacaccgaggacaagagaaaggagaagagaaagcagaagtag

SEQ ID NO: 13538 - DNA, 270 bp, synthetic construct; identical to SEQ ID NO: 13536
  misc_feature 1..270: note = Description of Artificial Sequence: Synthetic coding sequence
  source 1..270: mol_type = other DNA

SEQ ID NO: 13539 - DNA, 1497 bp, synthetic construct
  misc_feature 1..1497: note = Description of Artificial Sequence: Synthetic coding sequence
  source 1..1497: mol_type = other DNA
atgcccctggtgaccagaaacatcgagcccagacacctgtgcagacagaccctgcccagcgtgagaagcgagctggagtgcgtgaccaacatcaccctggccaacgtgatcagacagctgggcagcctgagcaagtacgccgaggacatcttcggcgagctgttcacccaggccaacaccttcgccagcagagtgagcagcctggccgagagagtggacagactgcaggtgaaggtgacccagctggaccccaaggaggaggaggtgagcctgcagggcatcaacaccagaaaggccttcagaagcagcaccatccaggaccagaagctgttcgacagaaacagcctgcccgtgcccgtgctggagacctacaacacctgcgacacccccccccccctgaacaacctgaccccctacagagacgacggcaaggaggccctgaagttctacaccgaccccagctacttcttcgacctgtggaaggagaagatgctgcaggacaccaaggacatcatgaaggagaagagaaagcacagaaaggagaagaaggacaaccccaacagaggcaacgtgaaccccagaaagatcaagaccagaaaggaggagtgggagaagatgaagatgggccaggagttcgtggagagcaaggagaagctgggcaccagcggctacccccccaccctggtgtaccagaacggcagcatcggctgcgtggagaacgtggacgccagcagctaccccccccccccccagagcgacagcgccagcagccccagccccagcttcagcgaggacaacctgccccccccccccgccgagttcagctaccccgtggacaaccagagaggcagcggcctggccggccccaagagaagcagcgtggtgagccccagccaccccccccccgccccccccctgggcagcccccccggccccaagcccggcttcgcccccccccccgcccccccccccccccccccccccatgatcggcatcccccccccccccccccccgtgggcttcggcagccccggcaccccccccccccccagcccccccagcttccccccccaccccgacttcgccgccccccccccccccccccccccccccgccgccgactaccccaccctgccccccccccccctgagccagcccaccggcggcgccccccccccccccccccccccccccccccccggccccccccccccccccttcaccggcgccgacggccagcccgccatccccccccccctgagcgacaccaccaagcccaagagcagcctgcccgccgtgagcgacgccagaagcgacctgctgagcgccatcagacagggcttccagctgagaagagtggaggagcagagagagcaggagaagagagacgtggtgggcaacgacgtggccaccatcctgagcagaagaatcgccgtggagtacagcgacagcgaggacgacagcagcgagttcgacgaggacgactggagcgactag

SEQ ID NO: 13540 - DNA, 846 bp, synthetic construct
  misc_feature 1..846: note = Description of Artificial Sequence: Synthetic coding sequence
  source 1..846: mol_type = other DNA
atgcccctggtgaccagaaacatcgagcccagacacctgtgcagacagaccctgcccagcgtgagaagcgagctggagtgcgtgaccaacatcaccctggccaacgtgatcagacagctgggcagcctgagcaagtacgccgaggacatcttcggcgagctgttcacccaggccaacaccttcgccagcagagtgagcagcctggccgagagagtggacagactgcaggtgaaggtgacccagctggaccccaaggaggaggaggtgagcctgcagggcatcaacaccagaaaggccttcagaagcagcaccatccaggaccagaagctgttcgacagaaacagcctgcccgtgcccgtgctggagacctacaacacctgcgacacccccccccccctgaacaacctgaccccctacagagacgacggcaaggaggccctgaagttctacaccgaccccagctacttcttcgacctgtggaaggagaagatgctgcaggacaccaaggacatcatgaaggagaagagaaagcacagaaaggagaagaaggacaaccccaacagaggcaacgtgaaccccagaaagatcaagaccagaaaggaggagtgggagaagatgaagatgggccaggagttcgtggagagcaaggagaagctgggcaccagcggctacccccccaccctggtgtaccagaacggcagcatcggctgcgtggagaacgtggacgccagcagctaccccccccccccccagagcgacagcgccagcagccccagccccagcttcagcgaggacaacctgccccccccccccgccgagttcagattcagcgccgcccagggctag

SEQ ID NO: 13541 - DNA, 1533 bp, synthetic construct
  misc_feature 1..1533: note = Description of Artificial Sequence: Synthetic coding sequence
  source 1..1533: mol_type = other DNA
atgcccgtgccccccccccccgcccccccccccccccccaccttcgccctggccaacaccgagaagcccaccctgaacaagaccgagcaggccggcagaaacgccctgctgagcgacatcagcaagggcaagaagctgaagaagaccgtgaccaacgacagaagcgcccccatcctggacaagcccaagggcgccggcgccggcggcggcggcggcggcttcggcggcggcggcggcttcggcggcggcggcggcggcggcggcggcggcagcttcggcggcggcggcccccccggcctgggcggcctgttccaggccggcatgcccaagctgagaagcaccgccaacagagacaacgacagcggcggcagcagaccccccctgctgccccccggcggcagaagcaccagcgccaagcccttcagcccccccagcggccccggcagattccccgtgcccagccccggccacagaagcggcccccccgagccccagagaaacagaatgcccccccccagacccgacgtgggcagcaagcccgacagcatccccccccccgtgcccagcacccccagacccatccagagcagcccccacaacagaggcagcccccccgtgcccggcggccccagacagcccagccccggccccacccccccccccttccccggcaacagaggcaccgccctgggcggcggcagcatcagacagagccccctgagcagcagcagccccttcagcaacagaccccccctgccccccacccccagcagagccctggacgacaagcccccccccccccccccccccgtgggcaacagacccagcatccacagagaggccgtgccccccccccccccccagaacaacaagccccccgtgcccagcacccccagacccagcgccagcagccaggcccccccccccccccccccccccagcagacccggccccccccccctgccccccagcagcagcggcaacgacgagacccccagactgccccagagaaacctgagcctgagcagcagcaccccccccctgcccagccccggcagaagcggccccctgccccccccccccagcgagagaccccccccccccgtgagagacccccccggcagaagcggccccctgcccccccccccccccgtgagcagaaacggcagcaccagcagagccctgcccgccaccccccagctgcccagcagaagcggcgtggacagccccagaagcggccccagaccccccctgccccccgacagacccagcgccggcgccccccccccccccccccccagcaccagcatcagaaacggcttccaggacagcccctgcgaggacgagtgggagagcagattctacttccaccccatcagcgacctgcccccccccgagccctacgtgcagaccaccaagagctaccccagcaagctggccagaaacgagagcagaagcggcagcaacagaagagagagaggcgccccccccctgccccccatccccagaccccccaagcaggccgccgagtag

SEQ ID NO: 13542 - DNA, 1512 bp, synthetic construct
  misc_feature 1..1512: note = Description of Artificial Sequence: Synthetic coding sequence
  source 1..1512: mol_type = other DNA
atgcccgtgccccccccccccgcccccccccccccccccaccttcgccctggccaacaccgagaagcccaccctgaacaagaccgagcaggccggcagaaacgccctgctgagcgacatcagcaagggcaagaagctgaagaagaccgtgaccaacgacagaagcgcccccatcctggacaagcccaagggcgccggcgccggcggcggcggcggcggcttcggcggcggcggcggcttcggcggcggcggcggcggcggcggcggcggcagcttcggcggcggcggcccccccggcctgggcggcctgttccaggccggcatgcccaagctgagaagcaccgccaacagagacaacgacagcggcggcagcagaccccccctgctgccccccggcggcagaagcaccagcgccaagcccttcagcccccccagcggccccggcagattccccgtgcccagccccggccacagaagcggcccccccgagccccagagaaacagaatgcccccccccagacccgacgtgggcagcaagcccgacagcatccccccccccgtgcccagcacccccagacccatccagagcagcccccacaacagaggcagcccccccgtgcccggcggccccagacagcccagccccggccccacccccccccccttccccggcaacagaggcaccgccctgggcggcggcagcatcagacagagccccctgagcagcagcagccccttcagcaacagaccccccctgccccccacccccagcagagccctggacgacaagcccccccccccccccccccccgtgggcaacagacccagcatccacagagaggccgtgccccccccccccccccagaacaacaagccccccgtgcccagcacccccagacccagcgccagcagccaggcccccccccccccccccccccccagcagacccggccccccccccctgccccccagcagcagcggcaacgacgagacccccagactgccccagagaaacctgagcctgagcagcagcaccccccccctgcccagccccggcagaagcggccccctgccccccccccccagcgagagaccccccccccccgtgagagacccccccggcagaagcggccccctgcccccccccccccccgtgagcagaaacggcagcaccagcagagccctgcccgccaccccccagctgcccagcagaagcggcgtggacagccccagaagcggccccagaccccccctgccccccgacagacccagcgccggcgccccccccccccccccccccagcaccagcatcagaaacggcttccaggacagcccctgcgaggacgagtgggagagcagattctacttccaccccatcagcgacctgcccccccccgagccctacgtgcagaccaccaagagctaccccagcaagctggccagaaacgagagcagaagcggcagcaacagaagagagagaggcgccccccccctgccccccatccccagatag

SEQ ID NO: 13543 - DNA, 1512 bp, synthetic construct; identical to SEQ ID NO: 13542
  misc_feature 1..1512: note = Description of Artificial Sequence: Synthetic coding sequence
  source 1..1512: mol_type = other DNA

SEQ ID NO: 13544 - DNA, 1512 bp, synthetic construct; identical to SEQ ID NO: 13542
  misc_feature 1..1512: note = Description of Artificial Sequence: Synthetic coding sequence
  source 1..1512: mol_type = other DNA

SEQ ID NO: 13545 - DNA, 1080 bp, synthetic construct
  misc_feature 1..1080: note = Description of Artificial Sequence: Synthetic coding sequence
  source 1..1080: mol_type = other DNA
atgcccgtgccccccccccccgcccccccccccccccccaccttcgccctggccaacaccgagaagcccaccctgaacaagaccgagcaggccggcagaaacgccctgctgagcgacatcagcaagggcaagaagctgaagaagaccgtgaccaacgacagaagcgcccccatcctggacaagcccaagggcgccggcgccggcggcggcggcggcggcttcggcggcggcggcggcttcggcggcggcggcggcggcggcggcggcggcagcttcggcggcggcggcccccccggcctgggcggcctgttccaggccggcatgcccaagctgagaagcaccgccaacagagacaacgacagcggcggcagcagaccccccctgctgccccccggcggcagaagcaccagcgccaagcccttcagcccccccagcggccccggcagattccccgtgcccagccccggccacagaagcggcccccccgagccccagagaaacagaatgcccccccccagacccgacgtgggcagcaagcccgacagcatccccccccccgtgcccagcacccccagacccatccagagcagcccccacaacagaggcagcccccccgtgcccggcggccccagacagcccagccccggccccaccccccccccccccccccccgtgagagacccccccggcagaagcggccccctgcccccccccccccccgtgagcagaaacggcagcaccagcagagccctgcccgccaccccccagctgcccagcagaagcggcgtggacagccccagaagcggccccagaccccccctgccccccgacagacccagcgccggcgccccccccccccccccccccagcaccagcatcagaaacggcttccaggacagcccctgcgaggacgagtgggagagcagattctacttccaccccatcagcgacctgcccccccccgagccctacgtgcagaccaccaagagctaccccagcaagctggccagaaacgagagcagaagcggcagcaacagaagagagagaggcgccccccccctgccccccatccccagatag

SEQ ID NO: 13546 - DNA, 1482 bp, synthetic construct
  misc_feature 1..1482: note = Description of Artificial Sequence: Synthetic coding sequence
  source 1..1482: mol_type = other DNA
atgcccgtgccccccccccccgcccccccccccccccccaccttcgccctggccaacaccgagaagcccaccctgaacaagaccgagcaggccggcagaaacgccctgctgagcgacatcagcaagggcaagaagctgaagaagaccgtgaccaacgacagaagcgcccccatcctggacaagcccaagggcgccggcgccggcggcggcggcggcggcttcggcggcggcggcggcttcggcggcggcggcggcggcggcggcggcggcagcttcggcggcggcggcccccccggcctgggcggcctgttccaggccggcatgcccaagctgagaagcaccgccaacagagacaacgacagcggcggcagcagaccccccctgctgccccccggcggcagaagcaccagcgccaagcccttcagcccccccagcggccccggcagattccccgtgcccagccccggccacagaagcggcccccccgagccccagagaaacagaatgcccccccccagacccgacgtgggcagcaagcccgacagcatccccccccccgtgcccagcacccccagacccatccagagcagcccccacaacagaggcagcccccccgtgcccggcggccccagacagcccagccccggccccacccccccccccttccccggcaacagaggcaccgccctgggcggcggcagcatcagacagagccccctgagcagcagcagccccttcagcaacagaccccccctgccccccacccccagcagagccctggacgacaagcccccccccccccccccccccgtgggcaacagacccagcatccacagagaggccgtgccccccccccccccccagaacaacaagccccccgtgcccagcacccccagacccagcgccagcagccaggcccccccccccccccccccccccagcagacccggccccccccccctgccccccagcagcagcggcaacgacgagacccccagactgccccagagaaacctgagcctgagcagcagcaccccccccctgcccagccccggcagaagcggccccctgccccccccccccagcgagagaccccccccccccgtgagagacccccccggcagaagcggccccctgcccccccccccccccgtgagcagaaacggcagcaccagcagagccctgcccgccaccccccagctgcccagcagaagcggcgtggacagccccagaagcggccccagaccccccctgccccccgacagacccagcgccggcgccccccccccccccccccccagcaccagcatcagaaacggcttccaggacagcccctgcgaggacgagtgggagagcagattctacttccaccccatcagcgacctgcccccccccgagccctacgtgcagaccaccaagagctaccccagcaagctggccagaaacgagagcagaagcgagtacttctgccagggcttctag

SEQ ID NO: 13547 - DNA, 303 bp, synthetic construct
  misc_feature 1..303: note = Description of Artificial Sequence: Synthetic coding sequence
  source 1..303: mol_type = other DNA
atgcccgtgccccccccccccgcccccccccccccccccaccttcgccctggccaacaccgagaagcccaccctgaacaagaccgagcaggccggcagaaacgccctgctgagcgacatcagcaagggcaagaagctgaagaagaccgtgaccaacgacagaagcgcccccatcctggacaagcccaagggcgccggcgccggcggcggcggcggcggcttcggcggcggcggcggcttcggcggcggcggcggcggcggcggcggcggcagcttcggcggcggcggcccccccggcctgtag

SEQ ID NO: 13548 - DNA, 1647 bp, synthetic construct
  misc_feature 1..1647: note = Description of Artificial Sequence: Synthetic coding sequence
  source 1..1647: mol_type = other DNA
atgaagaccctggagacccagcccctggcccccgactgctgccccagcgaccaggaccccgcccccgcccaccccagcccccacgccagccccatgaacaagaacgccgacagcgagctgatgccccccccccccgagagaggcgacccccccagactgagccccgaccccgtggccggcagcgccgtgagccaggagctgagagagggcgaccccgtgagcctgagcacccccctggagaccgagttcggcagccccagcgagctgagccccagaatcgaggagcaggagctgagcgagaacaccagcctgcccgccgaggaggccaacggcagcctgagcgaggaggaggccaacggccccgagctgggcagcggcaaggccatggaggacaccagcggcgagcccgccgccgaggacgagggcgacaccgcctggaactacagcttcagccagctgcccagattcctgagcggcagctggagcgagttcagcacccagcccgagaacttcctgaagggctgcaagtgggcccccgacggcagctgcatcctgaccaacagcgccgacaacatcctgagaatctacaacctgccccccgagctgtaccacgagggcgagcaggtggagtacgccgagatggtgcccgtgctgagaatggtggagggcgacaccatctacgactactgctggtacagcctgatgagcagcgcccagcccgacaccagctacgtggccagcagcagcagagagaaccccatccacatctgggacgccttcaccggcgagctgagagccagcttcagagcctacaaccacctggacgagctgaccgccgcccacagcctgtgcttcagccccgacggcagccagctgttctgcggcttcaacagaaccgtgagagtgttcagcaccgccagacccggcagagactgcgaggtgagagccaccttcgccaagaagcagggccagagcggcatcatcagctgcatcgccttcagccccgcccagcccctgtacgcctgcggcagctacggcagaagcctgggcctgtacgcctgggacgacggcagccccctggccctgctgggcggccaccagggcggcatcacccacctgtgcttccaccccgacggcaacagattcttcagcggcgccagaaaggacgccgagctgctgtgctgggacctgagacagagcggctaccccctgtggagcctgggcagagaggtgaccaccaaccagagaatctacttcgacctggaccccaccggccagttcctggtgagcggcagcaccagcggcgccgtgagcgtgtgggacaccgacggccccggcaacgacggcaagcccgagcccgtgctgagcttcctgccccagaaggactgcaccaacggcgtgagcctgcaccccagcctgcccctgctggccaccgccagcggccagagagtgttccccgagcccaccgagagcggcgacgagggcgaggagctgggcctgcccctgctgagcaccagacacgtgcacctggagtgcagactgcagctgtggtggtgcggcggcgcccccgacagcagcatccccgacgaccaccagggcgagaagggccagggcggcaccgagggcggcgtgggcgagctgatctag

SEQ ID NO: 13549 - DNA, 1647 bp, synthetic construct; identical to SEQ ID NO: 13548
  misc_feature 1..1647: note = Description of Artificial Sequence: Synthetic coding sequence
  source 1..1647: mol_type = other DNA

SEQ ID NO: 13550 - DNA, 1647 bp, synthetic construct; identical to SEQ ID NO: 13548
  misc_feature 1..1647: note = Description of Artificial Sequence: Synthetic coding sequence
  source 1..1647: mol_type = other DNA

SEQ ID NO: 13551 - DNA, 567 bp, synthetic construct
  misc_feature 1..567: note = Description of Artificial Sequence: Synthetic coding sequence
  source 1..567: mol_type = other DNA
atgaagaccctggagacccagcccctggcccccgactgctgccccagcgaccaggaccccgcccccgcccagcccgacaccagctacgtggccagcagcagcagagagaaccccatccacatctgggacgccttcaccggcgagctgagagccagcttcagagcctacaaccacctggacgagctgaccgccgcccacagcctgtgcttcagccccgacggcagccagctgttctgcggcttcaacagaaccgtgagagtgttcagcaccgccagacccggcagagactgcgaggtgagagccaccttcggcaagcacctgtgcctgcagggcagaagaagaggcaagggcaccgccacctgcaccggcgccttctgcgagcccggcgccacctgcggcggcagcagaagacccctgtacggccccggcagcagatgcagccccgtgggcagaggcgccaacagactgagagccggcagaaagcccagccagggccagcccgccggccagagaaccgccagcttcctgaacagctaccccgtgagctgcggcgccttcggcctgtag

SEQ ID NO: 13552 - DNA, 1647 bp, synthetic construct; identical to SEQ ID NO: 13548
  misc_feature 1..1647: note = Description of Artificial Sequence: Synthetic coding sequence
  source 1..1647: mol_type = other DNA

SEQ ID NO: 13553 - DNA, 1299 bp, synthetic construct
  misc_feature 1..1299: note = Description of Artificial Sequence: Synthetic coding sequence
  source 1..1299: mol_type = other DNA
atggacaccgagaagagcggcaagagagagttcgacgtgagacagaccccccaggtgaacatcaaccccttcacccccgacagcctgctgctgcacagcagcggccagtgcagaagaagaaagagaacctactggaacgacagctgcggcgaggacatggaggccagcgactacgagctggaggacgagaccagacccgccaagagaatcaccatcaccgagagcaacatgaagagcagatacaccaccgagttccacgagctggagaagatcggcagcggcgagttcggcagcgtgttcaagtgcgtgaagagactggacggctgcatctacgccatcaagagaagcaagaagcccctggccggcagcgtggacgagcagaacgccctgagagaggtgtacgcccacgccgtgctgggccagcacagccacgtggtgagatacttcagcgcctgggccgaggacgaccacatgctgatccagaacgagtactgcaacggcggcagcctggccgacgccatcagcgagaactacagaatcatgagctacttcaaggaggccgagctgaaggacctgctgctgcaggtgggcagaggcctgagatacatccacagcatgagcctggtgcacatggacatcaagcccagcaacatcttcatcagcagaaccagcatccccaacgccgccagcgaggagggcgacgaggacgactgggccagcaacaaggtgatgttcaagatcggcgacctgggccacgtgaccagaatcagcagcccccaggtggaggagggcgacagcagattcctggccaacgaggtgctgcaggagaactacacccacctgcccaaggccgacatcttcgccctggccctgaccgtggtgtgcgccgccggcgccgagcccctgcccagaaacggcgaccagtggcacgagatcagacagggcagactgcccagaatcccccaggtgctgagccaggagttcaccgagctgctgaaggtgatgatccaccccgaccccgagagaagacccagcgccatggccctggtgaagcacagcgtgctgctgagcgccagcagaaagagcgccgagcagctgagaatcgagctgaacgccgagaagttcaagaacagcctgctgcagaaggagctgaagaaggcccagatggccaaggccgccgccgaggagagagccctgttcaccgacagaatggccaccagaagcaccacccagagcaacagaaccagcagactgatcggcaagaagatgaacagaagcgtgagcctgaccatctactag

SEQ ID NO: 13554 - DNA, 1941 bp, synthetic construct
  misc_feature 1..1941: note = Description of Artificial Sequence: Synthetic coding sequence
  source 1..1941: mol_type = other DNA
atgagcttcctgagcagacagcagccccccccccccagaagagccggcgccgcctgcaccctgagacagaagctgatcttcagcccctgcagcgactgcgaggaggaggaggaggaggaggaggaggagggcagcggccacagcaccggcgaggacagcgccttccaggagcccgacagccccctgccccccgccagaagccccaccgagcccggccccgagagaagaagaagccccggccccgcccccggcagccccggcgagctggaggaggacctgctgctgcccggcgcctgccccggcgccgacgaggccggcggcggcgccgagggcgacagctgggaggaggagggcttcggcagcagcagccccgtgaagagccccgccgccccctacttcctgggcagcagcttcagccccgtgagatgcggcggccccggcgacgccagccccagaggctgcggcgccagaagagccggcgagggcagaagaagccccagacccgaccaccccggcacccccccccacaagaccttcagaaagctgagactgttcgacaccccccacacccccaagagcctgctgagcaaggccagaggcatcgacagcagcagcgtgaagctgagaggcagcagcctgttcatggacaccgagaagagcggcaagagagagttcgacgtgagacagaccccccaggtgaacatcaaccccttcacccccgacagcctgctgctgcacagcagcggccagtgcagaagaagaaagagaacctactggaacgacagctgcggcgaggacatggaggccagcgactacgagctggaggacgagaccagacccgccaagagaatcaccatcaccgagagcaacatgaagagcagatacaccaccgagttccacgagctggagaagatcggcagcggcgagttcggcagcgtgttcaagtgcgtgaagagactggacggctgcatctacgccatcaagagaagcaagaagcccctggccggcagcgtggacgagcagaacgccctgagagaggtgtacgcccacgccgtgctgggccagcacagccacgtggtgagatacttcagcgcctgggccgaggacgaccacatgctgatccagaacgagtactgcaacggcggcagcctggccgacgccatcagcgagaactacagaatcatgagctacttcaaggaggccgagctgaaggacctgctgctgcaggtgggcagaggcctgagatacatccacagcatgagcctggtgcacatggacatcaagcccagcaacatcttcatcagcagaaccagcatccccaacgccgccagcgaggagggcgacgaggacgactgggccagcaacaaggtgatgttcaagatcggcgacctgggccacgtgaccagaatcagcagcccccaggtggaggagggcgacagcagattcctggccaacgaggtgctgcaggagaactacacccacctgcccaaggccgacatcttcgccctggccctgaccgtggtgtgcgccgccggcgccgagcccctgcccagaaacggcgaccagtggcacgagatcagacagggcagactgcccagaatcccccaggtgctgagccaggagttcaccgagctgctgaaggtgatgatccaccccgaccccgagagaagacccagcgccatggccctggtgaagcacagcgtgctgctgagcgccagcagaaagagcgccgagcagctgagaatcgagctgaacgccgagaagttcaagaacagcctgctgcagaaggagctgaagaaggcccagatggccaaggccgccgccgaggagagagccctgttcaccgacagaatggccaccagaagcaccacccagagcaacagaaccagcagactgatcggcaagaagatgaacagaagcgtgagcctgaccatctactag

SEQ ID NO: 13555 - DNA, 1554 bp, synthetic construct
  misc_feature 1..1554: note = Description of Artificial Sequence: Synthetic coding sequence
  source 1..1554: mol_type = other DNA
ctgcaggaccccgccagcacctgcgtgcccgagcccgccagccagcacaccctgagaagcggccccggctgcctgcagcagcccgagcagcagggcgtgagagaccccggcggcatctgggccaagctgggcgccgccgaggccagcgccgagagactgcagggcagaagaagcagaggcgccagcggcagcgagccccagcagatgggcagcgacgtgagagacctgaacgccctgctgcccgccgtgcccagcctgggcggcggcggcggctgcgccctgcccgtgagcggcgccgcccagtgggcccccgtgctggacttcgccccccccggcgccagcgcctacggcagcctgggcggccccgcccccccccccgccccccccccccccccccccccccccccccacagcttcatcaagcaggagcccagctggggcggcgccgagccccacgaggagcagtgcctgagcgccttcaccgtgcacttcagcggccagttcaccggcaccgccggcgcctgcagatacggccccttcggcccccccccccccagccaggccagcagcggccaggccagaatgttccccaacgccccctacctgcccagctgcctggagagccagcccgccatcagaaaccagggctacagcaccgtgaccttcgacggcacccccagctacggccacacccccagccaccacgccgcccagttccccaaccacagcttcaagcacgaggaccccatgggccagcagggcagcctgggcgagcagcagtacagcgtgcccccccccgtgtacggctgccacacccccaccgacagctgcaccggcagccaggccctgctgctgagaaccccctacagcagcgacaacctgtaccagatgaccagccagctggagtgcatgacctggaaccagatgaacctgggcgccaccctgaagggcgtggccgccggcagcagcagcagcgtgaagtggaccgagggccagagcaaccacagcaccggctacgagagcgacaaccacaccacccccatcctgtgcggcgcccagtacagaatccacacccacggcgtgttcagaggcatccaggacgtgagaagagtgcccggcgtggcccccaccctggtgagaagcgccagcgagaccagcgagaagagacccttcatgtgcgcctaccccggctgcaacaagagatacttcaagctgagccacctgcagatgcacagcagaaagcacaccggcgagaagccctaccagtgcgacttcaaggactgcgagagaagattcagcagaagcgaccagctgaagagacaccagagaagacacaccggcgtgaagcccttccagtgcaagacctgccagagaaagttcagcagaagcgaccacctgaagacccacaccagaacccacaccggcaagaccagcgagaagcccttcagctgcagatggcccagctgccagaagaagttcgccagaagcgacgagctggtgagacaccacaacatgcaccagagaaacatgaccaagctgcagctggccctgtag

SEQ ID NO: 13556 - DNA, 954 bp, synthetic construct
  misc_feature 1..954: note = Description of Artificial Sequence: Synthetic coding sequence
  source 1..954: mol_type = other DNA
ctgcaggaccccgccagcacctgcgtgcccgagcccgccagccagcacaccctgagaagcggccccggctgcctgcagcagcccgagcagcagggcgtgagagaccccggcggcatctgggccaagctgggcgccgccgaggccagcgccgagagactgcagggcagaagaagcagaggcgccagcggcagcgagccccagcagatgggcagcgacgtgagagacctgaacgccctgctgcccgccgtgcccagcctgggcggcggcggcggctgcgccctgcccgtgagcggcgccgcccagtgggcccccgtgctggacttcgccccccccggcgccagcgcctacggcagcctgggcggccccgcccccccccccgccccccccccccccccccccccccccccccacagcttcatcaagcaggagcccagctggggcggcgccgagccccacgaggagcagtgcctgagcgccttcaccgtgcacttcagcggccagttcaccggcaccgccggcgcctgcagatacggccccttcggcccccccccccccagccaggccagcagcggccaggccagaatgttccccaacgccccctacctgcccagctgcctggagagccagcccgccatcagaaaccagggctacagcaccgtgaccttcgacggcacccccagctacggccacacccccagccaccacgccgcccagttccccaaccacagcttcaagcacgaggaccccatgggccagcagggcagcctgggcgagcagcagtacagcgtgcccccccccgtgtacggctgccacacccccaccgacagctgcaccggcagccaggccctgctgctgagaaccccctacagcagcgacaacctgtaccagatgaccagccagctggagtgcatgacctggaaccagatgaacctgggcgccaccctgaagggctag

SEQ ID NO: 13557 - DNA, 909 bp, synthetic construct
  misc_feature 1..909: note = Description of Artificial Sequence: Synthetic coding sequence
  source 1..909: mol_type = other DNA
atggagaagggctacagcaccgtgaccttcgacggcacccccagctacggccacacccccagccaccacgccgcccagttccccaaccacagcttcaagcacgaggaccccatgggccagcagggcagcctgggcgagcagcagtacagcgtgcccccccccgtgtacggctgccacacccccaccgacagctgcaccggcagccaggccctgctgctgagaaccccctacagcagcgacaacctgtaccagatgaccagccagctggagtgcatgacctggaaccagatgaacctgggcgccaccctgaagggcgtggccgccggcagcagcagcagcgtgaagtggaccgagggccagagcaaccacagcaccggctacgagagcgacaaccacaccacccccatcctgtgcggcgcccagtacagaatccacacccacggcgtgttcagaggcatccaggacgtgagaagagtgcccggcgtggcccccaccctggtgagaagcgccagcgagaccagcgagaagagacccttcatgtgcgcctaccccggctgcaacaagagatacttcaagctgagccacctgcagatgcacagcagaaagcacaccggcgagaagccctaccagtgcgacttcaaggactgcgagagaagattcagcagaagcgaccagctgaagagacaccagagaagacacaccggcgtgaagcccttccagtgcaagacctgccagagaaagttcagcagaagcgaccacctgaagacccacaccagaacccacaccggcgagaagcccttcagctgcagatggcccagctgccagaagaagttcgccagaagcgacgagctggtgagacaccacaacatgcaccagagaaacatgaccaagctgcagctggccctgtag

SEQ ID NO: 13558 - DNA, 1545 bp, synthetic construct
  misc_feature 1..1545: note = Description of Artificial Sequence: Synthetic coding sequence
  source 1..1545: mol_type = other DNA
ctgcaggaccccgccagcacctgcgtgcccgagcccgccagccagcacaccctgagaagcggccccggctgcctgcagcagcccgagcagcagggcgtgagagaccccggcggcatctgggccaagctgggcgccgccgaggccagcgccgagagactgcagggcagaagaagcagaggcgccagcggcagcgagccccagcagatgggcagcgacgtgagagacctgaacgccctgctgcccgccgtgcccagcctgggcggcggcggcggctgcgccctgcccgtgagcggcgccgcccagtgggcccccgtgctggacttcgccccccccggcgccagcgcctacggcagcctgggcggccccgcccccccccccgccccccccccccccccccccccccccccccacagcttcatcaagcaggagcccagctggggcggcgccgagccccacgaggagcagtgcctgagcgccttcaccgtgcacttcagcggccagttcaccggcaccgccggcgcctgcagatacggccccttcggcccccccccccccagccaggccagcagcggccaggccagaatgttccccaacgccccctacctgcccagctgcctggagagccagcccgccatcagaaaccagggctacagcaccgtgaccttcgacggcacccccagctacggccacacccccagccaccacgccgcccagttccccaaccacagcttcaagcacgaggaccccatgggccagcagggcagcctgggcgagcagcagtacagcgtgcccccccccgtgtacggctgccacacccccaccgacagctgcaccggcagccaggccctgctgctgagaaccccctacagcagcgacaacctgtaccagatgaccagccagctggagtgcatgacctggaaccagatgaacctgggcgccaccctgaagggcgtggccgccggcagcagcagcagcgtgaagtggaccgagggccagagcaaccacagcaccggctacgagagcgacaaccacaccacccccatcctgtgcggcgcccagtacagaatccacacccacggcgtgttcagaggcatccaggacgtgagaagagtgcccggcgtggcccccaccctggtgagaagcgccagcgagaccagcgagaagagacccttcatgtgcgcctaccccggctgcaacaagagatacttcaagctgagccacctgcagatgcacagcagaaagcacaccggcgagaagccctaccagtgcgacttcaaggactgcgagagaagattcagcagaagcgaccagctgaagagacaccagagaagacacaccggcgtgaagcccttccagtgcaagacctgccagagaaagttcagcagaagcgaccacctgaagacccacaccagaacccacaccggcgagaagcccttcagctgcagatggcccagctgccagaagaagttcgccagaagcgacgagctggtgagacaccacaacatgcaccagagaaacatgaccaagctgcagctggccctgtag

SEQ ID NO: 13559 - DNA, 1494 bp, synthetic construct
  misc_feature 1..1494: note = Description of Artificial Sequence: Synthetic coding sequence
  source 1..1494: mol_type = other DNA
ctgcaggaccccgccagcacctgcgtgcccgagcccgccagccagcacaccctgagaagcggccccggctgcctgcagcagcccgagcagcagggcgtgagagaccccggcggcatctgggccaagctgggcgccgccgaggccagcgccgagagactgcagggcagaagaagcagaggcgccagcggcagcgagccccagcagatgggcagcgacgtgagagacctgaacgccctgctgcccgccgtgcccagcctgggcggcggcggcggctgcgccctgcccgtgagcggcgccgcccagtgggcccccgtgctggacttcgccccccccggcgccagcgcctacggcagcctgggcggccccgcccccccccccgccccccccccccccccccccccccccccccacagcttcatcaagcaggagcccagctggggcggcgccgagccccacgaggagcagtgcctgagcgccttcaccgtgcacttcagcggccagttcaccggcaccgccggcgcctgcagatacggccccttcggcccccccccccccagccaggccagcagcggccaggccagaatgttccccaacgccccctacctgcccagctgcctggagagccagcccgccatcagaaaccagggctacagcaccgtgaccttcgacggcacccccagctacggccacacccccagccaccacgccgcccagttccccaaccacagcttcaagcacgaggaccccatgggccagcagggcagcctgggcgagcagcagtacagcgtgcccccccccgtgtacggctgccacacccccaccgacagctgcaccggcagccaggccctgctgctgagaaccccctacagcagcgacaacctgtaccagatgaccagccagctggagtgcatgacctggaaccagatgaacctgggcgccaccctgaagggccacagcaccggctacgagagcgacaaccacaccacccccatcctgtgcggcgcccagtacagaatccacacccacggcgtgttcagaggcatccaggacgtgagaagagtgcccggcgtggcccccaccctggtgagaagcgccagcgagaccagcgagaagagacccttcatgtgcgcctaccccggctgcaacaagagatacttcaagctgagccacctgcagatgcacagcagaaagcacaccggcgagaagccctaccagtgcgacttcaaggactgcgagagaagattcagcagaagcgaccagctgaagagacaccagagaagacacaccggcgtgaagcccttccagtgcaagacctgccagagaaagttcagcagaagcgaccacctgaagacccacaccagaacccacaccggcgagaagcccttcagctgcagatggcccagctgccagaagaagttcgccagaagcgacgagctggtgagacaccacaacatgcaccagagaaacatgaccaagctgcagctggccctgtag

SEQ ID NO: 13560 - DNA, 396 bp, synthetic construct
  misc_feature 1..396: note = Description of Artificial Sequence: Synthetic coding sequence
  source 1..396: mol_type = other DNA
atgggccagcagggcagcctgggcgagcagcagtacagcgtgcccccccccgtgtacggctgccacacccccaccgacagctgcaccggcagccaggccctgctgctgagaaccccctacagcagcgacaacctgtaccagatgaccagccagctggagtgcatgacctggaaccagatgaacctgggcgccaccctgaagggcgtggccgccggcagcagcagcagcgtgaagtggaccgagggccagagcaaccacagcaccggctacgagagcgacaaccacaccacccccatcctgtgcggcgcccagtacagaatccacacccacggcgtgttcagaggcatccaggacgtgagaagagtgcccggcgtggcccccaccctggtgagatag

SEQ ID NO: 13561 - DNA, 537 bp, synthetic construct
  misc_feature 1..537: note = Description of Artificial Sequence: Synthetic coding sequence
  source 1..537: mol_type = other DNA
tgactgggcgccaccctgaagggcgtggccgccggcagcagcagcagcgtgaagtggaccgagggccagagcaaccacagcaccggctacgagagcgacaaccacaccacccccatcctgtgcggcgcccagtacagaatccacacccacggcgtgttcagaggcatccaggacgtgagaagagtgcccggcgtggcccccaccctggtgagaagcgccagcgagaccagcgagaagagacccttcatgtgcgcctaccccggctgcaacaagagatacttcaagctgagccacctgcagatgcacagcagaaagcacaccggcgtgaagcccttccagtgcaagacctgccagagaaagttcagcagaagcgaccacctgaagacccacaccagaacccacaccggcaagaccagcgagaagcccttcagctgcagatggcccagctgccagaagaagttcgccagaagcgacgagctggtgagacaccacaacatgcaccagagaaacatgaccaagctgcagctggccctgtag

SEQ ID NO: 13562 - DNA, 867 bp, synthetic construct
  misc_feature 1..867: note = Description of Artificial Sequence: Synthetic coding sequence
  source 1..867: mol_type = other DNA
atggagaagggctacagcaccgtgaccttcgacggcacccccagctacggccacacccccagccaccacgccgcccagttccccaaccacagcttcaagcacgaggaccccatgggccagcagggcagcctgggcgagcagcagtacagcgtgcccccccccgtgtacggctgccacacccccaccgacagctgcaccggcagccaggccctgctgctgagaaccccctacagcagcgacaacctgtaccagatgaccagccagctggagtgcatgacctggaaccagatgaacctgggcgccaccctgaagggccacagcaccggctacgagagcgacaaccacaccacccccatcctgtgcggcgcccagtacagaatccacacccacggcgtgttcagaggcatccaggacgtgagaagagtgcccggcgtggcccccaccctggtgagaagcgccagcgagaccagcgagaagagacccttcatgtgcgcctaccccggctgcaacaagagatacttcaagctgagccacctgcagatgcacagcagaaagcacaccggcgagaagccctaccagtgcgacttcaaggactgcgagagaagattcagcagaagcgaccagctgaagagacaccagagaagacacaccggcgtgaagcccttccagtgcaagacctgccagagaaagttcagcagaagcgaccacctgaagacccacaccagaacccacaccggcaagaccagcgagaagcccttcagctgcagatggcccagctgccagaagaagttcgccagaagcgacgagctggtgagacaccacaacatgcaccagagaaacatgaccaagctgcagctggccctgtag

SEQ ID NO: 13563 - DNA, 1065 bp, synthetic construct
  misc_feature 1..1065: note = Description of Artificial Sequence: Synthetic coding sequence
  source 1..1065: mol_type = other DNA
atgagagccagaccccaggtgtgcgaggccctgctgttcgccctggccctgcagaccggcgtgtgctacggcatcaagtggctggccctgagcaagacccccagcgccctggccctgaaccagacccagcactgcaagcagctggagggcctggtgagcgcccaggtgcagctgtgcagaagcaacctggagctgatgcacaccgtggtgcacgccgccagagaggtgatgaaggcctgcagaagagccttcgccgacatgagatggaactgcagcagcatcgagctggcccccaactacctgctggacctggagagaggcaccagagagagcgccttcgtgtacgccctgagcgccgccgccatcagccacgccatcgccagagcctgcaccagcggcgacctgcccggctgcagctgcggccccgtgcccggcgagccccccggccccggcaacagatggggcggctgcgccgacaacctgagctacggcctgctgatgggcgccaagttcagcgacgcccccatgaaggtgaagaagaccggcagccaggccaacaagctgatgagactgcacaacagcgaggtgggcagacaggccctgagagccagcctggagatgaagtgcaagtgccacggcgtgagcggcagctgcagcatcagaacctgctggaagggcctgcaggagctgcaggacgtggccgccgacctgaagaccagatacctgagcgccaccaaggtggtgcacagacccatgggcaccagaaagcacctggtgcccaaggacctggacatcagacccgtgaaggacagcgagctggtgtacctgcagagcagccccgacttctgcatgaagaacgagaaggtgggcagccacggcacccaggacagacagtgcaacaagaccagcaacggcagcgacagctgcgacctgatgtgctgcggcagaggctacaacccctacaccgacagagtggtggagagatgccactgcaagtaccactggtgctgctacgtgacctgcagaagatgcgagagaaccgtggagagatacgtgtgcaagtag

SEQ ID NO: 13564 - DNA, 762 bp, synthetic construct
  misc_feature 1..762: note = Description of Artificial Sequence: Synthetic coding sequence
  source 1..762: mol_type = other DNA
atgagagccagaccccaggtgtgcgaggccctgctgttcgccctggccctgcagaccggcgtgtgctacggcatcaagtggctggccctgagcaagacccccagcgccctggccctgaaccagacccagcactgcaagcagctggagggcctggtgagcgcccaggtgcagctgtgcagaagcaacctggagctgatgcacaccgtggtgcacgccgccagagaggtgatgaaggcctgcagaagagccttcgccgacatgagatggaactgcagcagcatcgagctggcccccaactacctgctggacctggagagaggcaccagagagagcgccttcgtgtacgccctgagcgccgccgccatcagccacgccatcgccagagcctgcaccagcggcgacctgcccggctgcagctgcggccccgtgcccggcgagccccccggccccggcaacagatggggcggctgcgccgacaacctgagctacggcctgctgatgggcgccaagttcagcgacgcccccatgaaggtgaagaagaccggcagccaggccaacaagctgatgagactgcacaacagcgaggtgggcagacaggccctgagagccagcctgctggtgaacagcagatgccaggcctgggaggccgcctgcgccctgcccagcctgggcagccaccaggagcagaaggtgtggcccccctggaaggagggcagaaccagcaaggagaccgacaagatcaagaacaacctggccgcctag

SEQ ID NO: 13565 - DNA, 18 bp, synthetic construct
  misc_feature 1..18: note = Description of Artificial Sequence: Synthetic coding sequence
  source 1..18: mol_type = other DNA
atgagagccagaccctag

SEQ ID NO: 13566 - DNA, 1143 bp, synthetic construct
  misc_feature 1..1143: note = Description of Artificial Sequence: Synthetic coding sequence
  source 1..1143: mol_type = other DNA
atgaagaagagcatcggcatcctgagccccggcgtggccctgggcatggccggcagcgccatgagcagcaagttcttcctggtggccctggccatcttcttcagcttcgcccaggtggtgatcgaggccaacagctggtggagcctgggcatgaacaaccccgtgcagatgagcgaggtgtacatcatcggcgcccagcccctgtgcagccagctggccggcctgagccagggccagaagaagctgtgccacctgtaccaggaccacatgcagtacatcggcgagggcgccaagaccggcatcaaggagtgccagtaccagttcagacacagaagatggaactgcagcaccgtggacaacaccagcgtgttcggcagagtgatgcagatcggcagcagagagaccgccttcacctacgccgtgagcgccgccggcgtggtgaacgccatgagcagagcctgcagagagggcgagctgagcacctgcggctgcagcagagccgccagacccaaggacctgcccagagactggctgtggggcggctgcggcgacaacatcgactacggctacagattcgccaaggagttcgtggacgccagagagagagagagaatccacgccaagggcagctacgagagcgccagaatcctgatgaacctgcacaacaacgaggccggcagaagaaccgtgtacaacctggccgacgtggcctgcaagtgccacggcgtgagcggcagctgcagcctgaagacctgctggctgcagctggccgacttcagaaaggtgggcgacgccctgaaggagaagtacgacagcgccgccgccatgagactgaacagcagaggcaagctggtgcaggtgaacagcagattcaacagccccaccacccaggacctggtgtacatcgaccccagccccgactactgcgtgagaaacgagagcaccggcagcctgggcacccagggcagactgtgcaacaagaccagcgagggcatggacggctgcgagctgatgtgctgcggcagaggctacgaccagttcaagaccgtgcagaccgagagatgccactgcaagttccactggtgctgctacgtgaagtgcaagaagtgcaccgagatcgtggaccagttcgtgtgcaagtag

SEQ ID NO: 13567 - DNA, 390 bp, synthetic construct
  misc_feature 1..390: note = Description of Artificial Sequence: Synthetic coding sequence
  source 1..390: mol_type = other DNA
atgaagaagagcatcggcatcctgagccccggcgtggccctgggcatggccggcagcgccatgagcagcaagttcttcctggtggccctggccatcttcttcagcttcgcccaggtggtgatcgaggccaacagctggtggagcctgggcatgaacaaccccgtgcagatgagccaggacgtgggcggccacggctggctgagagcccacgtgctgagaccctggctgagacccgtgcaggacagagccgacggcgccctgcccctgcaggtgcccctggtgctgctgagacaggtgcaggaggtgcacggcgacagaggccccgtgtgcgtgcaggtggtgggcgccacccagcacagcgcccccctgcccggccccgcctacctgtag

SEQ ID NO: 13568 - DNA, 1143 bp, synthetic construct; identical to SEQ ID NO: 13566
  misc_feature 1..1143: note = Description of Artificial Sequence: Synthetic coding sequence
  source 1..1143: mol_type = other DNA

SEQ ID NO: 13569 - DNA, 645 bp, synthetic construct
  misc_feature 1..645: note = Description of Artificial Sequence: Synthetic coding sequence
  source 1..645: mol_type = other DNA
atggccggcagcgccatgagcagcaagttcttcctggtggccctggccatcttcttcagcttcgcccaggtggtgatcgaggccaacagctggtggagcctgggcatgaacaaccccgtgcagatgagcgaggtgtacatcatcggcgcccagcccctgtgcagccagctggccggcctgagccagggccagaagaagctgtgccacctgtaccaggaccacatgcagtacatcggcgagggcgccaagaccggcatcaaggagtgccagtaccagttcagacacagaagatggaactgcagcaccgtggacaacaccagcgtgttcggcagagtgatgcagatcggcagcagagagaccgccttcacctacgccgtgagcgccgccggcgtggtgaacgccatgagcagagcctgcagagagggcgagctgagcacctgcggctgcagcagagccgccagacccaaggacctgcccagagactggctgtggggcggctgcggcgacaacatcgactacggctacagattcgccaaggagttcgtggacgccagagagagagagagaatccacgccaagggcagctacgagagcgccagaatcctgatgaacctgcacaacaacgaggccggcagaagagtgtag

SEQ ID NO: 13570 - DNA, 1098 bp, synthetic construct
  misc_feature 1..1098: note = Description of Artificial Sequence: Synthetic coding sequence
  source 1..1098: mol_type = other DNA
atggccggcagcgccatgagcagcaagttcttcctggtggccctggccatcttcttcagcttcgcccaggtggtgatcgaggccaacagctggtggagcctgggcatgaacaaccccgtgcagatgagcgaggtgtacatcatcggcgcccagcccctgtgcagccagctggccggcctgagccagggccagaagaagctgtgccacctgtaccaggaccacatgcagtacatcggcgagggcgccaagaccggcatcaaggagtgccagtaccagttcagacacagaagatggaactgcagcaccgtggacaacaccagcgtgttcggcagagtgatgcagatcggcagcagagagaccgccttcacctacgccgtgagcgccgccggcgtggtgaacgccatgagcagagcctgcagagagggcgagctgagcacctgcggctgcagcagagccgccagacccaaggacctgcccagagactggctgtggggcggctgcggcgacaacatcgactacggctacagattcgccaaggagttcgtggacgccagagagagagagagaatccacgccaagggcagctacgagagcgccagaatcctgatgaacctgcacaacaacgaggccggcagaagaaccgtgtacaacctggccgacgtggcctgcaagtgccacggcgtgagcggcagctgcagcctgaagacctgctggctgcagctggccgacttcagaaaggtgggcgacgccctgaaggagaagtacgacagcgccgccgccatgagactgaacagcagaggcaagctggtgcaggtgaacagcagattcaacagccccaccacccaggacctggtgtacatcgaccccagccccgactactgcgtgagaaacgagagcaccggcagcctgggcacccagggcagactgtgcaacaagaccagcgagggcatggacggctgcgagctgatgtgctgcggcagaggctacgaccagttcaagaccgtgcagaccgagagatgccactgcaagttccactggtgctgctacgtgaagtgcaagaagtgcaccgagatcgtggaccagttcgtgtgcaagtag

SEQ ID NO: 13571 - DNA, 876 bp, synthetic construct
  misc_feature 1..876: note = Description of Artificial Sequence: Synthetic coding sequence
  source 1..876: mol_type = other DNA
atgcagtacatcggcgagggcgccaagaccggcatcaaggagtgccagtaccagttcagacacagaagatggaactgcagcaccgtggacaacaccagcgtgttcggcagagtgatgcagatcggcagcagagagaccgccttcacctacgccgtgagcgccgccggcgtggtgaacgccatgagcagagcctgcagagagggcgagctgagcacctgcggctgcagcagagccgccagacccaaggacctgcccagagactggctgtggggcggctgcggcgacaacatcgactacggctacagattcgccaaggagttcgtggacgccagagagagagagagaatccacgccaagggcagctacgagagcgccagaatcctgatgaacctgcacaacaacgaggccggcagaagaaccgtgtacaacctggccgacgtggcctgcaagtgccacggcgtgagcggcagctgcagcctgaagacctgctggctgcagctggccgacttcagaaaggtgggcgacgccctgaaggagaagtacgacagcgccgccgccatgagactgaacagcagaggcaagctggtgcaggtgaacagcagattcaacagccccaccacccaggacctggtgtacatcgaccccagccccgactactgcgtgagaaacgagagcaccggcagcctgggcacccagggcagactgtgcaacaagaccagcgagggcatggacggctgcgagctgatgtgctgcggcagaggctacgaccagttcaagaccgtgcagaccgagagatgccactgcaagttccactggtgctgctacgtgaagtgcaagaagtgcaccgagatcgtggaccagttcgtgtgcaagtag

SEQ ID NO: 13572 - DNA, 1080 bp, synthetic construct
  misc_feature 1..1080: note = Description of Artificial Sequence: Synthetic coding sequence
  source 1..1080: mol_type = other DNA
atgcccagcctgctgctgctgttcaccgccgccctgctgagcagctgggcccagctgctgaccgacgccaacagctggtggagcctggccctgaaccccgtgcagagacccgagatgttcatcatcggcgcccagcccgtgtgcagccagctgcccggcctgagccccggccagagaaagctgtgccagctgtaccaggagcacatggcctacatcggcgagggcgccaagaccggcatcaaggagtgccagcaccagttcagacagagaagatggaactgcagcaccgccgacaacgccagcgtgttcggcagagtgatgcagatcggcagcagagagaccgccttcacccacgccgtgagcgccgccggcgtggtgaacgccatcagcagagcctgcagagagggcgagctgagcacctgcggctgcagcagaaccgccagacccaaggacctgcccagagactggctgtggggcggctgcggcgacaacgtggagtacggctacagattcgccaaggagttcgtggacgccagagagagagagaagaacttcgccaagggcagcgaggagcagggcagagtgctgatgaacctgcagaacaacgaggccggcagaagagccgtgtacaagatggccgacgtggcctgcaagtgccacggcgtgagcggcagctgcagcctgaagacctgctggctgcagctggccgagttcagaaaggtgggcgacagactgaaggagaagtacgacagcgccgccgccatgagagtgaccagaaagggcagactggagctggtgaacagcagattcacccagcccacccccgaggacctggtgtacgtggaccccagccccgactactgcctgagaaacgagagcaccggcagcctgggcacccagggcagactgtgcaacaagaccagcgagggcatggacggctgcgagctgatgtgctgcggcagaggctacaaccagttcaagagcgtgcaggtggagagatgccactgcaagttccactggtgctgcttcgtgagatgcaagaagtgcaccgagatcgtggaccagtacatctgcaagtag

SEQ ID NO: 13573 - DNA, 1080 bp, synthetic construct; identical to SEQ ID NO: 13572
  misc_feature 1..1080: note = Description of Artificial Sequence: Synthetic coding sequence
  source 1..1080: mol_type = other DNA

SEQ ID NO: 13574 - DNA, 1080 bp, synthetic construct; identical to SEQ ID NO: 13572
  misc_feature 1..1080: note = Description of Artificial Sequence: Synthetic coding sequence
  source 1..1080: mol_type = other DNA

SEQ ID NO: 13575 - DNA, 1398 bp, synthetic construct
  misc_feature 1..1398: note = Description of Artificial Sequence: Synthetic coding sequence
  source 1..1398: mol_type = other DNA
atgaccggcagagccatggaccccctgcccgccgccgccgtgggcgccgccgccgaggccgaggccgacgaggaggccgacccccccgccagcgacctgcccaccccccaggccatcgagccccaggccatcgtgcagcaggtgcccgcccccagcagaatgcagatgccccagggcaaccccctgctgctgagccacaccctgcaggagctgctggccagagacaccgtgcaggtggagctgatccccgagaagaagggcctgttcctgaagcacgtggagtacgaggtgagcagccagagattcaagagcagcgtgtacagaagatacaacgacttcgtggtgttccaggagatgctgctgcacaagttcccctacagaatggtgcccgccctgccccccaagagaatgctgggcgccgacagagagttcatcgaggccagaagaagagccctgaagagattcgtgaacctggtggccagacaccccctgttcagcgaggacgtggtgctgaagctgttcctgagcttcagcggcagcgacgtgcagaacaagctgaaggagagcgcccagtgcgtgggcgacgagttcctgaactgcaagctggccaccagagccaaggacttcctgcccgccgacatccaggcccagttcgccatcagcagagagctgatcagaaacatctacaacagcttccacaagctgagagacagagccgagagaatcgccagcagagccatcgacaacgccgccgacctgctgatcttcggcaaggagctgagcgccatcggcagcgacaccacccccctgcccagctgggccgccctgaacagcagcacctggggcagcctgaagcaggccctgaagggcctgagcgtggagttcgccctgctggccgacaaggccgcccagcagggcaagcaggaggagaacgacgtggtggagaagctgaacctgttcctggacctgctgcagagctacaaggacctgtgcgagagacacgagaagggcgtgctgcacaagcaccagagagccctgcacaagtacagcctgatgaagagacagatgatgagcgccaccgcccagaacagagagcccgagagcgtggagcagctggagagcagaatcgtggagcaggagaacgccatccagaccatggagctgagaaactacttcagcctgtactgcctgcaccaggagacccagctgatccacgtgtacctgcccctgaccagccacatcctgagagccttcgtgaacagccagatccagggccacaaggagatgagcaaggtgtggaacgacctgagacccaagctgagctgcctgttcgccggcccccacagcaccctgacccccccctgcagcccccccgaggacggcctgtgcccccactag

SEQ ID NO: 13576 - DNA, 174 bp, synthetic construct
  misc_feature 1..174: note = Description of Artificial Sequence: Synthetic coding sequence
  source 1..174: mol_type = other DNA
atgagcagcgtgcagcagcagccccccccccccagaagagtgaccaacgtgggcagcctgctgctgaccccccaggagaacgagagcctgttcaccttcctgggcaagaagtgcgtgaccatgagcagcgccgtggtgcagctgtacgccgccgacagaaacctgagctgctag

SEQ ID NO: 13577 - DNA, 1140 bp, synthetic construct
  misc_feature 1..1140: note = Description of Artificial Sequence: Synthetic coding sequence
  source 1..1140: mol_type = other DNA
atggccagaagaagcgccttccccgccgccgccctgtggctgtggagcatcctgctgtgcctgctggccctgagagccgaggccggccccccccaggaggagagcctgtacctgtggatcgacgcccaccaggccagagtgctgatcggcttcgaggaggacatcctgatcgtgagcgagggcaagatggcccccttcacccacgacttcagaaaggcccagcagagaatgcccgccatccccgtgaacatccacagcatgaacttcacctggcaggccgccggccaggccgagtacttctacgagttcctgagcctgagaagcctggacaagggcatcatggccgaccccaccgtgaacgtgcccctgctgggcaccgtgccccacaaggccagcgtggtgcaggtgggcttcccctgcctgggcaagcaggacggcgtggccgccttcgaggtggacgtgatcgtgatgaacagcgagggcaacaccatcctgcagaccccccagaacgccatcttcttcaagacctgccagcaggccgagtgccccggcggctgcagaaacggcggcttctgcaacgagagaagaatctgcgagtgccccgacggcttccacggcccccactgcgagaaggccctgtgcacccccagatgcatgaacggcggcctgtgcgtgacccccggcttctgcatctgcccccccggcttctacggcgtgaactgcgacaaggccaactgcagcaccacctgcttcaacggcggcacctgcttctaccccggcaagtgcatctgcccccccggcctggagggcgagcagtgcgagatcagcaagtgcccccagccctgcagaaacggcggcaagtgcatcggcaagagcaagtgcaagtgcagcaagggctaccagggcgacctgtgcagcaagcccgtgtgcgagcccggctgcggcgcccacggcacctgccacgagcccaacaagtgccagtgccaggagggctggcacggcagacactgcaacaagagatacgaggccagcctgatccacgccctgagacccgccggcgcccagctgagacagcacacccccagcctgaagaaggccgaggagagaagagacccccccgagagcaactacatctggtag

SEQ ID NO: 13578 - DNA, 120 bp, synthetic construct
  misc_feature 1..120: note = Description of Artificial Sequence: Synthetic coding sequence
  source 1..120: mol_type = other DNA
aagaagagaaaggagaagaagagagagaagagaagaggcaaggagagaaaggagctgttcaagctggtgagccacgtgctggagaacagaatgggctggcagcacctgaagtggatgtag

SEQ ID NO: 13579 - DNA, 1095 bp, synthetic construct
  misc_feature 1..1095: note = Description of Artificial Sequence: Synthetic coding sequence
  source 1..1095: mol_type = other DNA
atggccagagccagcgaggccgtgagcagaatcctggaggagtggcacaaggccaaggtggaggccatgaccctggacctggccctgctgagaagcgtgcagcacttcgccgaggccttcaaggccaagaacgtgcccctgcacgtgctggtgtgcaacgccgccaccttcgccctgccctggagcctgaccaaggacggcctggagaccaccttccaggtgaaccacctgggccacttctacctggtgcagctgctgagaatgttctgcgccgcccagctgctgcccgtgagcctgtggagcccccagagccccatcgacctgcagatcctgaccaccccctgggagaactggaccagcgtggccagcctgcagcagaagaccaccatcggcagatgctggctgatcaccggccccagcagcgccaccagcagcagccccaccagctgcaccgtggcccccaccagaggccacgtggagagaagcgccagctggaagtacgacgtgctgcagcacagcagccagctggtgggcgtgcacaccgccgtgtacctgggcgaggccttccaccaggtgcacgccaccggcagctgccaccacagagtgctgtgctgctgccccagaaccggcggcagcggcagagacgtgctgcagcagctgctgcccctgcacgccctgaccagaagcagcgagagaagagacggccccgaccccgtgggcagcgagagactgatccaggagagactggccagccccgccaagtggagcagcgagagaatgggcacccacaccagacccgtgtgcgtgcccagcagaaagtgccagggccccctgcccaacgtgccccccacccagatcagaaagagcaagggcaacaagagcagccacaacagagtgaagaacctgaagtaccagtgggaggccggcaacagctggggcaaggtgagcctgttctggggctgggccagacacagaagcctgtgcttcctggtggtggcctgcctgaaggtgaagacctgcctggtgtgcagattcagaatcagcctggagaagcaccagcagttcagcttcttctactgctacagaatcgcctag

SEQ ID NO: 13580 - DNA, 570 bp, synthetic construct
  misc_feature 1..570: note = Description of Artificial Sequence: Synthetic coding sequence
  source 1..570: mol_type = other DNA
atggccgccctgagatacgccggcctggacgacaccgacagcgaggacgagctgccccccggctgggaggagagaaccaccaaggacggctgggtgtactacgccaaccacaccgaggagaagacccagtgggagcaccccaagaccggcaagagaaagagagtggccggcgacctgccctacggctgggagcaggagaccgacgagaacggccaggtgttcttcgtggaccacatcaacaagagaaccacctacctggaccccagactggccttcaccgtggacgacaaccccaccaagcccaccaccagacagagatacgacggcagcaccaccgccatggagatcctgcagggcagagacttcaccggcaaggtggtggtggtgaccggcgccaacagcggcatcggcttcgagaccgccaagagcttcgccctgcacggcgcccacgtgatcctggcctgcagaaacatggccagagccagcgaggccgtgagcagaatcctggaggagtggaagaccaagtaccaccccccccccgagaagtgcagaatcaagatcttccactag

SEQ ID NO: 13581 - DNA, 936 bp, synthetic construct
  misc_feature 1..936: note = Description of Artificial Sequence: Synthetic coding sequence
  source 1..936: mol_type = other DNA
atggccgccctgagatacgccggcctggacgacaccgacagcgaggacgagctgccccccggctgggaggagagaaccaccaaggacggctgggtgtactacgccaaccacaccgaggagaagacccagtgggagcaccccaagaccggcaagagaaagagagtggccggcgacctgccctacggctgggagcaggagaccgacgagaacggccaggtgttcttcgtggaccacatcaacaagagaaccacctacctggaccccagactggccttcaccgtggacgacaaccccaccaagcccaccaccagacagagatacgacggcagcaccaccgccatggagatcctgcagggcagagacttcaccggcaaggtggtggtggtgaccggcgccaacagcggcatcgccaccggcagctgccaccacagagtgctgtgctgctgccccagaaccggcggcagcggcagagacgtgctgcagcagctgctgcccctgcacgccctgaccagaagcagcgagagaagagacggccccgaccccgtgggcgcccagagagaggccgaccccagaaccgcctggcagcccgtgagactgagcggcgcccagagcggctgggcccacacccccgccctgtgcgtgagcccccacgccagcgccagagccggccccctgcccaacgtgccccccacccagatcagaaagagcaagggcaacaagagcagccacaacagagtgaagaacctgaagtaccagtgggaggccggcaacagctggggcaaggtgagcctgttctggggctgggccagacacagaagcctgtgcttcctggtggtggcctgcctgaaggtgaagacctgcctggtgtgcagattcagaatcagcctggagaagcaccagcagttcagcttcttctactgctacagaatcgcctag

SEQ ID NO: 13582 - DNA, 705 bp, synthetic construct
  misc_feature 1..705: note = Description of Artificial Sequence: Synthetic coding sequence
  source 1..705: mol_type = other DNA
atggccgccctgagatacgccggcctggacgacaccgacagcgaggacgagctgccccccggctgggaggagagaaccaccaaggacggctgggtgtactacgccaaccacaccgaggagaagacccagtgggagcaccccaagaccggcaagagaaagagagtggccggcgacctgccctacggctgggagcaggagaccgacgagaacggccaggtgttcttcgtggaccacatcaacaagagaaccacctacctggaccccagactggccttcaccgtggacgacaaccccaccaagcccaccaccagacagagatacgacggcagcaccaccgccatggagatcctgcagggcagagacttcaccggcaaggtggtggtggtgaccggcgccaacagcggcatcggcttcgagaccgccaagagcttcgccctgcacggcgcccacgtgatcctggcctgcagaaacatggccagagccagcgaggccgtgagcagaatcctggaggagtggcagcagggcgccgccaccaccgtgtactgcgccgccgtgcccgagctggagggcctgggcggcatgtacttcaacaactgctgcagatgcatgcccagccccgaggcccagagcgaggagaccgccagaaccctgtgggccctgagcgagagactgatccaggagagactgggcagccagagcggctag

SEQ ID NO: 13583 - DNA, 1245 bp, synthetic construct
  misc_feature 1..1245: note = Description of Artificial Sequence: Synthetic coding sequence
  source 1..1245: mol_type = other DNA
atggccgccctgagatacgccggcctggacgacaccgacagcgaggacgagctgccccccggctgggaggagagaaccaccaaggacggctgggtgtactacgccaaccacaccgaggagaagacccagtgggagcaccccaagaccggcaagagaaagagagtggccggcgacctgccctacggctgggagcaggagaccgacgagaacggccaggtgttcttcgtggaccacatcaacaagagaaccacctacctggaccccagactggccttcaccgtggacgacaaccccaccaagcccaccaccagacagagatacgacggcagcaccaccgccatggagatcctgcagggcagagacttcaccggcaaggtggtggtggtgaccggcgccaacagcggcatcggcttcgagaccgccaagagcttcgccctgcacggcgcccacgtgatcctggcctgcagaaacatggccagagccagcgaggccgtgagcagaatcctggaggagtggcacaaggccaaggtggaggccatgaccctggacctggccctgctgagaagcgtgcagcacttcgccgaggccttcaaggccaagaacgtgcccctgcacgtgctggtgtgcaacgccgccaccttcgccctgccctggagcctgaccaaggacggcctggagaccaccttccaggtgaaccacctgggccacttctacctggtgcagctgctgcaggacgtgctgtgcagaagcgcccccgccagagtgatcgtggtgagcagcgagagccacagattcaccgacatcaacgacagcctgggcaagctggacttcagcagactgagccccaccaagaacgactactgggccatgctggcctacaacagaagcaagctgtgcaacatcctgttcagcaacgagctgcacagaagactgagccccagaggcgtgaccagcaacgccgtgcaccccggcaacatgatgtacagcaacatccacagaagctggtgggtgtacaccctgctgttcaccctggccagacccttcaccaagagcatgcagcagggcgccgccaccaccgtgtactgcgccgccgtgcccgagctggagggcctgggcggcatgtacttcaacaactgctgcagatgcatgcccagccccgaggcccagagcgaggagaccgccagaaccctgtgggccctgagcgagagactgatccaggagagactgggcagccagagcggctag

SEQ ID NO: 13584 - DNA, 642 bp, synthetic construct
  misc_feature 1..642: note = Description of Artificial Sequence: Synthetic coding sequence
  source 1..642: mol_type = other DNA
atggccgccctgagatacgccggcctggacgacaccgacagcgaggacgagctgccccccggctgggaggagagaaccaccaaggacggctgggtgtactacgccaaccacaccgaggagaagacccagtgggagcaccccaagaccggcaagagaaagagagtggccggcgacctgccctacggctgggagcaggagaccgacgagaacggccaggtgttcttcgtggaccacatcaacaagagaaccacctacctggaccccagactggccttcaccgtggacgacaaccccaccaagcccaccaccagacagagatacgacggcagcaccaccgccatggagatcctgcagggcagagacttcaccggcaaggtggtggtggtgaccggcgccaacagcggcatcggcaaggccagctgccacgtgggcagaatcctgaagcacaccagagtggaggagctgagcctgctgcccaccgccatcaacagagagctgccccccccctgcaccgtgctgctgagccagaactggagagtgtgggagggctgcaccagcaccaccgccgccgccgcctgcccccaccagaagctgagagccaagagaagacccggcccctgcggcagaagcgccagaggctag

SEQ ID NO: 13585 - DNA, 1245 bp, synthetic construct; identical to SEQ ID NO: 13583
  misc_feature 1..1245: note = Description of Artificial Sequence: Synthetic coding sequence
  source 1..1245: mol_type = other DNA

SEQ ID NO: 13586 - DNA, 111 bp, synthetic construct
  misc_feature 1..111: note = Description of Artificial Sequence: Synthetic coding sequence
  source 1..111: mol_type = other DNA
atggccgccctgagatacgccggcctggacgacaccgacagcgaggacgagctgccccccggctgggaggagagaaccaccaaggacggctgggtgtactacgccaagtag

SEQ ID NO: 13587 - DNA, 1047 bp, synthetic construct
  misc_feature 1..1047: note = Description of Artificial Sequence: Synthetic coding sequence
  source 1..1047: mol_type = other DNA
atggcccacagccagaacagcctggagctgcccatcaacatcaacgccacccagatcaccaccgcctacggccacagagccctgcccaagctgaaggaggagctgcagagcgaggacctgcagaccagacagaaggccctgatggccctgtgcgacctgatgcacgaccccgagtgcatctacaaggccatgaacatcggctgcatggagaacctgaaggccctgctgaaggacagcaacagcatggtgagaatcaagaccaccgaggtgctgcacatcaccgccagccacagcgtgggcagatacgccttcctggagcacgacatcgtgctggccctgagcttcctgctgaacgaccccagccccgtgtgcagaggcaacctgtacaaggcctacatgcagctggtgcaggtgcccagaggcgcccaggagatcatcagcaagggcctgatcagcagcctggtgtggaagctgcaggtggaggtggaggaggaggagttccaggagttcatcctggacaccctggtgctgtgcctgcaggaggacgccaccgaggccctgggcagcaacgtggtgctggtgctgaagcagaagctgctgagcgccaaccagaacatcagaagcaaggccgccagagccctgctgaacgtgagcatcagcagagagggcaagaagcaggtgtgccacttcgacgtgatccccatcctggtgcacctgctgaaggaccccgtggagcacgtgaagagcaacgccgccggcgccctgatgttcgccaccgtgatcaccgagggcaagtacgccgccctggaggcccaggccatcggcctgctgctggagctgctgcacagccccatgaccatcgccagactgaacgccaccaaggccctgaccatgctggccgaggcccccgagggcagaaaggccctgcagacccacgtgcccaccttcagagccatggaggtggagacctacgagaagccccaggtggccgaggccctgcagagagccgccagaatcgccatcagcgtgatcgagttcaagccctag

SEQ ID NO: 13588 - DNA, 1131 bp, synthetic construct
  misc_feature 1..1131: note = Description of Artificial Sequence: Synthetic coding sequence
  source 1..1131: mol_type = other DNA
atggtggtggtggccgccgcccccaaccccgccgacggcacccccaaggtgctgctgctgagcggccagcccgccagcgccgccggcgcccccgccggccaggccctgcccctgatggtgcccgcccagagaggcgccagccccgaggccgccagcggcggcctgccccaggccagaaagagacagagactgacccacctgagccccgaggagaaggccctgagaagaaagctgaagaacagagtggccgcccagaccgccagagacagaaagaaggccagaatgagcgagctggagcagcaggtggtggacctggaggaggagaaccagaagctgctgctggagaaccagctgctgagagagaagacccacggcctggtggtggagaaccaggagctgagacagagactgggcatggacgccctggtggccgaggaggaggccgaggccaagggcaacgaggtgagacccgtggccggcagcgccgagagcgccgccggcgccggccccgtggtgaccccccccgagcacctgcccatggacagcggcggcatcgacagcagcgacagcgagagcgacatcctgctgggcatcctggacaacctggaccccgtgatgttcttcaagtgccccagccccgagcccgccagcctggaggagctgcccgaggtgtaccccgagggccccagcagcctgcccgccagcctgagcctgagcgtgggcaccagcagcgccaagctggaggccatcaacgagctgatcagattcgaccacatctacaccaagcccctggtgctggagatccccagcgagaccgagagccaggccaacgtggtggtgaagatcgaggaggcccccctgagccccagcgagaacgaccaccccgagttcatcgtgagcgtgaaggaggagcccgtggaggacgacctggtgcccgagctgggcatcagcaacctgctgagcagcagccactgccccaagcccagcagctgcctgctggacgcctacagcgactgcggctacggcggcagcctgagccccttcagcgacatgagcagcctgctgggcgtgaaccacagctgggaggacaccttcgccaacgagctgttcccccagctgatcagcgtgtag

SEQ ID NO: 13589 - DNA, 801 bp, synthetic construct
  misc_feature 1..801: note = Description of Artificial Sequence: Synthetic coding sequence
  source 1..801: mol_type = other DNA
atggtggtggtggccgccgcccccaaccccgccgacggcacccccaaggtgctgctgctgagcggccagcccgccagcgccgccggcgcccccgccggccaggccctgcccctgatggtgcccgcccagagaggcgccagccccgaggccgccagcggcggcctgccccaggccagaaagagacagagactgacccacctgagccccgaggagaaggccctgagaagaaagctgaagaacagagtggccgcccagaccgccagagacagaaagaaggccagaatgagcgagctggagcagcaggtggtggacctggaggaggaggtgaagctgctgaagaaccagaagctgctgctggagaaccagctgctgagagagaagacccacggcctggtggtggagaaccaggagctgagacagagactgggcatggacgccctggtggccgaggaggaggccgaggccaagggcaacgaggtgagacccgtggccggcagcgccgagagcgccgccctgagactgagagcccccctgcagcaggtgcaggcccagctgagccccctgcagaacatcagcccctggatcctggccgtgctgaccctgcagatccagagcctgatcagctgctgggccttctggaccacctggacccagagctgcagcagcaacgccctgccccagagcctgcccgcctggagaagcagccagagaagcacccagaaggaccccgtgccctaccagccccccttcctgtgccagtggggcagacaccagcccagctggaagcccctgatgaactag

SEQ ID NO: 13590 - DNA, 636 bp, synthetic construct
  misc_feature 1..636: note = Description of Artificial Sequence: Synthetic coding sequence
  source 1..636: mol_type = other DNA
atgagagcccccgtgttccaggccctgctgctgtgcggcagaagactggtggtgcagcccctgaacagcgacatgagaaagctgaagaacagagtggccgcccagaccgccagagacagaaagaaggccagaatgagcgagctggagcagcaggtggtggacctggaggaggagaaccagaagctgctgctggagaaccagctgctgagagagaagacccacggcctggtggtggagaaccaggagctgagacagagactgggcatggacgccctggtggccgaggaggaggccgaggccaagggcaacgaggtgagacccgtggccggcagcgccgagagcgccgccctgagactgagagcccccctgcagcaggtgcaggcccagctgagccccctgcagaacatcagcccctggatcctggccgtgctgaccctgcagatccagagcctgatcagctgctgggccttctggaccacctggacccagagctgcagcagcaacgccctgccccagagcctgcccgcctggagaagcagccagagaagcacccagaaggaccccgtgccctaccagccccccttcctgtgccagtggggcagacaccagcccagctggaagcccctgatgaactag

SEQ ID NO: 13591 - DNA, 822 bp, synthetic construct
  misc_feature 1..822: note = Description of Artificial Sequence: Synthetic coding sequence
  source 1..822: mol_type = other DNA
atggccgccgccgacggcgccctgcccgaggccgccgccctggagcagcccgccgagctgcccgccagcgtgagagccagcatcgagagaaagagacagagagccctgatgctgagacaggccagactggccgccagaccctacagcgccaccgccgccgccgccaccggcggcatggccaacgtgaaggccgcccccaagatcatcgacaccggcggcggcttcatcctggaggaggaggaggaggaggagcagaagatcggcaaggtggtgcaccagcccggccccgtgatggagttcgactacgtgatctgcgaggagtgcggcaaggagttcatggacagctacctgatgaaccacttcgacctgcccacctgcgacaactgcagagacgccgacgacaagcacaagctgatcaccaagaccgaggccaagcaggagtacctgctgaaggactgcgacctggagaagagagagccccccctgaagttcatcgtgaagaagaacccccaccacagccagtggggcgacatgaagctgtacctgaagctgcagatcgtgaagagaagcctggaggtgtggggcagccaggaggccctggaggaggccaaggaggtgagacaggagaacagagagaagatgaagcagaagaagttcgacaagaaggtgaaggagctgagaagagccgtgagaagcagcgtgtggaagagagagaccatcgtgcaccagcacgagtacggccccgaggagaacctggaggacgacatgtacagaaagacctgcaccatgtgcggccacgagctgacctacgagaagatgtag

SEQ ID NO: 13592 - DNA, 2823 bp, synthetic construct
  misc_feature 1..2823: note = Description of Artificial Sequence: Synthetic coding sequence
  source 1..2823: mol_type = other DNA
atggccagaaagagagccgccggcggcgagcccagaggcagagagctgagaagccagaagagcaaggccaagagcaaggccagaagagaggaggaggaggaggacgccttcgaggacgagaagccccccaagaagagcctgctgagcaaggtgagccagggcaagagaaagagaggctgcagccaccccggcggcagcgccgacggccccgccaagaagaaggtggccaaggtgaccgtgaagagcgagaacctgaaggtgatcaaggacgaggccctgagcgacggcgacgacctgagagacttccccagcgacctgaagaaggcccaccacctgaagagaggcgccaccatgaacgaggacagcaacgaggaggaggaggagagcgagaacgactgggaggaggtggaggagctgagcgagcccgtgctgggcgacgtgagagagagcaccgccttcagcagaagcctgctgcccgtgaagcccgtggagatcgagatcgagacccccgagcaggccaagaccagagagagaagcgagaagatcaagctggagttcgagacctacctgagaagagccatgaagagattcaacaagggcgtgcacgaggacacccacaaggtgcacctgctgtgcctgctggccaacggcttctacagaaacaacatctgcagccagcccgacctgcacgccatcggcctgagcatcatccccgccagattcaccagagtgctgcccagagacgtggacacctactacctgagcaacctggtgaagtggttcatcggcaccttcaccgtgaacgccgagctgagcgccagcgagcaggacaacctgcagaccaccctggagagaagattcgccatctacagcgccagagacgacgaggagctggtgcacatcttcctgctgatcctgagagccctgcagctgctgaccagactggtgctgagcctgcagcccatccccctgaagagcgccaccgccaagggcaagaagcccagcaaggagagactgaccgccgaccccggcggcagcagcgagaccagcagccaggtgctggagaaccacaccaagcccaagaccagcaagggcaccaagcaggaggagaccttcgccaagggcacctgcagacccagcgccaagggcaagagaaacaagggcggcagaaagaagagaagcaagcccagcagcagcgaggaggacgagggccccggcgacaagcaggagaaggccacccagagaagaccccacggcagagagagaagagtggccagcagagtgagctacaaggaggagagcggcagcgacgaggccggcagcggcagcgacttcgagctgagcagcggcgaggccagcgaccccagcgacgaggacagcgagcccggcccccccaagcagagaaaggcccccgccccccagagaaccaaggccggcagcaagagcgccagcagaacccacagaggcagccacagaaaggaccccagcctgcccgccgccagcagcagcagcagcagcagcaagagaggcaagaagatgtgcagcgacggcgagaaggccgagaagagaagcatcgccggcatcgaccagtggctggaggtgttctgcgagcaggaggagaagtgggtgtgcgtggactgcgtgcacggcgtggtgggccagcccctgacctgctacaagtacgccaccaagcccatgacctacgtggtgggcatcgacagcgacggctgggtgagagacgtgacccagagatacgaccccgtgtggatgaccgtgaccagaaagtgcagagtggacgccgagtggtgggccgagaccctgagaccctaccagagccccttcatggacagagagaagaaggaggacctggagttccaggccaagcacatggaccagcccctgcccaccgccatcggcctgtacaagaaccaccccctgtacgccctgaagagacacctgctgaagtacgaggccatctaccccgagaccgccgccatcctgggctactgcagaggcgaggccgtgtacagcagagactgcgtgcacaccctgcacagcagagacacctggctgaagaaggccagagtggtgagactgggcgaggtgccctacaagatggtgaagggcttcagcaacagagccagaaaggccagactggccgagccccagctgagagaggagaacgacctgggcctgttcggctactggcagaccgaggagtaccagccccccgtggccgtggacggcaaggtgcccagaaacgagttcggcaacgtgtacctgttcctgcccagcatgatgcccatcggctgcgtgcagctgaacctgcccaacctgcacagagtggccagaaagctggacatcgactgcgtgcaggccatcaccggcttcgacttccacggcggctacagccaccccgtgaccgacggctacatcgtgtgcgaggagttcaaggacgtgctgctgaccgcctgggagaacgagcaggccgtgatcgagagaaaggagaaggagaagaaggagaagagagccctgggcaactggaagctgctggccaagggcctgctgatcagagagagactgaagagaagatacggccccaagagcgaggccgccgccccccacaccgacgccggcggcggcctgagcagcgacgaggaggagggcaccagcagccaggccgaggccgccagaatcctggccgccagctggccccagaacagagaggacgaggagaagcagaagctgaagggcggccccaagaagaccaagagagagaagaaggccgccgccagccacctgttccccttcgagcagctgtag

SEQ ID NO: 13593 - DNA, 2712 bp, synthetic construct
  misc_feature 1..2712: note = Description of Artificial Sequence: Synthetic coding sequence
  source 1..2712: mol_type = other DNA
atggccagaaagagagccgccggcggcgagcccagaggcagagagctgagaagccagaagagcaaggccaagagcaaggccagaagagaggaggaggaggaggacgccttcgaggacgagaagccccccaagaagagcctgctgagcaaggtgagccagggcaagagaaagagaggctgcagccaccccggcggcagcgccgacggccccgccaagaagaaggtggccaaggtgaccgtgaagagcgagaacctgaaggtgatcaaggacgaggccctgagcgacggcgacgacctgagagacttccccagcgacctgaagaaggcccaccacctgaagagaggcgccaccatgaacgaggacagcaacgaggaggaggaggagagcgagaacgactgggaggaggccaagaccagagagagaagcgagaagatcaagctggagttcgagacctacctgagaagagccatgaagagattcaacaagggcgtgcacgaggacacccacaaggtgcacctgctgtgcctgctggccaacggcttctacagaaacaacatctgcagccagcccgacctgcacgccatcggcctgagcatcatccccgccagattcaccagagtgctgcccagagacgtggacacctactacctgagcaacctggtgaagtggttcatcggcaccttcaccgtgaacgccgagctgagcgccagcgagcaggacaacctgcagaccaccctggagagaagattcgccatctacagcgccagagacgacgaggagctggtgcacatcttcctgctgatcctgagagccctgcagctgctgaccagactggtgctgagcctgcagcccatccccctgaagagcgccaccgccaagggcaagaagcccagcaaggagagactgaccgccgaccccggcggcagcagcgagaccagcagccaggtgctggagaaccacaccaagcccaagaccagcaagggcaccaagcaggaggagaccttcgccaagggcacctgcagacccagcgccaagggcaagagaaacaagggcggcagaaagaagagaagcaagcccagcagcagcgaggaggacgagggccccggcgacaagcaggagaaggccacccagagaagaccccacggcagagagagaagagtggccagcagagtgagctacaaggaggagagcggcagcgacgaggccggcagcggcagcgacttcgagctgagcagcggcgaggccagcgaccccagcgacgaggacagcgagcccggcccccccaagcagagaaaggcccccgccccccagagaaccaaggccggcagcaagagcgccagcagaacccacagaggcagccacagaaaggaccccagcctgcccgccgccagcagcagcagcagcagcagcaagagaggcaagaagatgtgcagcgacggcgagaaggccgagaagagaagcatcgccggcatcgaccagtggctggaggtgttctgcgagcaggaggagaagtgggtgtgcgtggactgcgtgcacggcgtggtgggccagcccctgacctgctacaagtacgccaccaagcccatgacctacgtggtgggcatcgacagcgacggctgggtgagagacgtgacccagagatacgaccccgtgtggatgaccgtgaccagaaagtgcagagtggacgccgagtggtgggccgagaccctgagaccctaccagagccccttcatggacagagagaagaaggaggacctggagttccaggccaagcacatggaccagcccctgcccaccgccatcggcctgtacaagaaccaccccctgtacgccctgaagagacacctgctgaagtacgaggccatctaccccgagaccgccgccatcctgggctactgcagaggcgaggccgtgtacagcagagactgcgtgcacaccctgcacagcagagacacctggctgaagaaggccagagtggtgagactgggcgaggtgccctacaagatggtgaagggcttcagcaacagagccagaaaggccagactggccgagccccagctgagagaggagaacgacctgggcctgttcggctactggcagaccgaggagtaccagccccccgtggccgtggacggcaaggtgcccagaaacgagttcggcaacgtgtacctgttcctgcccagcatgatgcccatcggctgcgtgcagctgaacctgcccaacctgcacagagtggccagaaagctggacatcgactgcgtgcaggccatcaccggcttcgacttccacggcggctacagccaccccgtgaccgacggctacatcgtgtgcgaggagttcaaggacgtgctgctgaccgcctgggagaacgagcaggccgtgatcgagagaaaggagaaggagaagaaggagaagagagccctgggcaactggaagctgctggccaagggcctgctgatcagagagagactgaagagaagatacggccccaagagcgaggccgccgccccccacaccgacgccggcggcggcctgagcagcgacgaggaggagggcaccagcagccaggccgaggccgccagaatcctggccgccagctggccccagaacagagaggacgaggagaagcagaagctgaagggcggccccaagaagaccaagagagagaagaaggccgccgccagccacctgttccccttcgagcagctgtag

SEQ ID NO: 13594 - DNA, 423 bp, synthetic construct
  misc_feature 1..423: note = Description of Artificial Sequence: Synthetic coding sequence
  source 1..423: mol_type = other DNA
atggccagaaagagagccgccggcggcgagcccagaggcagagagctgagaagccagaagagcaaggccaagagcaaggccagaagagaggaggaggaggaggacgccttcgaggacgagaagccccccaagaagagcctgctgagcaaggtgagccagggcaagagaaagagaggctgcagccaccccggcggcagcgccgacggccccgccaagaagaaggtggccaaggtgaccgtgaagagcgagaacctgaaggtgatcaaggacgaggccctgagcgacggcgacgacctgagagacttccccagcgacctgaagaaggcccaccacctgaagagaggcgccaccatgaacgaggacagcaacgaggaggaggaggagagcgagaacgactgggaggaggtggaggtgaagagatag

SEQ ID NO: 13595 - DNA, 507 bp, synthetic construct
  misc_feature 1..507: note = Description of Artificial Sequence: Synthetic coding sequence
  source 1..507: mol_type = other DNA
atggccagaaagagagccgccggcggcgagcccagaggcagagagctgagaagccagaagagcaaggccaagagcaaggccagacacgccttcgaggacgagaagccccccaagaagagcctgctgagcaaggtgagccagggcaagagaaagagaggctgcagccaccccggcggcagcgccgacggccccgccaagaagaaggtggccaaggtgaccgtgaagagcgagaacctgaaggtgatcaaggacgaggccctgagcgacggcgacgacctgagagacttccccagcgacctgaagaaggcccaccacctgaagagaggcgccaccatgaacgaggacagcaacgaggaggaggaggagagcgagaacgactgggaggaggtggaggagctgagcgagcccgtgctgggcgacgtgagagagagcaccgccttcagcagaagcctgctgcccgtgaagcccgtggagatcgagatcgagacccccgagcaggccaagtag

SEQ ID NO: 13596 - DNA, 462 bp, synthetic construct
  misc_feature 1..462: note = Description of Artificial Sequence: Synthetic coding sequence
  source 1..462: mol_type = other DNA
agcagcagcaagagaggcaagaagatgtgcagcgacggcgagaaggccgagaagagaagcatcgccggcatcgaccagtggctggaggtgttctgcgagcaggaggagaagtgggtgtgcgtggactgcgtgcacggcgtggtgggccagcccctgacctgctacaagtacgccaccaagcccatgacctacgtggtgggcatcgacagcgacggctgggtgagagacgtgacccagagatacgaccccgtgtggatgaccgtgaccagaaagtgcagagtggacgccgagtggtgggccgagaccctgagaccctaccagagccccttcatggacagagagaagaaggaggacctggagggcctgtgcgcccacagcgccttccagggccacgtggccgaggagagcaagagcggcgaggcctggagaagcaccctgcaggacggcgagagactgttctag

SEQ ID NO: 13597 - DNA, 177 bp, synthetic construct
  misc_feature 1..177: note = Description of Artificial Sequence: Synthetic coding sequence
  source 1..177: mol_type = other DNA
atgtgcagcgacggcgagaaggccgagaagagaagcatcgccggcatcgaccagtggctggaggtgttctgcgagcaggaggagaagtgggtgtgcgtggactgcagatgcggcggccccgccagcgacctgctgcaggtgagacaccaggcccacgacctgtgcggcggccactag

SEQ ID NO: 13598 - DNA, 231 bp, synthetic construct
  misc_feature 1..231: note = Description of Artificial Sequence: Synthetic coding sequence
  source 1..231: mol_type = other DNA
aaggccacccagagaagaccccacggcagagagagaagagtggccagcagagtgagctacaaggaggagagcggcagcgacgaggccggcagcggcagcgacttcgagctgagcagcggcgaggccagcgaccccagcgacgaggacagcgagcccggcccccccaagcagagaaaggcccccgccccccagagaaccaaggccggcagcaagagcgccagcagaacctag

SEQ ID NO: 13599 - DNA, 849 bp, synthetic construct
  misc_feature 1..849: note = Description of Artificial Sequence: Synthetic coding sequence
  source 1..849: mol_type = other DNA
atggagggcgacttcagcgtgtgcagaaactgcaagagacacgtggtgagcgccaacttcaccctgcacgaggcctactgcctgagattcctggtgctgtgccccgagtgcgaggagcccgtgcccaaggagaccatggaggagcactgcaagctggagcaccagcaggccaacgagtgccaggagagacccgtggagtgcaagttctgcaagctggacatgcagctgagcaagctggagctgcacgagagctactgcggcagcagaaccgagctgtgccagggctgcggccagttcatcatgcacagaatgctggcccagcacagagacgtgtgcagaagcgagcaggcccagctgggcaagggcgagagaatcagcgcccccgagagagagatctactgccactactgcaaccagatgatccccgagaacaagtacttccaccacatgggcaagtgctgccccgacagcgagttcaagaagcacttccccgtgggcaaccccgagatcctgcccagcagcctgcccagccaggccgccgagaaccagaccagcaccatggagaaggacgtgagacccaagaccagaagcatcaacagattccccctgcacagcgagagcagcagcaagaaggcccccagaagcaagaacaagaccctggaccccctgctgatgagcgagcccaagcccagaaccagcagccccagaggcgacaaggccgcctacgacatcctgagaagatgcagccagtgcggcatcctgctgcccctgcccatcctgaaccagcaccaggagaagtgcagatggctggccagcagcaagggcaagcaggtgagaaacttcagctag

SEQ ID NO: 13600 - DNA, 906 bp, synthetic construct
  misc_feature 1..906: note = Description of Artificial Sequence: Synthetic coding sequence
  source 1..906: mol_type = other DNA
atggagggcgacttcagcgtgtgcagaaactgcaagagacacgtggtgagcgccaacttcaccctgcacgaggcctactgcctgagattcctggtgctgtgccccgagtgcgaggagcccgtgcccaaggagaccatggaggagcactgcaagctggagcaccagcaggtgggctgcaccatgtgccagcagagcatgcagaagagcagcctggagttccacaaggccaacgagtgccaggagagacccgtggagtgcaagttctgcaagctggacatgcagctgagcaagctggagctgcacgagagctactgcggcagcagaaccgagctgtgccagggctgcggccagttcatcatgcacagaatgctggcccagcacagagacgtgtgcagaagcgagcaggcccagctgggcaagggcgagagaatcagcgcccccgagagagagatctactgccactactgcaaccagatgatccccgagaacaagtacttccaccacatgggcaagtgctgccccgacagcgagttcaagaagcacttccccgtgggcaaccccgagatcctgcccagcagcctgcccagccaggccgccgagaaccagaccagcaccatggagaaggacgtgagacccaagaccagaagcatcaacagattccccctgcacagcgagagcagcagcaagaaggcccccagaagcaagaacaagaccctggaccccctgctgatgagcgagcccaagcccagaaccagcagccccagaggcgacaaggccgcctacgacatcctgagaagatgcagccagtgcggcatcctgctgcccctgcccatcctgaaccagcaccaggagaagtgcagatggctggccagcagcaagggcaagcaggtgagaaacttcagctag

SEQ ID NO: 13601 - DNA, 600 bp, synthetic construct
  misc_feature 1..600: note = Description of Artificial Sequence: Synthetic coding sequence
  source 1..600: mol_type = other DNA
atgagcctgcactacggctgctgctgccccgagtgcaccagcgtggccatcaaggagatgatgtgggtgatcagacccagagtggcctgcgtggtgaaggacgccggcagcgccggcgagagaatcagcgcccccgagagagagatctactgccactactgcaaccagatgatccccgagaacaagtacttccaccacatgggcaagtgctgccccgacagcgagttcaagaagcacttccccgtgggcaaccccgagatcctgcccagcagcctgcccagccaggccgccgagaaccagaccagcaccatggagaaggacgtgagacccaagaccagaagcatcaacagattccccctgcacagcgagagcagcagcaagaaggcccccagaagcaagaacaagaccctggaccccctgctgatgagcgagcccaagcccagaaccagcagccccagaggcgacaaggccgcctacgacatcctgagaagatgcagccagtgcggcatcctgctgcccctgcccatcctgaaccagcaccaggagaagtgcagatggctggccagcagcaagggcaagcaggtgagaaacttcagctag

SEQ ID NO: 13602 - DNA, 495 bp, synthetic construct
  misc_feature 1..495: note = Description of Artificial Sequence: Synthetic coding sequence
  source 1..495: mol_type = other DNA
atggagggcgacttcagcgtgtgcagaaactgcaagagacacgtggtgagcgccaacttcaccctgcacgaggcctactgcctgagattcctggtgctgtgccccgagtgcgaggagcccgtgcccaaggagaccatggaggagcactgcaagctggagcaccagcaggtgggctgcaccatgtgccagcagagcatgcagaagagcagcctggagttccacaaggccaacgagtgccaggagagacccgtggagtgcaagttctgcaagctggacatgcagctgagcaagctggagctgcacgagagctactgcggcagcagaaccgagctgtgccagggctgcggccagttcatcatgcacagaatgctggcccagcacagagacgtgtgcagaagcgagcaggcccagctgggcaaggagaccagccccgaccccggcaagtgcctgagcatcaccgtggccgccgccctgagcgcccacctgtggccctag

SEQ ID NO: 13603 - DNA, 906 bp, synthetic construct
  misc_feature 1..906: note = Description of Artificial Sequence: Synthetic coding sequence
  source 1..906: mol_type = other DNA
atggagggcgacttcagcgtgtgcagaaactgcaagagacacgtggtgagcgccaacttcaccctgcacgaggcctactgcctgagattcctggtgctgtgccccgagtgcgaggagcccgtgcccaaggagaccatggaggagcactgcaagctggagcaccagcaggtgagcgagatgggcagcggcagaggcaagtgcagcatcctgcccgccagaaagaaggccaacgagtgccaggagagacccgtggagtgcaagttctgcaagctggacatgcagctgagcaagctggagctgcacgagagctactgcggcagcagaaccgagctgtgccagggctgcggccagttcatcatgcacagaatgctggcccagcacagagacgtgtgcagaagcgagcaggcccagctgggcaagggcgagagaatcagcgcccccgagagagagatctactgccactactgcaaccagatgatccccgagaacaagtacttccaccacatgggcaagtgctgccccgacagcgagttcaagaagcacttccccgtgggcaaccccgagatcctgcccagcagcctgcccagccaggccgccgagaaccagaccagcaccatggagaaggacgtgagacccaagaccagaagcatcaacagattccccctgcacagcgagagcagcagcaagaaggcccccagaagcaagaacaagaccctggaccccctgctgatgagcgagcccaagcccagaaccagcagccccagaggcgacaaggccgcctacgacatcctgagaagatgcagccagtgcggcatcctgctgcccctgcccatcctgaaccagcaccaggagaagtgcagatggctggccagcagcaagggcaagcaggtgagaaacttcagctag

SEQ ID NO: 13604 - DNA, 1494 bp, synthetic construct
  misc_feature 1..1494: note = Description of Artificial Sequence: Synthetic coding sequence
  source 1..1494: mol_type = other DNA
atgaccttcaacagcttcgagggcagcaagacctgcgtgcccgccgacatcaacaaggaggaggagttcgtggaggagttcaacagactgaagaccttcgccaacttccccagcggcagccccgtgagcgccagcaccctggccagagccggcttcctgtacaccggcgagggcgacaccgtgagatgcttcagctgccacgccgccgtggacagatggcagtacggcgacagcgccgtgggcagacacagaaaggtgagccccaactgcagattcatcaacggcttctacctggagaacagcgccacccagagcaccaacagcggcatccagaacggccagtacaaggtggagaactacctgggcagcagagaccacttcgccctggacagacccagcgagacccacgccgactacctgctgagaaccggccaggtggtggacatcagcgacaccatctaccccagaaaccccgccatgtacagcgaggaggccagactgaagagcttccagaactggcccgactacgcccacctgacccccagagagctggccagcgccggcctgtactacaccggcatcggcgaccaggtgcagtgcttctgctgcggcggcaagctgaagaactgggagccctgcgacagagcctggagcgagcacagaagacacttccccaactgcttcttcgtgctgggcagaaacctgaacatcagaagcgagagcgacgccgtgagcagcgacagaaacttccccaacagcaccaacctgcccagaaaccccagcatggccgactacgaggccagaatcttcaccttcggcacctggatctacagcgtgaacaaggagcagctggccagagccggcttctacgccctgggcgagggcgacaaggtgaagtgcttccactgcggcggcggcctgaccgactggaagcccagcgaggacccctgggagcagcacgccaagtggtaccccggctgcaagtacctgctggagcagaagggccaggagtacatcaacaacatccacctgacccacagcctggaggagtgcctggtgagaaccaccgagaagacccccagcctgaccagaagaatcgacgacaccatcttccagaaccccatggtgcaggaggccatcagaatgggcttcagcttcaaggacatcaagaagatcatggaggagaagatccagatcagcggcagcaactacaagagcctggaggtgctggtggccgacctggtgaacgcccagaaggacagcatgcaggacgagagcagccagaccagcctgcagaaggagatcagcaccgaggagcagctgagaagactgcaggaggagaagctgtgcaagatctgcatggacagaaacatcgccatcgtgttcgtgccctgcggccacctggtgacctgcaagcagtgcgccgaggccgtggacaagtgccccatgtgctacaccgtgatcaccttcaagcagaagatcttcatgagctag

SEQ ID NO: 13605 - DNA, 1494 bp, synthetic construct; identical to SEQ ID NO: 13604
  misc_feature 1..1494: note = Description of Artificial Sequence: Synthetic coding sequence
  source 1..1494: mol_type = other DNA

SEQ ID NO: 13606 - DNA, 51 bp, synthetic construct
  misc_feature 1..51: note = Description of Artificial Sequence: Synthetic coding sequence
  source 1..51: mol_type = other DNA
atgaccttcaacagcttcgagggcagcaagacctgcgtgcccgccgactag

SEQ ID NO: 13607 - DNA, 471 bp, synthetic construct
  misc_feature 1..471: note = Description of Artificial Sequence: Synthetic coding sequence
  source 1..471: mol_type = other DNA
atgaccttcaacagcttcgagggcagcaagacctgcgtgcccgccgacatcaacaaggaggaggagttcgtggaggagttcaacagactgaagaccttcgccaacttccccagcggcagccccgtgagcgccagcaccctggccagagccggcttcctgtacaccggcgagggcgacaccgtgagatgcttcagctgccacgccgccgtggacagatggcagtacggcgacagcgccgtgggcagacacagaaaggtgagccccaactgcagattcatcaacggcttctacctggagaacagcgccacccagagcaccaacagcggcatccagaacggccagtacaaggtggagaactacctgggcagcagagaccacttcgccctggacagacccagcgagacccacgccgactacctgctgagaaccggccaggtggtggacatcagcgacaccatctaccccagatag

SEQ ID NO: 13608 - DNA, 1494 bp, synthetic construct; identical to SEQ ID NO: 13604
  misc_feature 1..1494: note = Description of Artificial Sequence: Synthetic coding sequence
  source 1..1494: mol_type = other DNA

SEQ ID NO: 13609 - DNA, 2568 bp, synthetic construct
  misc_feature 1..2568: note = Description of Artificial Sequence: Synthetic coding sequence
  source 1..2568: mol_type = other DNA
atggtggtgatggccagactgagcagacccgagagacccgacctggtgttcgaggaggaggacctgccctacgaggaggagatcatgagaaaccagttcagcgtgaagtgctggctgagatacatcgagttcaagcagggcgcccccaagcccagactgaaccagctgtacgagagagccctgaagctgctgccctgcagctacaagctgtggtacagatacctgaaggccagaagagcccaggtgaagcacagatgcgtgaccgaccccgcctacgaggacgtgaacaactgccacgagagagccttcgtgttcatgcacaagatgcccagactgtggctggactactgccagttcctgatggaccagggcagagtgacccacaccagaagaaccttcgacagagccctgagagccctgcccatcacccagcacagcagaatctggcccctgtacctgagattcctgagaagccaccccctgcccgagaccgccgtgagaggctacagaagattcctgaagctgagccccgagagcgccgaggagtacatcgagtacctgaagagcagcgacagactggacgaggccgcccagagactggccaccgtggtgaacgacgagagattcgtgagcaaggccggcaagagcaactaccagctgtggcacgagctgtgcgacctgatcagccagaaccccgacaaggtgcagagcctgaacgtggacgccatcatcagaggcggcctgaccagattcaccgaccagctgggcaagctgtggtgcagcctggccgactactacatcagaagcggccacttcgagaaggccagagacgtgtacgaggaggccatcagaaccgtgatgaccgtgagagacttcacccaggtgttcgacagctacgcccagttcgaggagagcatgatcgccgccaagatggagaccgccagcgagctgggcagagaggaggaggacgacgtggacctggagctgagactggccagattcgagcagctgatcagcagaagacccctgctgctgaacagcgtgctgctgagacagaacccccaccacgtgcacgagtggcacaagagagtggccctgcaccagggcagacccagagagatcatcaacacctacaccgaggccgtgcagaccgtggaccccttcaaggccaccggcaagccccacaccctgtgggtggccttcgccaagttctacgaggacaacggccagctggacgacgccagagtgatcctggagaaggccaccaaggtgaacttcaagcaggtggacgacctggccagcgtgtggtgccagtgcggcgagctggagctgagacacgagaactacgacgaggccctgagactgctgagaaaggccaccgccctgcccgccagaagagccgagtacttcgacggcagcgagcccgtgcagaacagagtgtacaagagcctgaaggtgtggagcatgctggccgacctggaggagagcctgggcaccttccagagcaccaaggccgtgtacgacagaatcctggacctgagaatcgccaccccccagatcgtgatcaactacgccatgttcctggaggagcacaagtacttcgaggagagcttcaaggcctacgagagaggcatcagcctgttcaagtggcccaacgtgagcgacatctggagcacctacctgaccaagttcatcgccagatacggcggcagaaagctggagagagccagagacctgttcgagcaggccctggacggctgcccccccaagtacgccaagaccctgtacctgctgtacgcccagctggaggaggagtggggcctggccagacacgccatggccgtgtacgagagagccaccagagccgtggagcccgcccagcagtacgacatgttcaacatctacatcaagagagccgccgagatctacggcgtgacccacaccagaggcatctaccagaaggccatcgaggtgctgagcgacgagcacgccagagagatgtgcctgagattcgccgacatggagtgcaagctgggcgagatcgacagagccagagccatctacagcttctgcagccagatctgcgaccccagaaccaccggcgccttctggcagacctggaaggacttcgaggtgagacacggcaacgaggacaccatcaaggagatgctgagaatcagaagaagcgtgcaggccacctacaacacccaggtgaacttcatggccagccagatgctgaaggtgagcggcagcgccaccggcaccgtgagcgacctggcccccggccagagcggcatggacgacatgaagctgctggagcagagagccgagcagctggccgccgaggccgagagagaccagcccctgagagcccagagcaagatcctgttcgtgagaagcgacgccagcagagaggagctggccgagctggcccagcaggtgaaccccgaggagatccagctgggcgaggacgaggacgaggacgagatggacctggagcccaacgaggtgagactggagcagcagagcgtgcccgccgccgtgttcggcagcctgaaggaggactag

SEQ ID NO: 13610 - DNA, 2559 bp, synthetic construct
  misc_feature 1..2559: note = Description of Artificial Sequence: Synthetic coding sequence
  source 1..2559: mol_type = other DNA
atggccagactgagcagacccgagagacccgacctggtgttcgaggaggaggacctgccctacgaggaggagatcatgagaaaccagttcagcgtgaagtgctggctgagatacatcgagttcaagcagggcgcccccaagcccagactgaaccagctgtacgagagagccctgaagctgctgccctgcagctacaagctgtggtacagatacctgaaggccagaagagcccaggtgaagcacagatgcgtgaccgaccccgcctacgaggacgtgaacaactgccacgagagagccttcgtgttcatgcacaagatgcccagactgtggctggactactgccagttcctgatggaccagggcagagtgacccacaccagaagaaccttcgacagagccctgagagccctgcccatcacccagcacagcagaatctggcccctgtacctgagattcctgagaagccaccccctgcccgagaccgccgtgagaggctacagaagattcctgaagctgagccccgagagcgccgaggagtacatcgagtacctgaagagcagcgacagactggacgaggccgcccagagactggccaccgtggtgaacgacgagagattcgtgagcaaggccggcaagagcaactaccagctgtggcacgagctgtgcgacctgatcagccagaaccccgacaaggtgcagagcctgaacgtggacgccatcatcagaggcggcctgaccagattcaccgaccagctgggcaagctgtggtgcagcctggccgactactacatcagaagcggccacttcgagaaggccagagacgtgtacgaggaggccatcagaaccgtgatgaccgtgagagacttcacccaggtgttcgacagctacgcccagttcgaggagagcatgatcgccgccaagatggagaccgccagcgagctgggcagagaggaggaggacgacgtggacctggagctgagactggccagattcgagcagctgatcagcagaagacccctgctgctgaacagcgtgctgctgagacagaacccccaccacgtgcacgagtggcacaagagagtggccctgcaccagggcagacccagagagatcatcaacacctacaccgaggccgtgcagaccgtggaccccttcaaggccaccggcaagccccacaccctgtgggtggccttcgccaagttctacgaggacaacggccagctggacgacgccagagtgatcctggagaaggccaccaaggtgaacttcaagcaggtggacgacctggccagcgtgtggtgccagtgcggcgagctggagctgagacacgagaactacgacgaggccctgagactgctgagaaaggccaccgccctgcccgccagaagagccgagtacttcgacggcagcgagcccgtgcagaacagagtgtacaagagcctgaaggtgtggagcatgctggccgacctggaggagagcctgggcaccttccagagcaccaaggccgtgtacgacagaatcctggacctgagaatcgccaccccccagatcgtgatcaactacgccatgttcctggaggagcacaagtacttcgaggagagcttcaaggcctacgagagaggcatcagcctgttcaagtggcccaacgtgagcgacatctggagcacctacctgaccaagttcatcgccagatacggcggcagaaagctggagagagccagagacctgttcgagcaggccctggacggctgcccccccaagtacgccaagaccctgtacctgctgtacgcccagctggaggaggagtggggcctggccagacacgccatggccgtgtacgagagagccaccagagccgtggagcccgcccagcagtacgacatgttcaacatctacatcaagagagccgccgagatctacggcgtgacccacaccagaggcatctaccagaaggccatcgaggtgctgagcgacgagcacgccagagagatgtgcctgagattcgccgacatggagtgcaagctgggcgagatcgacagagccagagccatctacagcttctgcagccagatctgcgaccccagaaccaccggcgccttctggcagacctggaaggacttcgaggtgagacacggcaacgaggacaccatcaaggagatgctgagaatcagaagaagcgtgcaggccacctacaacacccaggtgaacttcatggccagccagatgctgaaggtgagcggcagcgccaccggcaccgtgagcgacctggcccccggccagagcggcatggacgacatgaagctgctggagcagagagccgagcagctggccgccgaggccgagagagaccagcccctgagagcccagagcaagatcctgttcgtgagaagcgacgccagcagagaggagctggccgagctggcccagcaggtgaaccccgaggagatccagctgggcgaggacgaggacgaggacgagatggacctggagcccaacgaggtgagactggagcagcagagcgtgcccgccgccgtgttcggcagcctgaaggaggactag

SEQ ID NO: 13611 - DNA, 1902 bp, synthetic construct
  misc_feature 1..1902: note = Description of Artificial Sequence: Synthetic coding sequence
  source 1..1902: mol_type = other DNA
atgcccgagatcagactgagacacgtggtgagctgcagcagccaggacagcacccactgcgccgagaacctgctgaaggccgacacctacagaaagtggagagccgccaaggccggcgagaagaccatcagcgtggtgctgcagctggagaaggaggagcagatccacagcgtggacatcggcaacgacggcagcgccttcgtggaggtgctggtgggcagcagcgccggcggcgccggcgagcaggactacgaggtgctgctggtgaccagcagcttcatgagccccagcgagagcagaagcggcagcaaccccaacagagtgagaatgttcggccccgacaagctggtgagagccgccgccgagaagagatgggacagagtgaagatcgtgtgcagccagccctacagcaaggacagccccttcggcctgagcttcgtgagattccacagcccccccgacaaggacgaggccgaggcccccagccagaaggtgaccgtgaccaagctgggccagttcagagtgaaggaggaggacgagagcgccaacagcctgagacccggcgccctgttcttcagcagaatcaacaagaccagccccgtgaccgccagcgaccccgccggccccagctacgccgccgccaccctgcaggccagcagcgccgccagcagcgccagccccgtgagcagagccatcggcagcaccagcaagccccaggagagccccaagggcaagagaaagctggacctgaaccaggaggagaagaagacccccagcaagccccccgcccagctgagccccagcgtgcccaagagacccaagctgcccgcccccaccagaacccccgccaccgcccccgtgcccgccagagcccagggcgccgtgaccggcaagcccagaggcgagggcaccgagcccagaagacccagagccggccccgaggagctgggcaagatcctgcagggcgtggtggtggtgctgagcggcttccagaaccccttcagaagcgagctgagagacaaggccctggagctgggcgccaagtacagacccgactggaccagagacagcacccacctgatctgcgccttcgccaacacccccaagtacagccaggtgctgggcctgggcggcagaatcgtgagaaaggagtgggtgctggactgccacagaatgagaagaagactgcccagccagagatacctgatggccggccccggcagcagcagcgaggaggacgaggccagccacagcggcggcagcggcgacgaggcccccaagctgccccagaagcagccccagaccaagaccaagcccacccaggccgccggccccagcagcccccagaagccccccacccccgaggagaccaaggccgccagccccgtgctgcaggaggacatcgacatcgagggcgtgcagagcgagggccaggacaacggcgccgaggacagcggcgacaccgaggacgagctgagaagagtggccgagcagaaggagcacagactgccccccggccaggaggagaacggcgaggacccctacgccggcagcaccgacgagaacaccgacagcgaggagcaccaggagccccccgacctgcccgtgcccgagctgcccgacttcttccagggcaagcacttcttcctgtacggcgagttccccggcgacgagagaagaaagctgatcagatacgtgaccgccttcaacggcgagctggaggacaacatgagcgacagagtgcagttcgtgatcaccgcccaggagtgggaccccagcttcgaggaggccctgatggacaaccccagcctggccttcgtgagacccagatggatctacagctgcaacgagaagcagaagctgctgccccaccagctgtacggcgtggtgccccaggcctag

SEQ ID NO: 13612 - DNA, 1944 bp, synthetic construct
  misc_feature 1..1944: note = Description of Artificial Sequence: Synthetic coding sequence
  source 1..1944: mol_type = other DNA
agcaccagcagcttctggcccggcgaggcccacgacgtggacatgcccgagatcagactgagacacgtggtgagctgcagcagccaggacagcacccactgcgccgagaacctgctgaaggccgacacctacagaaagtggagagccgccaaggccggcgagaagaccatcagcgtggtgctgcagctggagaaggaggagcagatccacagcgtggacatcggcaacgacggcagcgccttcgtggaggtgctggtgggcagcagcgccggcggcgccggcgagcaggactacgaggtgctgctggtgaccagcagcttcatgagccccagcgagagcagaagcggcagcaaccccaacagagtgagaatgttcggccccgacaagctggtgagagccgccgccgagaagagatgggacagagtgaagatcgtgtgcagccagccctacagcaaggacagccccttcggcctgagcttcgtgagattccacagcccccccgacaaggacgaggccgaggcccccagccagaaggtgaccgtgaccaagctgggccagttcagagtgaaggaggaggacgagagcgccaacagcctgagacccggcgccctgttcttcagcagaatcaacaagaccagccccgtgaccgccagcgaccccgccggccccagctacgccgccgccaccctgcaggccagcagcgccgccagcagcgccagccccgtgagcagagccatcggcagcaccagcaagccccaggagagccccaagggcaagagaaagctggacctgaaccaggaggagaagaagacccccagcaagccccccgcccagctgagccccagcgtgcccaagagacccaagctgcccgcccccaccagaacccccgccaccgcccccgtgcccgccagagcccagggcgccgtgaccggcaagcccagaggcgagggcaccgagcccagaagacccagagccggccccgaggagctgggcaagatcctgcagggcgtggtggtggtgctgagcggcttccagaaccccttcagaagcgagctgagagacaaggccctggagctgggcgccaagtacagacccgactggaccagagacagcacccacctgatctgcgccttcgccaacacccccaagtacagccaggtgctgggcctgggcggcagaatcgtgagaaaggagtgggtgctggactgccacagaatgagaagaagactgcccagccagagatacctgatggccggccccggcagcagcagcgaggaggacgaggccagccacagcggcggcagcggcgacgaggcccccaagctgccccagaagcagccccagaccaagaccaagcccacccaggccgccggccccagcagcccccagaagccccccacccccgaggagaccaaggccgccagccccgtgctgcaggaggacatcgacatcgagggcgtgcagagcgagggccaggacaacggcgccgaggacagcggcgacaccgaggacgagctgagaagagtggccgagcagaaggagcacagactgccccccggccaggaggagaacggcgaggacccctacgccggcagcaccgacgagaacaccgacagcgaggagcaccaggagccccccgacctgcccgtgcccgagctgcccgacttcttccagggcaagcacttcttcctgtacggcgagttccccggcgacgagagaagaaagctgatcagatacgtgaccgccttcaacggcgagctggaggacaacatgagcgacagagtgcagttcgtgatcaccgcccaggagtgggaccccagcttcgaggaggccctgatggacaaccccagcctggccttcgtgagacccagatggatctacagctgcaacgagaagcagaagctgctgccccaccagctgtacggcgtggtgccccaggcctag

SEQ ID NO: 13613 - DNA, 1203 bp, synthetic construct
  misc_feature 1..1203: note = Description of Artificial Sequence: Synthetic coding sequence
  source 1..1203: mol_type = other DNA
atgcccgagatcagactgagacacgtggtgagctgcagcagccaggacagcacccactgcgccgagaacctgctgaaggccgacacctacagaaagtggagagccgccaaggccggcgagaagaccatcagcgtggtgctgcagctggagaaggaggagcagatccacagcgtggacatcggcaacgacggcagcgccttcgtggaggtgctggtgggcagcagcgccggcggcgccggcgagcaggactacgaggtgctgctggtgaccagcagcttcatgagccccagcgagagcagaagcggcagcaaccccaacagagtgagaatgttcggccccgacaagctggtgagagccgccgccgagaagagatgggacagagtgaagatcgtgtgcagccagccctacagcaaggacagccccttcggcctgagcttcgtgagattccacagcccccccgacaaggacgaggccgaggcccccagccagaaggtgaccgtgaccaagctgggccagttcagagtgaaggaggaggacgagagcgccaacagcctgagacccggcgccctgttcttcagcagaatcaacaagaccagccccgtgaccgccagcgaccccgccggccccagctacgccgccgccaccctgcaggccagcagcgccgccagcagcgccagccccgtgagcagagccatcggcagcaccagcaagccccaggagagccccaagggcaagagaaagctggacctgaaccaggaggagaagaagacccccagcaagccccccgcccagctgagccccagcgtgcccaagagacccaagctgcccgcccccaccagaacccccgccaccgcccccgtgcccgccagagcccagggcgccgtgaccggcaagcccagaggcgagggcaccgagcccagaagacccagagccggccccgaggagctgggcaagatcctgcagggcgtggtggtggtgctgagcggcttccagaaccccttcagaagcgagctgagagacaaggccctggagctgggcgccaagtacagacccgactggaccagagacagcacccacctgatctgcgccttcgccaacacccccaagctgccccagaaggtgcccccccagcacacccccgaccagaaccaggcccacagcggcagctggacccagctgacccccgaggcccccaacccctag

SEQ ID NO: 13614 - DNA, 1809 bp, synthetic construct
  misc_feature 1..1809: note = Description of Artificial Sequence: Synthetic coding sequence
  source 1..1809: mol_type = other DNA
atgcccgagatcagactgagacacgtggtgagctgcagcagccaggacagcctggagaaggaggagcagatccacagcgtggacatcggcaacgacggcagcgccttcgtggaggtgctggtgggcagcagcgccggcggcgccggcgagcaggactacgaggtgctgctggtgaccagcagcttcatgagccccagcgagagcagaagcggcagcaaccccaacagagtgagaatgttcggccccgacaagctggtgagagccgccgccgagaagagatgggacagagtgaagatcgtgtgcagccagccctacagcaaggacagccccttcggcctgagcttcgtgagattccacagcccccccgacaaggacgaggccgaggcccccagccagaaggtgaccgtgaccaagctgggccagttcagagtgaaggaggaggacgagagcgccaacagcctgagacccggcgccctgttcttcagcagaatcaacaagaccagccccgtgaccgccagcgaccccgccggccccagctacgccgccgccaccctgcaggccagcagcgccgccagcagcgccagccccgtgagcagagccatcggcagcaccagcaagccccaggagagccccaagggcaagagaaagctggacctgaaccaggaggagaagaagacccccagcaagccccccgcccagctgagccccagcgtgcccaagagacccaagctgcccgcccccaccagaacccccgccaccgcccccgtgcccgccagagcccagggcgccgtgaccggcaagcccagaggcgagggcaccgagcccagaagacccagagccggccccgaggagctgggcaagatcctgcagggcgtggtggtggtgctgagcggcttccagaaccccttcagaagcgagctgagagacaaggccctggagctgggcgccaagtacagacccgactggaccagagacagcacccacctgatctgcgccttcgccaacacccccaagtacagccaggtgctgggcctgggcggcagaatcgtgagaaaggagtgggtgctggactgccacagaatgagaagaagactgcccagccagagatacctgatggccggccccggcagcagcagcgaggaggacgaggccagccacagcggcggcagcggcgacgaggcccccaagctgccccagaagcagccccagaccaagaccaagcccacccaggccgccggccccagcagcccccagaagccccccacccccgaggagaccaaggccgccagccccgtgctgcaggaggacatcgacatcgagggcgtgcagagcgagggccaggacaacggcgccgaggacagcggcgacaccgaggacgagctgagaagagtggccgagcagaaggagcacagactgccccccggccaggaggagaacggcgaggacccctacgccggcagcaccgacgagaacaccgacagcgaggagcaccaggagccccccgacctgcccgtgcccgagctgcccgacttcttccagggcaagcacttcttcctgtacggcgagttccccggcgacgagagaagaaagctgatcagatacgtgaccgccttcaacggcgagctggaggacaacatgagcgacagagtgcagttcgtgatcaccgcccaggagtgggaccccagcttcgaggaggccctgatggacaaccccagcctggccttcgtgagacccagatggatctacagctgcaacgagaagcagaagctgctgccccaccagctgtacggcgtggtgccccaggcctag

SEQ ID NO: 13615 - DNA, 843 bp, synthetic construct
  misc_feature 1..843: note = Description of Artificial Sequence: Synthetic coding sequence
  source 1..843: mol_type = other DNA
atgtgcagcgccttccacagagccgagagcggcaccgagctgctggccagactggagggcagaagcagcctgaaggagatcgagcccaacctgttcgccgacgaggacagccccgtgcacggcgacatcctggagttccacggccccgagggcaccggcaagaccgagatgctgtaccacctgaccgccagatgcatcctgcccaagagcgagggcggcctggaggtggaggtgctgttcatcgacaccgactaccacttcgacatgctgagactggtgaccatcctggagcacagactgagccagagcagcgaggagatcatcaagtactgcctgggcagattcttcctggtgtactgcagcagcagcacccacctgctgctgaccctgtacagcctggagagcatgttctgcagccaccccagcctgtgcctgctgatcctggacagcctgagcgccttctactggatcgacagagtgaacggcggcgagagcgtgaacctgcaggagagcaccctgagaaagtgcagccagtgcctggagaagctggtgaacgactacagactggtgctgttcgccaccacccagaccatcatgcagaaggccagcagcagcagcgaggagcccagccacgccagcagaagactgtgcgacgtggacatcgactacagaccctacctgtgcaaggcctggcagcagctggtgaagcacagaatgttcttcagcaagcaggacgacagccagagcagcaaccagttcagcctggtgagcagatgcctgaagagcaacagcctgaagaagcacttcttcatcatcggcgagagcggcgtggagttctgctag

SEQ ID NO: 13616 - DNA, 1041 bp, synthetic construct
  misc_feature 1..1041: note = Description of Artificial Sequence: Synthetic coding sequence
  source 1..1041: mol_type = other DNA
atggacctggacctgctggacctgaaccccagaatcatcgccgccatcaagaaggccaagctgaagagcgtgaaggaggtgctgcacttcagcggccccgacctgaagagactgaccaacctgagcagccccgaggtgtggcacctgctgagaaccgccagcctgcacctgagaggcagcagcatcctgaccgccctgcagctgcaccagcagaaggagagattccccacccagcaccagagactgagcctgggctgccccgtgctggacgccctgctgagaggcggcctgcccctggacggcatcaccgagctggccggcagaagcagcgccggcaagacccagctggccctgcagctgtgcctggccgtgcagttccccagacagcacggcggcctggaggccggcgccgtgtacatctgcaccgaggacgccttcccccacaagagactgcagcagctgatggcccagcagcccagactgagaaccgacgtgcccggcgagctgctgcagaagctgagattcggcagccagatcttcatcgagcacgtggccgacgtggacaccctgctggagtgcgtgaacaagaaggtgcccgtgctgctgagcagaggcatggccagactggtggtgatcgacagcgtggccgcccccttcagatgcgagttcgacagccaggccagcgcccccagagccagacacctgcagagcctgggcgccaccctgagagagctgagcagcgccttccagagccccgtgctgtgcatcaaccaggtgaccgaggccatggaggagcagggcgccgcccacggccccctgggcttctgggacgagagagtgagccccgccctgggcatcacctgggccaaccagctgctggtgagactgctggccgacagactgagagaggaggaggccgccctgggctgccccgccagaaccctgagagtgctgagcgccccccacctgccccccagcagctgcagctacaccatcagcgccgagggcgtgagaggcacccccggcacccagagccactag

SEQ ID NO: 13617 - DNA, 1041 bp, synthetic construct; identical to SEQ ID NO: 13616
  misc_feature 1..1041: note = Description of Artificial Sequence: Synthetic coding sequence
  source 1..1041: mol_type = other DNA

SEQ ID NO: 13618 - DNA, 1041 bp, synthetic construct; identical to SEQ ID NO: 13616
  misc_feature 1..1041: note = Description of Artificial Sequence: Synthetic coding sequence
  source 1..1041: mol_type = other DNA

SEQ ID NO: 13619 - DNA, 144 bp, synthetic construct
  misc_feature 1..144: note = Description of Artificial Sequence: Synthetic coding sequence
  source 1..144: mol_type = other DNA
atggacctggacctgctggacctgaaccccagaatcatcgccgccatcaagaaggccaagctgaagagcgtgaaggaggtgctgcacttcagcggccccgacctgaagagactgaccaacctgagcagccccgaggtgtggtag

SEQ ID NO: 13620 - DNA, 138 bp, synthetic construct
  misc_feature 1..138: note = Description of Artificial Sequence: Synthetic coding sequence
  source 1..138: mol_type = other DNA
atggacctggacctgctggacctgaaccccagaatcatcgccgccatcaagaaggccaagctgaagagcgtgaaggaggtgctgcacttcagcggccccgacctgaagagactgaccaacctgagcagccccgagtag

SEQ ID NO: 13621 - DNA, 1041 bp, synthetic construct; identical to SEQ ID NO: 13616
  misc_feature 1..1041: note = Description of Artificial Sequence: Synthetic coding sequence
  source 1..1041: mol_type = other DNA

SEQ ID NO: 13622 - DNA, 1041 bp, synthetic construct; identical to SEQ ID NO: 13616
  misc_feature 1..1041: note = Description of Artificial Sequence: Synthetic coding sequence
  source 1..1041: mol_type = other DNA

SEQ ID NO: 13623 - DNA, 309 bp, synthetic construct
  misc_feature 1..309: note = Description of Artificial Sequence: Synthetic coding sequence
  source 1..309: mol_type = other DNA
atggacctggacctgctggacctgaaccccagaatcatcgccgccatcaagaaggccaagctgaagagcgtgaaggaggtgctgcacttcagcggccccgacctgaagagactgaccaacctgagcagccccgaggtgtggcacctgctgagaaccgccagcctgcacctgagaggcagcagcatcctgaccgccctgcagctgcaccagcagaaggagagattccccacccagcaccagagactgagcctgggctgccccgtgctggacgccctgctgagaggcggcctgcccctggacggcatctag

SEQ ID NO: 13624 - DNA, 186 bp, synthetic construct
  misc_feature 1..186: note = Description of Artificial Sequence: Synthetic coding sequence
  source 1..186: mol_type = other DNA
atggacctggacctgctggacctgaaccccagaatcatcgccgccatcaagaaggccaagctgaagagcgtgaaggaggtgctgcacttcagcggccccgacctgaagagactgaccaacctgagcagccccgaggtgtggcacctgctgagaaccgccagcctgcacctgagaggcagcagctag

SEQ ID NO: 13625 - DNA, 339 bp, synthetic construct
  misc_feature 1..339: note = Description of Artificial Sequence: Synthetic coding sequence
  source 1..339: mol_type = other DNA
atggacctggacctgctggacctgaaccccagaatcatcgccgccatcaagaaggccaagctgaagagcgtgaaggaggtgctgcacttcagcggccccgacctgaagagactgaccaacctgagcagccccgaggtgtggcacctgctgagaaccgccagcctgcacctgagaggcagcagcatcctgaccgccctgcagctgcaccagcagaaggagagattccccacccagcaccagagactgagcctgggctgccccgtgctggacgccctgctgagaggcggcctgcccctggacggcatcaccgagctggccggcagaagcagcgccggctag

SEQ ID NO: 13626 - DNA, 1005 bp, synthetic construct
  misc_feature 1..1005: note = Description of Artificial Sequence: Synthetic coding sequence
  source 1..1005: mol_type = other DNA
atggagagaaagatcagcagaatccacctggtgagcgagcccagcatcacccacttcctgcaggtgagctgggagaagaccctggagagcggcttcgtgatcaccctgaccgacggccacagcgcctggaccggcaccgtgagcgagagcgagatcagccaggaggccgacgacatggccatggagaagggcaagtacgtgggcgagctgagaaaggccctgctgagcggcgccggccccgccgacgtgtacaccttcaacttcagcaaggagagctgctacttcttcttcgagaagaacctgaaggacgtgagcttcagactgggcagcttcaacctggagaaggtggagaaccccgccgaggtgatcagagagctgatctgctactgcctggacaccatcgccgagaaccaggccaagaacgagcacctgcagaaggagaacgagagactgctgagagactggaacgacgtgcagggcagattcgagaagtgcgtgagcgccaaggaggccctggagaccgacctgtacaagagattcatcctggtgctgaacgagaagaagaccaagatcagaagcctgcacaacaagctgctgaacgccgcccaggagagagagaaggacatcaagcaggagggcgagaccgccatctgcagcgagatgaccgccgacagagaccccgtgtacgacgagagcaccgacgaggagagcgagaaccagaccgacctgagcggcctggccagcgccgccgtgagcaaggacgacagcatcatcagcagcctggacgtgaccgacatcgcccccagcagaaagagaagacagagaatgcagagaaacctgggcaccgagcccaagatggccccccaggagaaccagctgcaggagaaggagaagcccgacagcagcctgcccgagaccagcaagaaggagcacatcagcgccgagaacatgagcctggagaccctgagaaacagcagccccgaggacctgttcgacgagatctag

SEQ ID NO: 13627 - DNA, 1011 bp, synthetic construct
  misc_feature 1..1011: note = Description of Artificial Sequence: Synthetic coding sequence
  source 1..1011: mol_type = other DNA
atggagagaaagatcagcagaatccacctggtgagcgagcccagcatcacccacttcctgcaggtgagctgggagaagaccctggagagcggcttcgtgatcaccctgaccgacggccacagcgcctggaccggcaccgtgagcgagagcgagatcagccaggaggccgacgacatggccatggagaagggcaagtacgtgggcgagctgagaaaggccctgctgagcggcgccggccccgccgacgtgtacaccttcaacttcagcaaggagagctgctacttcttcttcgagaagaacctgaaggacgtgagcttcagactgggcagcttcaacctggagaaggtggagaaccccgccgaggtgatcagagagctgatctgctactgcctggacaccatcgccgagaaccaggccaagaacgagcacctgcagaaggagaacgagagactgctgagagactggaacgacgtgcagggcagattcgagaagtgcgtgagcgccaaggaggccctggagaccgacctgtacaagagattcatcctggtgctgaacgagaagaagaccaagatcagaagcctgcacaacaagctgctgaacgccgcccaggagagagagaaggacatcaagcaggagggcgagaccgccatctgcagcgagatgaccgccgacagagaccccgtgtacgacgagagcaccgacgaggagagcgagaaccagaccgacctgagcggcctggccagcgccgccgtgagcaaggacgacagcatcatcagcagcctggacgtgaccgacatcgcccccagcagaaagagaagacagagaatgcagagaaacctgggcaccgagcccaagatggccccccaggagaaccagctgcaggagaaggagaacagcagacccgacagcagcctgcccgagaccagcaagaaggagcacatcagcgccgagaacatgagcctggagaccctgagaaacagcagccccgaggacctgttcgacgagatctag

SEQ ID NO: 13628 - DNA, 1005 bp, synthetic construct; identical to SEQ ID NO: 13626
  misc_feature 1..1005: note = Description of Artificial Sequence: Synthetic coding sequence
  source 1..1005: mol_type = other DNA

SEQ ID NO: 13629 - DNA, 1011 bp, synthetic construct; identical to SEQ ID NO: 13627
  misc_feature 1..1011: note = Description of Artificial Sequence: Synthetic coding sequence
  source 1..1011: mol_type = other DNA

SEQ ID NO: 13630 - DNA, 186 bp, synthetic construct
  misc_feature 1..186: note = Description of Artificial Sequence: Synthetic coding sequence
  source 1..186: mol_type = other DNA
atgcagagaaacctgggcaccgagcccaagatggccccccaggagaaccagctgcaggagaaggagaacagcagacccgacagcagcctgcccgagaccagcaagaaggagcacatcagcgccgagaacatgagcctggagaccctgagaaacagcagccccgaggacctgttcgtgagcatctag

SEQ ID NO: 13631 - DNA, 2199 bp, synthetic construct
  misc_feature 1..2199: note = Description of Artificial Sequence: Synthetic coding sequence
  source 1..2199: mol_type = other DNA
atggtgagaagcggcaacaaggccgccgtggtgctgtgcatggacgtgggcttcaccatgagcaacagcatccccggcatcgagagccccttcgagcaggccaagaaggtgatcaccatgttcgtgcagagacaggtgttcgccgagaacaaggacgagatcgccctggtgctgttcggcaccgacggcaccgacaaccccctgagcggcggcgaccagtaccagaacatcaccgtgcacagacacctgatgctgcccgacttcgacctgctggaggacatcgagagcaagatccagcccggcagccagcaggccgacttcctggacgccctgatcgtgagcatggacgtgatccagcacgagaccatcggcaagaagttcgagaagagacacatcgagatcttcaccgacctgagcagcagattcagcaagagccagctggacatcatcatccacagcctgaagaagtgcgacatcagcctgcagttcttcctgcccttcagcctgggcaaggaggacggcagcggcgacagaggcgacggccccttcagactgggcggccacggccccagcttccccctgaagggcatcaccgagcagcagaaggagggcctggagatcgtgaagatggtgatgatcagcctggagggcgaggacggcctggacgagatctacagcttcagcgagagcctgagaaagctgtgcgtgttcaagaagatcgagagacacagcatccactggccctgcagactgaccatcggcagcaacctgagcatcagaatcgccgcctacaagagcatcctgcaggagagagtgaagaagacctggaccgtggtggacgccaagaccctgaagaaggaggacatccagaaggagaccgtgtactgcctgaacgacgacgacgagaccgaggtgctgaaggaggacatcatccagggcttcagatacggcagcgacatcgtgcccttcagcaaggtggacgaggagcagatgaagtacaagagcgagggcaagtgcttcagcgtgctgggcttctgcaagagcagccaggtgcagagaagattcttcatgggcaaccaggtgctgaaggtgttcgccgccagagacgacgaggccgccgccgtggccctgagcagcctgatccacgccctggacgacctggacatggtggccatcgtgagatacgcctacgacaagagagccaacccccaggtgggcgtggccttcccccacatcaagcacaactacgagtgcctggtgtacgtgcagctgcccttcatggaggacctgagacagtacatgttcagcagcctgaagaacagcaagaagtacgcccccaccgaggcccagctgaacgccgtggacgccctgatcgacagcatgagcctggccaagaaggacgagaagaccgacaccctggaggacctgttccccaccaccaagatccccaaccccagattccagagactgttccagtgcctgctgcacagagccctgcaccccagagagcccctgccccccatccagcagcacatctggaacatgctgaacccccccgccgaggtgaccaccaagagccagatccccctgagcaagatcaagaccctgttccccctgatcgaggccaagaagaaggaccaggtgaccgcccaggagatcttccaggacaaccacgaggacggccccaccgccaagaagctgaagaccgagcagggcggcgcccacttcagcgtgagcagcctggccgagggcagcgtgaccagcgtgggcagcgtgaaccccgccgagaacttcagagtgctggtgaagcagaagaaggccagcttcgaggaggccagcaaccagctgatcaaccacatcgagcagttcctggacaccaacgagaccccctacttcatgaagagcatcgactgcatcagagccttcagagaggaggccatcaagttcagcgaggagcagagattcaacaacttcctgaaggccctgcaggagaaggtggagatcaagcagctgaaccacttctgggagatcgtggtgcaggacggcatcaccctgatcaccaaggaggaggccagcggcagcagcgtgaccgccgaggaggccaagaagttcctggcccccaaggacaagcccagcggcgacaccgccgccgtgttcgaggagggcggcgacgtggacgacctgctggacatgatctag

SEQ ID NO: 13632 - DNA, 2199 bp, synthetic construct; identical to SEQ ID NO: 13631
  misc_feature 1..2199: note = Description of Artificial Sequence: Synthetic coding sequence
  source 1..2199: mol_type = other DNA

SEQ ID NO: 13633 - DNA, 1830 bp, synthetic construct
  misc_feature 1..1830: note = Description of Artificial Sequence: Synthetic coding sequence
  source 1..1830: mol_type = other DNA
atgagcggctgggagagctactacaagaccgagggcgacgaggaggccgaggaggagcaggaggagaacctggaggccagcggcgactacaagtacagcggcagagacagcctgatcttcctggtggacgccagcaaggccatgttcgagagccagagcgaggacgagctgacccccttcgacatgagcatccagtgcatccagagcgtgtacatcagcaagatcatcagcagcgacagagacctgctggccgtggtgttctacggcaccgagaaggacaagaacagcgtgaacttcaagaacatctacgtgctgcaggagctggacaaccccggcgccaagagaatcctggagctggaccagttcaagggccagcagggccagaagagattccaggacatgatgggccacggcagcgactacagcctgagcgaggtgctgtgggtgtgcgccaacctgttcagcgacgtgcagttcaagatgagccacaagagaatcatgctgttcaccaacgaggacaacccccacggcaacgacagcgccaaggccagcagagccagaaccaaggccggcgacctgagagacaccggcatcttcctggacctgatgcacctgaagaagcccggcggcttcgacatcagcctgttctacagagacatcatcagcatcgccgaggacgaggacctgagagtgcacttcgaggagagcagcaagctggaggacctgctgagaaaggtgagagccaaggagaccagaaagagagccctgagcagactgaagctgaagctgaacaaggacatcgtgatcagcgtgggcatctacaacctggtgcagaaggccctgaagcccccccccatcaagctgtacagagagaccaacgagcccgtgaagaccaagaccagaaccttcaacaccagcaccggcggcctgctgctgcccagcgacaccaagagaagccagatctacggcagcagacagatcatcctggagaaggaggagaccgaggagctgaagagattcgacgaccccggcctgatgctgatgggcttcaagcccctggtgctgctgaagaagcaccactacctgagacccagcctgttcgtgtaccccgaggagagcctggtgatcggcagcagcaccctgttcagcgccctgctgatcaagtgcctggagaaggaggtggccgccctgtgcagatacacccccagaagaaacatccccccctacttcgtggccctggtgccccaggaggaggagctggacgaccagaagatccaggtgaccccccccggcttccagctggtgttcctgcccttcgccgacgacaagagaaagatgcccttcaccgagaagatcatggccacccccgagcaggtgggcaagatgaaggccatcgtggagaagctgagattcacctacagaagcgacagcttcgagaaccccgtgctgcagcagcacttcagaaacctggaggccctggccctggacctgatggagcccgagcaggccgtggacctgaccctgcccaaggtggaggccatgaacaagagactgggcagcctggtggacgagttcaaggagctggtgtacccccccgactacaaccccgagggcaaggtgaccaagagaaagcacgacaacgagggcagcggcagcaagagacccaaggtggagtacagcgaggaggagctgaagacccacatcagcaagggcaccctgggcaagttcaccgtgcccatgctgaaggaggcctgcagagcctacggcctgaagagcggcctgaagaagcaggagctgctggaggccctgaccaagcacttccaggactag

SEQ ID NO: 13634 - DNA, 1830 bp, synthetic construct; identical to SEQ ID NO: 13633
  misc_feature 1..1830: note = Description of Artificial Sequence: Synthetic coding sequence
  source 1..1830: mol_type = other DNA

SEQ ID NO: 13635 - DNA, 1674 bp, synthetic construct
  misc_feature 1..1674: note = Description of Artificial Sequence: Synthetic coding sequence
  source 1..1674: mol_type = other DNA
atgagcggctgggagagctactacaagaccgagggcgacgaggaggccgaggaggagcaggaggagaacctggaggccagcggcgactacaagtacagcggcagagacagcctgatcttcctggtggacgccagcaaggccatgttcgagagccagagcgaggacgagctgacccccttcgacatgagcatccagtgcatccagagcgtgtacatcagcaagatcatcagcagcgacagagacctgctggccgtggtgttctacggcaccgagaaggacaagaacagcgtgaacttcaagaacatctacgtgctgcaggagctggacaaccccggcgccaagagaatcctggagctggaccagttcaagggccagcagggccagaagagattccaggacatgatgggccacggcagcgactacagcctgagcgaggtgctgtgggtgtgcgccaacctgttcagcgacgtgcagttcaagatgagccacaagagaatcatgctgttcaccaacgaggacaacccccacggcaacgacagcgccaaggccagcagagccagaaccaaggccggcgacctgagagacaccggcatcttcctggacctgatgcacctgaagaagcccggcggcttcgacatcagcctgttctacagagacatcatcagcatcgccgaggacgaggacctgagagtgcacttcgaggagagcagcaagctggaggacctgctgagaaaggtgagagccaaggagaccagaaagagagccctgagcagactgaagctgaagctgaacaaggacatcgtgatcagcgtgggcatctacaacctggtgcagaaggccctgaagcccccccccatcaagctgtacagagagaccaacgagcccgtgaagaccaagaccagaaccttcaacaccagcaccggcggcctgctgctgcccagcgacaccaagagaagccagatctacggcagcagacagatcatcctggagaaggaggagaccgaggagctgaagagattcgacgaccccggcctgatgctgatgggcttcaagcccctggtgctgctgaagaagcaccactacctgagacccagcctgttcgtgtaccccgaggagagcctggtgatcggcagcagcaccctgttcagcgccctgctgatcaagtgcctggagaaggaggtggccgccctgtgcagatacacccccagaagaaacatccccccctacttcgtggccctggtgccccaggaggaggagctggacgaccagaagatccaggtgaccccccccggcttccagctggtgttcctgcccttcgccgacgacaagagaaagatgcccttcaccgagaagatcatggccacccccgagcaggtgggcaagatgaaggccatcgtggagaagctgagattcacctacagaagcgacagcttcgagaaccccgtgctgcagcagcacttcagaaacctggaggccctggccctggacctgatggagcccgagcaggccgtggacctgaccctgcccaaggtggaggccatgaacaagagactgggcagcctggtggacgagttcaaggagctggtgtacccccccgactacaaccccgagggcaaggtgaccaagagaaagcacgccaagggccccagatggagcatccagaagagaagctag

SEQ ID NO: 13636 - DNA, 1707 bp, synthetic construct
  misc_feature 1..1707: note = Description of Artificial Sequence: Synthetic coding sequence
  source 1..1707: mol_type = other DNA
atgagcggctgggagagctactacaagaccgagggcgacgaggaggccgaggaggagcaggaggagaacctggaggccagcggcgactacaagtacagcggcagagacagcctgatcttcctggtggacgccagcaaggccatgttcgagagccagagcgaggacgagctgacccccttcgacatgagcatccaggagctggacaaccccggcgccaagagaatcctggagctggaccagttcaagggccagcagggccagaagagattccaggacatgatgggccacggcagcgactacagcctgagcgaggtgctgtgggtgtgcgccaacctgttcagcgacgtgcagttcaagatgagccacaagagaatcatgctgttcaccaacgaggacaacccccacggcaacgacagcgccaaggccagcagagccagaaccaaggccggcgacctgagagacaccggcatcttcctggacctgatgcacctgaagaagcccggcggcttcgacatcagcctgttctacagagacatcatcagcatcgccgaggacgaggacctgagagtgcacttcgaggagagcagcaagctggaggacctgctgagaaaggtgagagccaaggagaccagaaagagagccctgagcagactgaagctgaagctgaacaaggacatcgtgatcagcgtgggcatctacaacctggtgcagaaggccctgaagcccccccccatcaagctgtacagagagaccaacgagcccgtgaagaccaagaccagaaccttcaacaccagcaccggcggcctgctgctgcccagcgacaccaagagaagccagatctacggcagcagacagatcatcctggagaaggaggagaccgaggagctgaagagattcgacgaccccggcctgatgctgatgggcttcaagcccctggtgctgctgaagaagcaccactacctgagacccagcctgttcgtgtaccccgaggagagcctggtgatcggcagcagcaccctgttcagcgccctgctgatcaagtgcctggagaaggaggtggccgccctgtgcagatacacccccagaagaaacatccccccctacttcgtggccctggtgccccaggaggaggagctggacgaccagaagatccaggtgaccccccccggcttccagctggtgttcctgcccttcgccgacgacaagagaaagatgcccttcaccgagaagatcatggccacccccgagcaggtgggcaagatgaaggccatcgtggagaagctgagattcacctacagaagcgacagcttcgagaaccccgtgctgcagcagcacttcagaaacctggaggccctggccctggacctgatggagcccgagcaggccgtggacctgaccctgcccaaggtggaggccatgaacaagagactgggcagcctggtggacgagttcaaggagctggtgtacccccccgactacaaccccgagggcaaggtgaccaagagaaagcacgacaacgagggcagcggcagcaagagacccaaggtggagtacagcgaggaggagctgaagacccacatcagcaagggcaccctgggcaagttcaccgtgcccatgctgaaggaggcctgcagagcctacggcctgaagagcggcctgaagaagcaggagctgctggaggccctgaccaagcacttccaggactag

SEQ ID NO: 13637 - DNA, 1680 bp, synthetic construct
  misc_feature 1..1680: note = Description of Artificial Sequence: Synthetic coding sequence
  source 1..1680: mol_type = other DNA
atgaagaagcagagaaagaacaagaagagaaccctgaagcaggtgtgcatccagagcgtgtacatcagcaagatcatcagcagcgacagagacctgctggccgtggtgttctacggcaccgagaaggacaagaacagcgtgaacttcaagaacatctacgtgctgcaggagctggacaaccccggcgccaagagaatcctggagctggaccagttcaagggccagcagggccagaagagattccaggacatgatgggccacggcagcgactacagcctgagcgaggtgctgtgggtgtgcgccaacctgttcagcgacgtgcagttcaagatgagccacaagagaatcatgctgttcaccaacgaggacaacccccacggcaacgacagcgccaaggccagcagagccagaaccaaggccggcgacctgagagacaccggcatcttcctggacctgatgcacctgaagaagcccggcggcttcgacatcagcctgttctacagagacatcatcagcatcgccgaggacgaggacctgagagtgcacttcgaggagagcagcaagctggaggacctgctgagaaaggtgagagccaaggagaccagaaagagagccctgagcagactgaagctgaagctgaacaaggacatcgtgatcagcgtgggcatctacaacctggtgcagaaggccctgaagcccccccccatcaagctgtacagagagaccaacgagcccgtgaagaccaagaccagaaccttcaacaccagcaccggcggcctgctgctgcccagcgacaccaagagaagccagatctacggcagcagacagatcatcctggagaaggaggagaccgaggagctgaagagattcgacgaccccggcctgatgctgatgggcttcaagcccctggtgctgctgaagaagcaccactacctgagacccagcctgttcgtgtaccccgaggagagcctggtgatcggcagcagcaccctgttcagcgccctgctgatcaagtgcctggagaaggaggtggccgccctgtgcagatacacccccagaagaaacatccccccctacttcgtggccctggtgccccaggaggaggagctggacgaccagaagatccaggtgaccccccccggcttccagctggtgttcctgcccttcgccgacgacaagagaaagatgcccttcaccgagaagatcatggccacccccgagcaggtgggcaagatgaaggccatcgtggagaagctgagattcacctacagaagcgacagcttcgagaaccccgtgctgcagcagcacttcagaaacctggaggccctggccctggacctgatggagcccgagcaggccgtggacctgaccctgcccaaggtggaggccatgaacaagagactgggcagcctggtggacgagttcaaggagctggtgtacccccccgactacaaccccgagggcaaggtgaccaagagaaagcacgacaacgagggcagcggcagcaagagacccaaggtggagtacagcgaggaggagctgaagacccacatcagcaagggcaccctgggcaagttcaccgtgcccatgctgaaggaggcctgcagagcctacggcctgaagagcggcctgaagaagcaggagctgctggaggccctgaccaagcacttccaggactag

SEQ ID NO: 13638 - DNA, 1830 bp, synthetic construct; identical to SEQ ID NO: 13633
  misc_feature 1..1830: note = Description of Artificial Sequence: Synthetic coding sequence
  source 1..1830: mol_type = other DNA

SEQ ID NO: 13639 - DNA, 1431 bp, synthetic construct
  misc_feature 1..1431: note = Description of Artificial Sequence: Synthetic coding sequence
  source 1..1431: mol_type = other DNA
atgatgggccacggcagcgactacagcctgagcgaggtgctgtgggtgtgcgccaacctgttcagcgacgtgcagttcaagatgagccacaagagaatcatgctgttcaccaacgaggacaacccccacggcaacgacagcgccaaggccagcagagccagaaccaaggccggcgacctgagagacaccggcatcttcctggacctgatgcacctgaagaagcccggcggcttcgacatcagcctgttctacagagacatcatcagcatcgccgaggacgaggacctgagagtgcacttcgaggagagcagcaagctggaggacctgctgagaaaggtgagagccaaggagaccagaaagagagccctgagcagactgaagctgaagctgaacaaggacatcgtgatcagcgtgggcatctacaacctggtgcagaaggccctgaagcccccccccatcaagctgtacagagagaccaacgagcccgtgaagaccaagaccagaaccttcaacaccagcaccggcggcctgctgctgcccagcgacaccaagagaagccagatctacggcagcagacagatcatcctggagaaggaggagaccgaggagctgaagagattcgacgaccccggcctgatgctgatgggcttcaagcccctggtgctgctgaagaagcaccactacctgagacccagcctgttcgtgtaccccgaggagagcctggtgatcggcagcagcaccctgttcagcgccctgctgatcaagtgcctggagaaggaggtggccgccctgtgcagatacacccccagaagaaacatccccccctacttcgtggccctggtgccccaggaggaggagctggacgaccagaagatccaggtgaccccccccggcttccagctggtgttcctgcccttcgccgacgacaagagaaagatgcccttcaccgagaagatcatggccacccccgagcaggtgggcaagatgaaggccatcgtggagaagctgagattcacctacagaagcgacagcttcgagaaccccgtgctgcagcagcacttcagaaacctggaggccctggccctggacctgatggagcccgagcaggccgtggacctgaccctgcccaaggtggaggccatgaacaagagactgggcagcctggtggacgagttcaaggagctggtgtacccccccgactacaaccccgagggcaaggtgaccaagagaaagcacgacaacgagggcagcggcagcaagagacccaaggtggagtacagcgaggaggagctgaagacccacatcagcaagggcaccctgggcaagttcaccgtgcccatgctgaaggaggcctgcagagcctacggcctgaagagcggcctgaagaagcaggagctgctggaggccctgaccaagcacttccaggactag

SEQ ID NO: 13640 - DNA, 741 bp, synthetic construct
  misc_feature 1..741: note = Description of Artificial Sequence: Synthetic coding sequence
  source 1..741: mol_type = other DNA
atggccggcgcccccgacgagagaagaagaggccccgccgccggcgagcagctgcagcagcagcacgtgagctgccaggtgttccccgagagactggcccagggcaacccccagcagggcttcttcagcagcttcttcaccagcaaccagaagtgccagctgagactgctgaagaccctggagaccaacccctacgtgaagctgctgctggacgccatgaagcacagcggctgcgccgtgaacaaggacagacacttcagctgcgaggactgcaacggcaacgtgagcggcggcttcgacgccagcaccagccagatcgtgctgtgccagaacaacatccacaaccaggcccacatgaacagagtggtgacccacgagctgatccacgccttcgaccactgcagagcccacgtggactggttcaccaacatcagacacctggcctgcagcgaggtgagagccgccaacctgagcggcgactgcagcctggtgaacgagatcttcagactgcacttcggcctgaagcagcaccaccagacctgcgtgagagacagagccaccctgagcatcctggccgtgagaaacatcagcaaggaggtggccaagaaggccgtggacgaggtgttcgagagctgcttcaacgaccacgagcccttcggcagaatcccccacaacaagacctacgccagatacgcccacagagacttcgagaacagagacagatactacagcaacatctag

SEQ ID NO: 13641 - DNA, 1515 bp, synthetic construct
  misc_feature 1..1515: note = Description of Artificial Sequence: Synthetic coding sequence
  source 1..1515: mol_type = other DNA
atggaccccggccagcagccccccccccagcccgccccccagggccagggccagccccccagccagcccccccagggccagggcccccccagcggccccggccagcccgcccccgccgccacccaggccgccccccaggccccccccgccggccaccagatcgtgcacgtgagaggcgacagcgagaccgacctggaggccctgttcaacgccgtgatgaaccccaagaccgccaacgtgccccagaccgtgcccatgagactgagaaagctgcccgacagcttcttcaagccccccgagcccaagagccacagcagacaggccagcaccgacgccggcaccgccggcgccctgaccccccagcacgtgagagcccacagcagccccgccagcctgcagctgggcgccgtgagccccggcaccctgacccccaccggcgtggtgagcggccccgccgccacccccaccgcccagcacctgagacagagcagcttcgagatccccgacgacgtgcccctgcccgccggctgggagatggccaagaccagcagcggccagagatacttcctgaaccacatcgaccagaccaccacctggcaggaccccagaaaggccatgctgagccagatgaacgtgaccgcccccaccagcccccccgtgcagcagaacatgatgaacagcgccagcggccccctgcccgacggctgggagcaggccatgacccaggacggcgagatctactacatcaaccacaagaacaagaccaccagctggctggaccccagactggaccccagattcgccatgaaccagagaatcagccagagcgcccccgtgaagcagcccccccccctggccccccagagcccccagggcggcgtgatgggcggcagcaacagcaaccagcagcagcagatgagactgcagcagctgcagatggagaaggagagactgagactgaagcagcaggagctgctgagacaggccatgagaaacatcaaccccagcaccgccaacagccccaagtgccaggagctggccctgagaagccagctgcccaccctggagcaggacggcggcacccagaaccccgtgagcagccccggcatgagccaggagctgagaaccatgaccaccaacagcagcgaccccttcctgaacagcggcacctaccacagcagagacgagagcaccgacagcggcctgagcatgagcagctacagcgtgcccagaacccccgacgacttcctgaacagcgtggacgagatggacaccggcgacaccatcaaccagagcaccctgcccagccagcagaacagattccccgactacctggaggccatccccggcaccaacgtggacctgggcaccctggagggcgacggcatgaacatcgagggcgaggagctgatgcccagcctgcaggaggccctgagcagcgacatcctgaacgacatggagagcgtgctggccgccaccaagctggacaaggagagcttcctgacctggctgtag

SEQ ID NO: 13642 - DNA, 1365 bp, synthetic construct
  misc_feature 1..1365: note = Description of Artificial Sequence: Synthetic coding sequence
  source 1..1365: mol_type = other DNA
atggaccccggccagcagccccccccccagcccgccccccagggccagggccagccccccagccagcccccccagggccagggcccccccagcggccccggccagcccgcccccgccgccacccaggccgccccccaggccccccccgccggccaccagatcgtgcacgtgagaggcgacagcgagaccgacctggaggccctgttcaacgccgtgatgaaccccaagaccgccaacgtgccccagaccgtgcccatgagactgagaaagctgcccgacagcttcttcaagccccccgagcccaagagccacagcagacaggccagcaccgacgccggcaccgccggcgccctgaccccccagcacgtgagagcccacagcagccccgccagcctgcagctgggcgccgtgagccccggcaccctgacccccaccggcgtggtgagcggccccgccgccacccccaccgcccagcacctgagacagagcagcttcgagatccccgacgacgtgcccctgcccgccggctgggagatggccaagaccagcagcggccagagatacttcctgaaccacatcgaccagaccaccacctggcaggaccccagaaaggccatgctgagccagatgaacgtgaccgcccccaccagcccccccgtgcagcagaacatgatgaacagcgccagcgccatgaaccagagaatcagccagagcgcccccgtgaagcagcccccccccctggccccccagagcccccagggcggcgtgatgggcggcagcaacagcaaccagcagcagcagatgagactgcagcagctgcagatggagaaggagagactgagactgaagcagcaggagctgctgagacaggtgagaccccaggagctggccctgagaagccagctgcccaccctggagcaggacggcggcacccagaaccccgtgagcagccccggcatgagccaggagctgagaaccatgaccaccaacagcagcgaccccttcctgaacagcggcacctaccacagcagagacgagagcaccgacagcggcctgagcatgagcagctacagcgtgcccagaacccccgacgacttcctgaacagcgtggacgagatggacaccggcgacaccatcaaccagagcaccctgcccagccagcagaacagattccccgactacctggaggccatccccggcaccaacgtggacctgggcaccctggagggcgacggcatgaacatcgagggcgaggagctgatgcccagcctgcaggaggccctgagcagcgacatcctgaacgacatggagagcgtgctggccgccaccaagctggacaaggagagcttcctgacctggctgtag

SEQ ID NO: 13643 - DNA, 1266 bp, synthetic construct
  misc_feature 1..1266: note = Description of Artificial Sequence: Synthetic coding sequence
  source 1..1266: mol_type = other DNA
atgagactgagaaagctgcccgacagcttcttcaagccccccgagcccaagagccacagcagacaggccagcaccgacgccggcaccgccggcgccctgaccccccagcacgtgagagcccacagcagccccgccagcctgcagctgggcgccgtgagccccggcaccctgacccccaccggcgtggtgagcggccccgccgccacccccaccgcccagcacctgagacagagcagcttcgagatccccgacgacgtgcccctgcccgccggctgggagatggccaagaccagcagcggccagagatacttcctgaaccacatcgaccagaccaccacctggcaggaccccagaaaggccatgctgagccagatgaacgtgaccgcccccaccagcccccccgtgcagcagaacatgatgaacagcgccagcggccccctgcccgacggctgggagcaggccatgacccaggacggcgagatctactacatcaaccacaagaacaagaccaccagctggctggaccccagactggaccccagattcggcaaggccatgaaccagagaatcagccagagcgcccccgtgaagcagcccccccccctggccccccagagcccccagggcggcgtgatgggcggcagcaacagcaaccagcagcagcagatgagactgcagcagctgcagatggagaaggagagactgagactgaagcagcaggagctgctgagacaggccatgagaaacatcaaccccagcaccgccaacagccccaagtgccaggagctggccctgagaagccagctgcccaccctggagcaggacggcggcacccagaaccccgtgagcagccccggcatgagccaggagctgagaaccatgaccaccaacagcagcgaccccttcctgaacagcggcacctaccacagcagagacgagagcaccgacagcggcctgagcatgagcagctacagcgtgcccagaacccccgacgacttcctgaacagcgtggacgagatggacaccggcgacaccatcaaccagagcaccctgcccagccagcagaacagattccccgactacctggaggccatccccggcaccaacgtggacctgggcaccctggagggcgacggcatgaacatcgagggcgaggagctgatgcccagcctgcaggaggccctgagcagcgacatcctgaacgacatggagagcgtgctggccgccaccaagctggacaaggagagcttcctgacctggctgtag

SEQ ID NO: 13644 - DNA, 981 bp, synthetic construct
  misc_feature 1..981: note = Description of Artificial Sequence: Synthetic coding sequence
  source 1..981: mol_type = other DNA
atggccaagaccagcagcggccagagatacttcctgaaccacatcgaccagaccaccacctggcaggaccccagaaaggccatgctgagccagatgaacgtgaccgcccccaccagcccccccgtgcagcagaacatgatgaacagcgccagcggccccctgcccgacggctgggagcaggccatgacccaggacggcgagatctactacatcaaccacaagaacaagaccaccagctggctggaccccagactggaccccagattcgccatgaaccagagaatcagccagagcgcccccgtgaagcagcccccccccctggccccccagagcccccagggcggcgtgatgggcggcagcaacagcaaccagcagcagcagatgagactgcagcagctgcagatggagaaggagagactgagactgaagcagcaggagctgctgagacaggccatgagaaacatcaaccccagcaccgccaacagccccaagtgccaggagctggccctgagaagccagctgcccaccctggagcaggacggcggcacccagaaccccgtgagcagccccggcatgagccaggagctgagaaccatgaccaccaacagcagcgaccccttcctgaacagcggcacctaccacagcagagacgagagcaccgacagcggcctgagcatgagcagctacagcgtgcccagaacccccgacgacttcctgaacagcgtggacgagatggacaccggcgacaccatcaaccagagcaccctgcccagccagcagaacagattccccgactacctggaggccatccccggcaccaacgtggacctgggcaccctggagggcgacggcatgaacatcgagggcgaggagctgatgcccagcctgcaggaggccctgagcagcgacatcctgaacgacatggagagcgtgctggccgccaccaagctggacaaggagagcttcctgacctggctgtag

SEQ ID NO: 13645 - DNA, 1467 bp, synthetic construct
  misc_feature 1..1467: note = Description of Artificial Sequence: Synthetic coding sequence
  source 1..1467: mol_type = other DNA
atggaccccggccagcagccccccccccagcccgccccccagggccagggccagccccccagccagcccccccagggccagggcccccccagcggccccggccagcccgcccccgccgccacccaggccgccccccaggccccccccgccggccaccagatcgtgcacgtgagaggcgacagcgagaccgacctggaggccctgttcaacgccgtgatgaaccccaagaccgccaacgtgccccagaccgtgcccatgagactgagaaagctgcccgacagcttcttcaagccccccgagcccaagagccacagcagacaggccagcaccgacgccggcaccgccggcgccctgaccccccagcacgtgagagcccacagcagccccgccagcctgcagctgggcgccgtgagccccggcaccctgacccccaccggcgtggtgagcggccccgccgccacccccaccgcccagcacctgagacagagcagcttcgagatccccgacgacgtgcccctgcccgccggctgggagatggccaagaccagcagcggccagagatacttcctgaaccacatcgaccagaccaccacctggcaggaccccagaaaggccatgctgagccagatgaacgtgaccgcccccaccagcccccccgtgcagcagaacatgatgaacagcgccagcggccccctgcccgacggctgggagcaggccatgacccaggacggcgagatctactacatcaaccacaagaacaagaccaccagctggctggaccccagactggaccccagattcgccatgaaccagagaatcagccagagcgcccccgtgaagcagcccccccccctggccccccagagcccccagggcggcgtgatgggcggcagcaacagcaaccagcagcagcagatgagactgcagcagctgcagatggagaaggagagactgagactgaagcagcaggagctgctgagacaggagctggccctgagaagccagctgcccaccctggagcaggacggcggcacccagaaccccgtgagcagccccggcatgagccaggagctgagaaccatgaccaccaacagcagcgaccccttcctgaacagcggcacctaccacagcagagacgagagcaccgacagcggcctgagcatgagcagctacagcgtgcccagaacccccgacgacttcctgaacagcgtggacgagatggacaccggcgacaccatcaaccagagcaccctgcccagccagcagaacagattccccgactacctggaggccatccccggcaccaacgtggacctgggcaccctggagggcgacggcatgaacatcgagggcgaggagctgatgcccagcctgcaggaggccctgagcagcgacatcctgaacgacatggagagcgtgctggccgccaccaagctggacaaggagagcttcctgacctggctgtag

SEQ ID NO: 13646 - DNA, 1479 bp, synthetic construct
  misc_feature 1..1479: note = Description of Artificial Sequence: Synthetic coding sequence
  source 1..1479: mol_type = other DNA
atggaccccggccagcagccccccccccagcccgccccccagggccagggccagccccccagccagcccccccagggccagggcccccccagcggccccggccagcccgcccccgccgccacccaggccgccccccaggccccccccgccggccaccagatcgtgcacgtgagaggcgacagcgagaccgacctggaggccctgttcaacgccgtgatgaaccccaagaccgccaacgtgccccagaccgtgcccatgagactgagaaagctgcccgacagcttcttcaagccccccgagcccaagagccacagcagacaggccagcaccgacgccggcaccgccggcgccctgaccccccagcacgtgagagcccacagcagccccgccagcctgcagctgggcgccgtgagccccggcaccctgacccccaccggcgtggtgagcggccccgccgccacccccaccgcccagcacctgagacagagcagcttcgagatccccgacgacgtgcccctgcccgccggctgggagatggccaagaccagcagcggccagagatacttcctgaaccacatcgaccagaccaccacctggcaggaccccagaaaggccatgctgagccagatgaacgtgaccgcccccaccagcccccccgtgcagcagaacatgatgaacagcgccagcggccccctgcccgacggctgggagcaggccatgacccaggacggcgagatctactacatcaaccacaagaacaagaccaccagctggctggaccccagactggaccccagattcgccatgaaccagagaatcagccagagcgcccccgtgaagcagcccccccccctggccccccagagcccccagggcggcgtgatgggcggcagcaacagcaaccagcagcagcagatgagactgcagcagctgcagatggagaaggagagactgagactgaagcagcaggagctgctgagacaggtgagaccccaggagctggccctgagaagccagctgcccaccctggagcaggacggcggcacccagaaccccgtgagcagccccggcatgagccaggagctgagaaccatgaccaccaacagcagcgaccccttcctgaacagcggcacctaccacagcagagacgagagcaccgacagcggcctgagcatgagcagctacagcgtgcccagaacccccgacgacttcctgaacagcgtggacgagatggacaccggcgacaccatcaaccagagcaccctgcccagccagcagaacagattccccgactacctggaggccatccccggcaccaacgtggacctgggcaccctggagggcgacggcatgaacatcgagggcgaggagctgatgcccagcctgcaggaggccctgagcagcgacatcctgaacgacatggagagcgtgctggccgccaccaagctggacaaggagagcttcctgacctggctgtag

SEQ ID NO: 13647 - DNA, 1353 bp, synthetic construct
  misc_feature 1..1353: note = Description of Artificial Sequence: Synthetic coding sequence
  source 1..1353: mol_type = other DNA
atggaccccggccagcagccccccccccagcccgccccccagggccagggccagccccccagccagcccccccagggccagggcccccccagcggccccggccagcccgcccccgccgccacccaggccgccccccaggccccccccgccggccaccagatcgtgcacgtgagaggcgacagcgagaccgacctggaggccctgttcaacgccgtgatgaaccccaagaccgccaacgtgccccagaccgtgcccatgagactgagaaagctgcccgacagcttcttcaagccccccgagcccaagagccacagcagacaggccagcaccgacgccggcaccgccggcgccctgaccccccagcacgtgagagcccacagcagccccgccagcctgcagctgggcgccgtgagccccggcaccctgacccccaccggcgtggtgagcggccccgccgccacccccaccgcccagcacctgagacagagcagcttcgagatccccgacgacgtgcccctgcccgccggctgggagatggccaagaccagcagcggccagagatacttcctgaaccacatcgaccagaccaccacctggcaggaccccagaaaggccatgctgagccagatgaacgtgaccgcccccaccagcccccccgtgcagcagaacatgatgaacagcgccagcgccatgaaccagagaatcagccagagcgcccccgtgaagcagcccccccccctggccccccagagcccccagggcggcgtgatgggcggcagcaacagcaaccagcagcagcagatgagactgcagcagctgcagatggagaaggagagactgagactgaagcagcaggagctgctgagacaggagctggccctgagaagccagctgcccaccctggagcaggacggcggcacccagaaccccgtgagcagccccggcatgagccaggagctgagaaccatgaccaccaacagcagcgaccccttcctgaacagcggcacctaccacagcagagacgagagcaccgacagcggcctgagcatgagcagctacagcgtgcccagaacccccgacgacttcctgaacagcgtggacgagatggacaccggcgacaccatcaaccagagcaccctgcccagccagcagaacagattccccgactacctggaggccatccccggcaccaacgtggacctgggcaccctggagggcgacggcatgaacatcgagggcgaggagctgatgcccagcctgcaggaggccctgagcagcgacatcctgaacgacatggagagcgtgctggccgccaccaagctggacaaggagagcttcctgacctggctgtag

SEQ ID NO: 13648 - DNA, 1860 bp, synthetic construct
  misc_feature 1..1860: note = Description of Artificial Sequence: Synthetic coding sequence
  source 1..1860: mol_type = other DNA
atggccaacgacatcgacgagctgatcggcatccccttccccaaccacagcagcgaggtgctgtgcagcctgaacgagcagagacacgacggcctgctgtgcgacgtgctgctggtggtgcaggagcaggagtacagaacccacagaagcgtgctggccgcctgcagcaagtacttcaagaagctgttcaccgccggcaccctggccagccagccctacgtgtacgagatcgacttcgtgcagcccgaggccctggccgccatcctggagttcgcctacaccagcaccctgaccatcaccgccggcaacgtgaagcacatcctgaacgccgccagaatgctggagatccagtgcatcgtgaacgtgtgcctggagatcatggagcccggcggcgacggcggcgaggaggacgacaaggaggacgacgacgacgacgaggacgacgacgacgaggaggacgaggaggaggaggaggaggaggaggaggacgacgacgacgacaccgaggacttcgccgaccaggagaacctgcccgacccccaggacatcagctgccaccagagccccagcaagaccgaccacctgaccgagaaggcctacagcgacacccccagagacttccccgacagcttccaggccggcagccccggccacctgggcgtgatcagagacttcagcatcgagagcctgctgagagagaacctgtaccccaaggccaacatccccgacagaagacccagcctgagccccttcgcccccgacttcttcccccacctgtggcccggcgacttcggcgccttcgcccagctgcccgagcagcccatggacagcggccccctggacctggtgatcaagaacagaaagatcaaggaggaggagaaggaggagctgcccccccccccccccccccccttccccaacgacttcttcaaggacatgttccccgacctgcccggcggccccctgggccccatcaaggccgagaacgactacggcgcctacctgaacttcctgagcgccacccacctgggcggcctgttccccccctggcccctggtggaggagagaaagctgaagcccaaggccagccagcagtgccccatctgccacaaggtgatcatgggcgccggcaagctgcccagacacatgagaacccacaccggcgagaagccctacatgtgcaccatctgcgaggtgagattcaccagacaggacaagctgaagatccacatgagaaagcacaccggcgagagaccctacctgtgcatccactgcaacgccaagttcgtgcacaactacgacctgaagaaccacatgagaatccacaccggcgtgagaccctaccagtgcgagttctgctacaagagcttcaccagaagcgaccacctgcacagacacatcaagagacagagctgcagaatggccagacccagaagaggcagaaagcccgccgcctggagagccgccagcctgctgttcggccccggcggccccgcccccgacaaggccgccttcgtgatgccccccgccctgggcgaggtgggcggccacctgggcggcgccgccgtgtgcctgcccggccccagccccgccaagcacttcctggccgcccccaagggcgccctgagcctgcaggagctggagagacagttcgaggagacccagatgaagctgttcggcagagcccagctggaggccgagagaaacgccggcggcctgctggccttcgccctggccgagaacgtggccgccgccagaccctacttccccctgcccgacccctgggccgccggcctggccggcctgcccggcctggccggcctgaaccacgtggccagcatgagcgaggccaacaactag

SEQ ID NO: 13649 - DNA, 1860 bp, synthetic construct; identical to SEQ ID NO: 13648
  misc_feature 1..1860: note = Description of Artificial Sequence: Synthetic coding sequence
  source 1..1860: mol_type = other DNA

SEQ ID NO: 13650 - DNA, 78 bp, synthetic construct
  misc_feature 1..78: note = Description of Artificial Sequence: Synthetic coding sequence
  source 1..78: mol_type = other DNA
atggccaacgacatcgacgagctgatcggcatccccttccccaaccacagcagcgaggtgctgtgcagcctgaactag

SEQ ID NO: 13651 - DNA, 57 bp, synthetic construct
  misc_feature 1..57: note = Description of Artificial Sequence: Synthetic coding sequence
  source 1..57: mol_type = other DNA
atggccaacgacatcgacgagctgatcggcatccccttccccaaccacagcagctag

SEQ ID NO: 13652 - DNA, 3375 bp, synthetic construct
  misc_feature 1..3375: note = Description of Artificial Sequence: Synthetic coding sequence
  source 1..3375: mol_type = other DNA
atggccgacggccccagatgcaagagaagaaagcaggccaaccccagaagaaacaacgtgaccaactacaacaccgtggtggagaccaacagcgacagcgacgacgaggacaagctgcacatcgtggaggaggagagcgtgaccgacgccgccgactgcgagggcgtgcccgaggacgacctgcccaccgaccagaccgtgctgcccggcagaagcagcgagagagagggcaacgccaagaactgctgggaggacgacagaaaggagggccaggagatcctgggccccgaggcccaggccgacgaggccggctgcaccgtgaaggacgacgagtgcgagagcgacgccgagaacgagcagaaccacgaccccaacgtggaggagttcctgcagcagcaggacaccgccgtgatcttccccgaggcccccgaggaggaccagagacagggcacccccgaggccagcggccacgacgagaacggcacccccgacgccttcagccagctgctgacctgcccctactgcgacagaggctacaagagattcaccagcctgaaggagcacatcaagtacagacacgagaagaacgaggacaacttcagctgcagcctgtgcagctacaccttcgcctacagaacccagctggagagacacatgaccagccacaagagcggcagagaccagagacacgtgacccagagcggctgcaacagaaagttcaagtgcaccgagtgcggcaaggccttcaagtacaagcaccacctgaaggagcacctgagaatccacagcggcgagaagccctacgagtgccccaactgcaagaagagattcagccacagcggcagctacagcagccacatcagcagcaagaagtgcatcagcctgatccccgtgaacggcagacccagaaccggcctgaagaccagccagtgcagcagccccagcctgagcgccagccccggcagccccaccagaccccagatcagacagaagatcgagaacaagcccctgcaggagcagctgagcgtgaaccagatcaagaccgagcccgtggactacgagttcaagcccatcgtggtggccagcggcatcaactgcagcacccccctgcagaacggcgtgttcaccggcggcggccccctgcaggccaccagcagcccccagggcatggtgcaggccgtggtgctgcccaccgtgggcctggtgagccccatcagcatcaacctgagcgacatccagaacgtgctgaaggtggccgtggacggcaacgtgatcagacaggtgctggagaacaaccaggccaacctggccagcaaggagcaggagaccatcaacgccagccccatccagcagggcggccacagcgtgatcagcgccatcagcctgcccctggtggaccaggacggcaccaccaagatcatcatcaactacagcctggagcagcccagccagctgcaggtggtgccccagaacctgaagaaggagaaccccgtggccaccaacagctgcaagagcgagaagctgcccgaggacctgaccgtgaagagcgagaaggacaagagcttcgagggcggcgtgaacgacagcacctgcctgctgtgcgacgactgccccggcgacatcaacgccctgcccgagctgaagcactacgacctgaagcagcccacccagcccccccccctgcccgccgccgaggccgagaagcccgagagcagcgtgagcagcgccaccggcgacggcaacctgagccccagccagccccccctgaagaacctgctgagcctgctgaaggcctactacgccctgaacgcccagcccagcgccgaggagctgagcaagatcgccgacagcgtgaacctgcccctggacgtggtgaagaagtggttcgagaagatgcaggccggccagatcagcgtgcagagcagcgagcccagcagccccgagcccggcaaggtgaacatccccgccaagaacaacgaccagccccagagcgccaacgccaacgagccccaggacagcaccgtgaacctgcagagccccctgaagatgaccaacagccccgtgctgcccgtgggcagcaccaccaacggcagcagaagcagcacccccagccccagccccctgaacctgagcagcagcagaaacacccagggctacctgtacaccgccgagggcgcccaggaggagccccaggtggagcccctggacctgagcctgcccaagcagcagggcgagctgctggagagaagcaccatcaccagcgtgtaccagaacagcgtgtacagcgtgcaggaggagcccctgaacctgagctgcgccaagaaggagccccagaaggacagctgcgtgaccgacagcgagcccgtggtgaacgtgatcccccccagcgccaaccccatcaacatcgccatccccaccgtgaccgcccagctgcccaccatcgtggccatcgccgaccagaacagcgtgccctgcctgagagccctggccgccaacaagcagaccatcctgatcccccaggtggcctacacctacagcaccaccgtgagccccgccgtgcaggagccccccctgaaggtgatccagcccaacggcaaccaggacgagagacaggacaccagcagcgagggcgtgagcaacgtggaggaccagaacgacagcgacagcaccccccccaagaagaagatgagaaagaccgagaacggcatgtacgcctgcgacctgtgcgacaagatcttccagaagagcagcagcctgctgagacacaagtacgagcacaccggcaagagaccccacgagtgcggcatctgcaagaaggccttcaagcacaagcaccacctgatcgagcacatgagactgcacagcggcgagaagccctaccagtgcgacaagtgcggcaagagattcagccacagcggcagctacagccagcacatgaaccacagatacagctactgcaagagagaggccgaggagagagacagcaccgagcaggaggaggccggccccgagatcctgagcaacgagcacgtgggcgccagagccagccccagccagggcgacagcgacgagagagagagcctgaccagagaggaggacgaggacagcgagaaggaggaggaggaggaggacaaggagatggaggagctgcaggaggagaaggagtgcgagaagccccagggcgacgaggaggaggaggaggaggaggaggaggtggaggaggaggaggtggaggaggccgagaacgagggcgaggaggccaagaccgagggcctgatgaaggacgacagagccgagagccaggccagcagcctgggccagaaggtgggcgagagcagcgagcaggtgagcgaggagaagaccaacgaggcctag

SEQ ID NO: 13653 - DNA, 3378 bp, synthetic construct
  misc_feature 1..3378: note = Description of Artificial Sequence: Synthetic coding sequence
  source 1..3378: mol_type = other DNA
atggccgacggccccagatgcaagagaagaaagcaggccaaccccagaagaaacaacgtgaccaactacaacaccgtggtggagaccaacagcgacagcgacgacgaggacaagctgcacatcgtggaggaggagagcgtgaccgacgccgccgactgcgagggcgtgcccgaggacgacctgcccaccgaccagaccgtgctgcccggcagaagcagcgagagagagggcaacgccaagaactgctgggaggacgacaccggcaaggagggccaggagatcctgggccccgaggcccaggccgacgaggccggctgcaccgtgaaggacgacgagtgcgagagcgacgccgagaacgagcagaaccacgaccccaacgtggaggagttcctgcagcagcaggacaccgccgtgatcttccccgaggcccccgaggaggaccagagacagggcacccccgaggccagcggccacgacgagaacggcacccccgacgccttcagccagctgctgacctgcccctactgcgacagaggctacaagagattcaccagcctgaaggagcacatcaagtacagacacgagaagaacgaggacaacttcagctgcagcctgtgcagctacaccttcgcctacagaacccagctggagagacacatgaccagccacaagagcggcagagaccagagacacgtgacccagagcggctgcaacagaaagttcaagtgcaccgagtgcggcaaggccttcaagtacaagcaccacctgaaggagcacctgagaatccacagcggcgagaagccctacgagtgccccaactgcaagaagagattcagccacagcggcagctacagcagccacatcagcagcaagaagtgcatcagcctgatccccgtgaacggcagacccagaaccggcctgaagaccagccagtgcagcagccccagcctgagcgccagccccggcagccccaccagaccccagatcagacagaagatcgagaacaagcccctgcaggagcagctgagcgtgaaccagatcaagaccgagcccgtggactacgagttcaagcccatcgtggtggccagcggcatcaactgcagcacccccctgcagaacggcgtgttcaccggcggcggccccctgcaggccaccagcagcccccagggcatggtgcaggccgtggtgctgcccaccgtgggcctggtgagccccatcagcatcaacctgagcgacatccagaacgtgctgaaggtggccgtggacggcaacgtgatcagacaggtgctggagaacaaccaggccaacctggccagcaaggagcaggagaccatcaacgccagccccatccagcagggcggccacagcgtgatcagcgccatcagcctgcccctggtggaccaggacggcaccaccaagatcatcatcaactacagcctggagcagcccagccagctgcaggtggtgccccagaacctgaagaaggagaaccccgtggccaccaacagctgcaagagcgagaagctgcccgaggacctgaccgtgaagagcgagaaggacaagagcttcgagggcggcgtgaacgacagcacctgcctgctgtgcgacgactgccccggcgacatcaacgccctgcccgagctgaagcactacgacctgaagcagcccacccagcccccccccctgcccgccgccgaggccgagaagcccgagagcagcgtgagcagcgccaccggcgacggcaacctgagccccagccagccccccctgaagaacctgctgagcctgctgaaggcctactacgccctgaacgcccagcccagcgccgaggagctgagcaagatcgccgacagcgtgaacctgcccctggacgtggtgaagaagtggttcgagaagatgcaggccggccagatcagcgtgcagagcagcgagcccagcagccccgagcccggcaaggtgaacatccccgccaagaacaacgaccagccccagagcgccaacgccaacgagccccaggacagcaccgtgaacctgcagagccccctgaagatgaccaacagccccgtgctgcccgtgggcagcaccaccaacggcagcagaagcagcacccccagccccagccccctgaacctgagcagcagcagaaacacccagggctacctgtacaccgccgagggcgcccaggaggagccccaggtggagcccctggacctgagcctgcccaagcagcagggcgagctgctggagagaagcaccatcaccagcgtgtaccagaacagcgtgtacagcgtgcaggaggagcccctgaacctgagctgcgccaagaaggagccccagaaggacagctgcgtgaccgacagcgagcccgtggtgaacgtgatcccccccagcgccaaccccatcaacatcgccatccccaccgtgaccgcccagctgcccaccatcgtggccatcgccgaccagaacagcgtgccctgcctgagagccctggccgccaacaagcagaccatcctgatcccccaggtggcctacacctacagcaccaccgtgagccccgccgtgcaggagccccccctgaaggtgatccagcccaacggcaaccaggacgagagacaggacaccagcagcgagggcgtgagcaacgtggaggaccagaacgacagcgacagcaccccccccaagaagaagatgagaaagaccgagaacggcatgtacgcctgcgacctgtgcgacaagatcttccagaagagcagcagcctgctgagacacaagtacgagcacaccggcaagagaccccacgagtgcggcatctgcaagaaggccttcaagcacaagcaccacctgatcgagcacatgagactgcacagcggcgagaagccctaccagtgcgacaagtgcggcaagagattcagccacagcggcagctacagccagcacatgaaccacagatacagctactgcaagagagaggccgaggagagagacagcaccgagcaggaggaggccggccccgagatcctgagcaacgagcacgtgggcgccagagccagccccagccagggcgacagcgacgagagagagagcctgaccagagaggaggacgaggacagcgagaaggaggaggaggaggaggacaaggagatggaggagctgcaggaggagaaggagtgcgagaagccccagggcgacgaggaggaggaggaggaggaggaggaggtggaggaggaggaggtggaggaggccgagaacgagggcgaggaggccaagaccgagggcctgatgaaggacgacagagccgagagccaggccagcagcctgggccagaaggtgggcgagagcagcgagcaggtgagcgaggagaagaccaacgaggcctag

SEQ ID NO: 13654 - DNA, 870 bp, synthetic construct
  misc_feature 1..870: note = Description of Artificial Sequence: Synthetic coding sequence
  source 1..870: mol_type = other DNA
atggccgacggccccagatgcaagagaagaaagcaggccaaccccagaagaaacaacgtgaccaactacaacaccgtggtggagaccaacagcgacagcgacgacgaggacaagctgcacatcgtggaggaggagagcgtgaccgacgccgccgactgcgagggcgtgcccgaggacgacctgcccaccgaccagaccgtgctgcccggcagaagcagcgagagagagggcaacgccaagaactgctgggaggacgacaccggcaaggagggccaggagatcctgggccccgaggcccaggccgacgaggccggctgcaccgtgaaggacgacgagtgcgagagcgacgccgagaacgagcagaaccacgaccccaacgtggaggagttcctgcagcagcaggacaccgccgtgatcttccccgaggcccccgaggaggaccagagacagggcacccccgaggccagcggccacgacgagaacggcacccccgacgccttcagccagctgctgacctgcccctactgcgacagaggctacaagagattcaccagcctgaaggagcacatcaagtacagacacgagaagaacgaggacaacttcagctgcagcctgtgcagctacaccttcgcctacagaacccagctggagagacacatgaccagccacaagagcggcagagaccagagacacgtgacccagagcggctgcaacagaaagttcaagtgcaccgagtgcggcaaggccttcaagtacaagcaccacctgaaggagcacctgagaatccacagcggcgagaagccctacgagtgccccaactgcaagaagagattcagccacagcggcagctacagcagccacatcagctag

SEQ ID NO: 13655 - DNA, 2721 bp, synthetic construct
  misc_feature 1..2721: note = Description of Artificial Sequence: Synthetic coding sequence
  source 1..2721: mol_type = other DNA
atgaccagccacaagagcggcagagaccagagacacgtgacccagagcggctgcaacagaaagttcaagtgcaccgagtgcggcaaggccttcaagtacaagcaccacctgaaggagcacctgagaatccacagcggcgagaagccctacgagtgccccaactgcaagaagagattcagccacagcggcagctacagcagccacatcagcagcaagaagtgcatcagcctgatccccgtgaacggcagacccagaaccggcctgaagaccagccagtgcagcagccccagcctgagcgccagccccggcagccccaccagaccccagatcagacagaagatcgagaacaagcccctgcaggagcagctgagcgtgaaccagatcaagaccgagcccgtggactacgagttcaagcccatcgtggtggccagcggcatcaactgcagcacccccctgcagaacggcgtgttcaccggcggcggccccctgcaggccaccagcagcccccagggcatggtgcaggccgtggtgctgcccaccgtgggcctggtgagccccatcagcatcaacctgagcgacatccagaacgtgctgaaggtggccgtggacggcaacgtgatcagacaggtgctggagaacaaccaggccaacctggccagcaaggagcaggagaccatcaacgccagccccatccagcagggcggccacagcgtgatcagcgccatcagcctgcccctggtggaccaggacggcaccaccaagatcatcatcaactacagcctggagcagcccagccagctgcaggtggtgccccagaacctgaagaaggagaaccccgtggccaccaacagctgcaagagcgagaagctgcccgaggacctgaccgtgaagagcgagaaggacaagagcttcgagggcggcgtgaacgacagcacctgcctgctgtgcgacgactgccccggcgacatcaacgccctgcccgagctgaagcactacgacctgaagcagcccacccagcccccccccctgcccgccgccgaggccgagaagcccgagagcagcgtgagcagcgccaccggcgacggcaacctgagccccagccagccccccctgaagaacctgctgagcctgctgaaggcctactacgccctgaacgcccagcccagcgccgaggagctgagcaagatcgccgacagcgtgaacctgcccctggacgtggtgaagaagtggttcgagaagatgcaggccggccagatcagcgtgcagagcagcgagcccagcagccccgagcccggcaaggtgaacatccccgccaagaacaacgaccagccccagagcgccaacgccaacgagccccaggacagcaccgtgaacctgcagagccccctgaagatgaccaacagccccgtgctgcccgtgggcagcaccaccaacggcagcagaagcagcacccccagccccagccccctgaacctgagcagcagcagaaacacccagggctacctgtacaccgccgagggcgcccaggaggagccccaggtggagcccctggacctgagcctgcccaagcagcagggcgagctgctggagagaagcaccatcaccagcgtgtaccagaacagcgtgtacagcgtgcaggaggagcccctgaacctgagctgcgccaagaaggagccccagaaggacagctgcgtgaccgacagcgagcccgtggtgaacgtgatcccccccagcgccaaccccatcaacatcgccatccccaccgtgaccgcccagctgcccaccatcgtggccatcgccgaccagaacagcgtgccctgcctgagagccctggccgccaacaagcagaccatcctgatcccccaggtggcctacacctacagcaccaccgtgagccccgccgtgcaggagccccccctgaaggtgatccagcccaacggcaaccaggacgagagacaggacaccagcagcgagggcgtgagcaacgtggaggaccagaacgacagcgacagcaccccccccaagaagaagatgagaaagaccgagaacggcatgtacgcctgcgacctgtgcgacaagatcttccagaagagcagcagcctgctgagacacaagtacgagcacaccggcaagagaccccacgagtgcggcatctgcaagaaggccttcaagcacaagcaccacctgatcgagcacatgagactgcacagcggcgagaagccctaccagtgcgacaagtgcggcaagagattcagccacagcggcagctacagccagcacatgaaccacagatacagctactgcaagagagaggccgaggagagagacagcaccgagcaggaggaggccggccccgagatcctgagcaacgagcacgtgggcgccagagccagccccagccagggcgacagcgacgagagagagagcctgaccagagaggaggacgaggacagcgagaaggaggaggaggaggaggacaaggagatggaggagctgcaggaggagaaggagtgcgagaagccccagggcgacgaggaggaggaggaggaggaggaggaggtggaggaggaggaggtggaggaggccgagaacgagggcgaggaggccaagaccgagggcctgatgaaggacgacagagccgagagccaggccagcagcctgggccagaaggtgggcgagagcagcgagcaggtgagcgaggagaagaccaacgaggcctag

SEQ ID NO: 13656 - DNA, 3327 bp, synthetic construct
  misc_feature 1..3327: note = Description of Artificial Sequence: Synthetic coding sequence
  source 1..3327: mol_type = other DNA
atgaaggtgaccaactacaacaccgtggtggagaccaacagcgacagcgacgacgaggacaagctgcacatcgtggaggaggagagcgtgaccgacgccgccgactgcgagggcgtgcccgaggacgacctgcccaccgaccagaccgtgctgcccggcagaagcagcgagagagagggcaacgccaagaactgctgggaggacgacaccggcaaggagggccaggagatcctgggccccgaggcccaggccgacgaggccggctgcaccgtgaaggacgacgagtgcgagagcgacgccgagaacgagcagaaccacgaccccaacgtggaggagttcctgcagcagcaggacaccgccgtgatcttccccgaggcccccgaggaggaccagagacagggcacccccgaggccagcggccacgacgagaacggcacccccgacgccttcagccagctgctgacctgcccctactgcgacagaggctacaagagattcaccagcctgaaggagcacatcaagtacagacacgagaagaacgaggacaacttcagctgcagcctgtgcagctacaccttcgcctacagaacccagctggagagacacatgaccagccacaagagcggcagagaccagagacacgtgacccagagcggctgcaacagaaagttcaagtgcaccgagtgcggcaaggccttcaagtacaagcaccacctgaaggagcacctgagaatccacagcggcgagaagccctacgagtgccccaactgcaagaagagattcagccacagcggcagctacagcagccacatcagcagcaagaagtgcatcagcctgatccccgtgaacggcagacccagaaccggcctgaagaccagccagtgcagcagccccagcctgagcgccagccccggcagccccaccagaccccagatcagacagaagatcgagaacaagcccctgcaggagcagctgagcgtgaaccagatcaagaccgagcccgtggactacgagttcaagcccatcgtggtggccagcggcatcaactgcagcacccccctgcagaacggcgtgttcaccggcggcggccccctgcaggccaccagcagcccccagggcatggtgcaggccgtggtgctgcccaccgtgggcctggtgagccccatcagcatcaacctgagcgacatccagaacgtgctgaaggtggccgtggacggcaacgtgatcagacaggtgctggagaacaaccaggccaacctggccagcaaggagcaggagaccatcaacgccagccccatccagcagggcggccacagcgtgatcagcgccatcagcctgcccctggtggaccaggacggcaccaccaagatcatcatcaactacagcctggagcagcccagccagctgcaggtggtgccccagaacctgaagaaggagaaccccgtggccaccaacagctgcaagagcgagaagctgcccgaggacctgaccgtgaagagcgagaaggacaagagcttcgagggcggcgtgaacgacagcacctgcctgctgtgcgacgactgccccggcgacatcaacgccctgcccgagctgaagcactacgacctgaagcagcccacccagcccccccccctgcccgccgccgaggccgagaagcccgagagcagcgtgagcagcgccaccggcgacggcaacctgagccccagccagccccccctgaagaacctgctgagcctgctgaaggcctactacgccctgaacgcccagcccagcgccgaggagctgagcaagatcgccgacagcgtgaacctgcccctggacgtggtgaagaagtggttcgagaagatgcaggccggccagatcagcgtgcagagcagcgagcccagcagccccgagcccggcaaggtgaacatccccgccaagaacaacgaccagccccagagcgccaacgccaacgagccccaggacagcaccgtgaacctgcagagccccctgaagatgaccaacagccccgtgctgcccgtgggcagcaccaccaacggcagcagaagcagcacccccagccccagccccctgaacctgagcagcagcagaaacacccagggctacctgtacaccgccgagggcgcccaggaggagccccaggtggagcccctggacctgagcctgcccaagcagcagggcgagctgctggagagaagcaccatcaccagcgtgtaccagaacagcgtgtacagcgtgcaggaggagcccctgaacctgagctgcgccaagaaggagccccagaaggacagctgcgtgaccgacagcgagcccgtggtgaacgtgatcccccccagcgccaaccccatcaacatcgccatccccaccgtgaccgcccagctgcccaccatcgtggccatcgccgaccagaacagcgtgccctgcctgagagccctggccgccaacaagcagaccatcctgatcccccaggtggcctacacctacagcaccaccgtgagccccgccgtgcaggagccccccctgaaggtgatccagcccaacggcaaccaggacgagagacaggacaccagcagcgagggcgtgagcaacgtggaggaccagaacgacagcgacagcaccccccccaagaagaagatgagaaagaccgagaacggcatgtacgcctgcgacctgtgcgacaagatcttccagaagagcagcagcctgctgagacacaagtacgagcacaccggcaagagaccccacgagtgcggcatctgcaagaaggccttcaagcacaagcaccacctgatcgagcacatgagactgcacagcggcgagaagccctaccagtgcgacaagtgcggcaagagattcagccacagcggcagctacagccagcacatgaaccacagatacagctactgcaagagagaggccgaggagagagacagcaccgagcaggaggaggccggccccgagatcctgagcaacgagcacgtgggcgccagagccagccccagccagggcgacagcgacgagagagagagcctgaccagagaggaggacgaggacagcgagaaggaggaggaggaggaggacaaggagatggaggagctgcaggaggagaaggagtgcgagaagccccagggcgacgaggaggaggaggaggaggaggaggaggtggaggaggaggaggtggaggaggccgagaacgagggcgaggaggccaagaccgagggcctgatgaaggacgacagagccgagagccaggccagcagcctgggccagaaggtgggcgagagcagcgagcaggtgagcgaggagaagaccaacgaggcctag

SEQ ID NO: 13657 - DNA, 3180 bp, synthetic construct
  misc_feature 1..3180: note = Description of Artificial Sequence: Synthetic coding sequence
  source 1..3180: mol_type = other DNA
atggccgacggccccagatgcaagagaagaaagcaggccaaccccagaagaaacaacgtgaccaactacaacaccgtggtggagaccaacagcgacagcgacgacgaggacaagctgcacatcgtggaggaggagagcgtgaccgacgccgccgactgcgagggcgtgcccgaggacgacctgcccaccgaccagaccgtgctgcccggcagaagcagcgagagagagggcaacgccaagaactgctgggaggacgacagaaaggagggccaggagatcctgggccccgaggcccaggccgacgaggccggctgcaccgtgaaggacgacgagtgcgagagcgacgccgagaacgagcagaaccacgaccccaacgtggaggagttcctgcagcagcaggacaccgccgtgatcttccccgaggcccccgaggaggaccagagacagggcacccccgaggccagcggccacgacgagaacggcacccccgacgccttcagccagctgctgacctgcccctactgcgacagaggctacaagagattcaccagcctgaaggagcacatcaagtacagacacgagaagaacgaggacaacttcagctgcagcctgtgcagctacaccttcgcctacagaacccagctggagagacacatgaccagccacaagagcggcagagaccagagacacgtgacccagagcggctgcaacagaaagttcaagtgcaccgagtgcggcaaggccttcaagtacaagcaccacctgaaggagcacctgagaatccacagcggcgagaagccctacgagtgccccaactgcaagaagagattcagccacagcggcagctacagcagccacatcagcagcaagaagtgcatcagcctgatccccgtgaacggcagacccagaaccggcctgaagaccagccagtgcagcagccccagcctgagcgccagccccggcagccccaccagaccccagatcagacagaagatcgagaacaagcccctgcaggagcagctgagcgtgaaccagatcaagaccgagcccgtggactacgagttcaagcccatcgtggtggccagcggcatcaactgcagcacccccctgcagaacggcgtgttcaccggcggcggccccctgcaggccaccagcagcccccagggcatggtgcaggccgtggtgctgcccaccgtgggcctggtgagccccatcagcatcaacctgagcgacatccagaacgtgctgaaggtggccgtggacggcaacgtgatcagacaggtgctggagaacaaccaggccaacctggccagcaaggagcaggagaccatcaacgccagccccatccagcagggcggccacagcgtgatcagcgccatcagcctgcccctggtggaccaggacggcaccaccaagatcatcatcaactacagcctggagcagcccagccagctgcaggtggtgccccagaacctgaagaaggagaaccccgtggccaccaacagctgcaagagcgagaagctgcccgaggacctgaccgtgaagagcgagaaggacaagagcttcgagggcggcgtgaacgacagcacctgcctgctgtgcgacgactgccccggcgacatcaacgccctgcccgagctgaagcactacgacctgaagcagcccacccagcccccccccctgcccgccgccgaggccgagaagcccgagagcagcgtgagcagcgccaccggcgacggcaacctgagccccagccagccccccctgaagaacctgctgagcctgctgaaggcctactacgccctgaacgcccagcccagcgccgaggagctgagcaagatcgccgacagcgtgaacctgcccctggacgtggtgaagaagtggttcgagaagatgcaggccggccagatcagcgtgcagagcagcgagcccagcagccccgagcccggcaaggtgaacatccccgccaagaacaacgaccagccccagagcgccaacgccaacgagccccaggacagcaccgtgaacctgcagagccccctgaagatgaccaacagccccgtgctgcccgtgggcagcaccaccaacggcagcagaagcagcacccccagccccagccccctgaacctgagcagcagcagaaacacccagggctacctgtacaccgccgagggcgcccaggaggagccccaggtggagcccctggacctgagcctgcccaagcagcagggcgagctgctggagagaagcaccatcaccagcgtgtaccagaacagcgtgtacagcgtgcaggaggagcccctgaacctgagctgcgccaagaaggagccccagaaggacagctgcgtgaccgacagcgagcccgtggtgaacgtgatcccccccagcgccaaccccatcaacatcgccatccccaccgtgaccgcccagctgcccaccatcgtggccatcgccgaccagaacagcgtgccctgcctgagagccctggccgccaacaagcagaccatcctgatcccccaggtggcctacacctacagcaccaccgtgagccccgccgtgcaggagccccccctgaaggtgatccagcccaacggcaaccaggacgagagacaggacaccagcagcgagggcgtgagcaacgtggaggaccagaacgacagcgacagcaccccccccaagaagaagatgagaaagaccgagaacggcatgtacgcctgcgacctgtgcgacaagatcttccagaagagcagcagcctgctgagacacaagtacgagcacaccggcaagagaccccacgagtgcggcatctgcaagaaggccttcaagcacaagcaccacctgatcgagcacatgagactgcacagcggcgagaagccctaccagtgcgacaagtgcggcaagagattcagccacagcggcagctacagccagcacatgaaccacagatacagctactgcaagagagaggccgaggagagagacagcaccgagcaggaggaggccggccccgagatcctgagcaacgagcacgtgggcgccagagccagccccagccagggcgacagcgacgagagagagagcctgaccagagaggaggacgaggacagcgagaaggaggaggaggaggaggacaaggagatggaggagctgcaggaggagaagcacaagaagaagaagtag

SEQ ID NO: 13658 - DNA, 1932 bp, synthetic construct
  misc_feature 1..1932: note = Description of Artificial Sequence: Synthetic coding sequence
  source 1..1932: mol_type = other DNA
atggccgacggccccagatgcaagagaagaaagcaggccaaccccagaagaaacaacggcacccccgacgccttcagccagctgctgacctgcccctactgcgacagaggctacaagagattcaccagcctgaaggagcacatcaagtacagacacgagaagaacgaggacaacttcagctgcagcctgtgcagctacaccttcgcctacagaacccagctggagagacacatgaccagccacaagagcggcagagaccagagacacgtgacccagagcggctgcaacagaaagttcaagtgcaccgagtgcggcaaggccttcaagtacaagcaccacctgaaggagcacctgagaatccacagcggcgagaagccctacgagtgccccaactgcaagaagagattcagccacagcggcagctacagcagccacatcagcagcaagaagtgcatcagcctgatccccgtgaacggcagacccagaaccggcctgaagaccagccagtgcagcagccccagcctgagcgccagccccggcagccccaccagaccccagatcagacagaagatcgagaacaagcccctgcaggagcagctgagcgtgaaccagatcaagaccgagcccgtggactacgagttcaagcccatcgtggtggccagcggcatcaactgcagcacccccctgcagaacggcgtgttcaccggcggcggccccctgcaggccaccagcagcccccagggcatggtgcaggccgtggtgctgcccaccgtgggcctggtgagccccatcagcatcaacctgagcgacatccagaacgtgctgaaggtggccgtggacggcaacgtgatcagacaggtgctggagaacaaccaggccaacctggccagcaaggagcaggagaccatcaacgccagccccatccagcagggcggccacagcgtgatcagcgccatcagcctgcccctggtggaccaggacggcaccaccaagatcatcatcaactacagcctggagcagcccagccagctgcaggtggtgccccagaacctgaagaaggagaaccccgtggccaccaacagctgcaagagcgagaagctgcccgaggacctgaccgtgaagagcgagaaggacaagagcttcgagggcggcgtgaacgacagcacctgcctgctgtgcgacgactgccccggcgacatcaacgccctgcccgagctgaagcactacgacctgaagcagcccacccagcccccccccctgcccgccgccgaggccgagaagcccgagagcagcgtgagcagcgccaccggcgacggcaacctgagccccagccagccccccctgaagaacctgctgagcctgctgaaggcctactacgccctgaacgcccagcccagcgccgaggagctgagcaagatcgccgacagcgtgaacctgcccctggacgtggtgaagaagtggttcgagaagatgcaggccggccagatcagcgtgcagagcagcgagcccagcagccccgagcccggcaaggtgaacatccccgccaagaacaacgaccagccccagagcgccaacgccaacgagccccaggacagcaccgtgaacctgcagagccccctgaagatgaccaacagccccgtgctgcccgtgggcagcaccaccaacggcagcagaagcagcacccccagccccagccccctgaacctgagcagcagcagaaacacccagggctacctgtacaccgccgagggcgcccaggaggagccccaggtggagcccctggacctgagcctgcccaagcagcagggcgaggaggccaagaccgagggcctgatgaaggacgacagagccgagagccaggccagcagcctgggccagaaggtgggcgagagcagcgagcaggtgagcgaggagaagaccaacgaggcctag

SEQ ID NO: 13659 - DNA, 3174 bp, synthetic construct
  misc_feature 1..3174: note = Description of Artificial Sequence: Synthetic coding sequence
  source 1..3174: mol_type = other DNA
atggccgacggccccagatgcaagagaagaaagcaggccaaccccagaagaaacaacggcaaggagggccaggagatcctgggccccgaggcccaggccgacgaggccggctgcaccgtgaaggacgacgagtgcgagagcgacgccgagaacgagcagaaccacgaccccaacgtggaggagttcctgcagcagcaggacaccgccgtgatcttccccgaggcccccgaggaggaccagagacagggcacccccgaggccagcggccacgacgagaacggcacccccgacgccttcagccagctgctgacctgcccctactgcgacagaggctacaagagattcaccagcctgaaggagcacatcaagtacagacacgagaagaacgaggacaacttcagctgcagcctgtgcagctacaccttcgcctacagaacccagctggagagacacatgaccagccacaagagcggcagagaccagagacacgtgacccagagcggctgcaacagaaagttcaagtgcaccgagtgcggcaaggccttcaagtacaagcaccacctgaaggagcacctgagaatccacagcggcgagaagccctacgagtgccccaactgcaagaagagattcagccacagcggcagctacagcagccacatcagcagcaagaagtgcatcagcctgatccccgtgaacggcagacccagaaccggcctgaagaccagccagtgcagcagccccagcctgagcgccagccccggcagccccaccagaccccagatcagacagaagatcgagaacaagcccctgcaggagcagctgagcgtgaaccagatcaagaccgagcccgtggactacgagttcaagcccatcgtggtggccagcggcatcaactgcagcacccccctgcagaacggcgtgttcaccggcggcggccccctgcaggccaccagcagcccccagggcatggtgcaggccgtggtgctgcccaccgtgggcctggtgagccccatcagcatcaacctgagcgacatccagaacgtgctgaaggtggccgtggacggcaacgtgatcagacaggtgctggagaacaaccaggccaacctggccagcaaggagcaggagaccatcaacgccagccccatccagcagggcggccacagcgtgatcagcgccatcagcctgcccctggtggaccaggacggcaccaccaagatcatcatcaactacagcctggagcagcccagccagctgcaggtggtgccccagaacctgaagaaggagaaccccgtggccaccaacagctgcaagagcgagaagctgcccgaggacctgaccgtgaagagcgagaaggacaagagcttcgagggcggcgtgaacgacagcacctgcctgctgtgcgacgactgccccggcgacatcaacgccctgcccgagctgaagcactacgacctgaagcagcccacccagcccccccccctgcccgccgccgaggccgagaagcccgagagcagcgtgagcagcgccaccggcgacggcaacctgagccccagccagccccccctgaagaacctgctgagcctgctgaaggcctactacgccctgaacgcccagcccagcgccgaggagctgagcaagatcgccgacagcgtgaacctgcccctggacgtggtgaagaagtggttcgagaagatgcaggccggccagatcagcgtgcagagcagcgagcccagcagccccgagcccggcaaggtgaacatccccgccaagaacaacgaccagccccagagcgccaacgccaacgagccccaggacagcaccgtgaacctgcagagccccctgaagatgaccaacagccccgtgctgcccgtgggcagcaccaccaacggcagcagaagcagcacccccagccccagccccctgaacctgagcagcagcagaaacacccagggctacctgtacaccgccgagggcgcccaggaggagccccaggtggagcccctggacctgagcctgcccaagcagcagggcgagctgctggagagaagcaccatcaccagcgtgtaccagaacagcgtgtacagcgtgcaggaggagcccctgaacctgagctgcgccaagaaggagccccagaaggacagctgcgtgaccgacagcgagcccgtggtgaacgtgatcccccccagcgccaaccccatcaacatcgccatccccaccgtgaccgcccagctgcccaccatcgtggccatcgccgaccagaacagcgtgccctgcctgagagccctggccgccaacaagcagaccatcctgatcccccaggtggcctacacctacagcaccaccgtgagccccgccgtgcaggagccccccctgaaggtgatccagcccaacggcaaccaggacgagagacaggacaccagcagcgagggcgtgagcaacgtggaggaccagaacgacagcgacagcaccccccccaagaagaagatgagaaagaccgagaacggcatgtacgcctgcgacctgtgcgacaagatcttccagaagagcagcagcctgctgagacacaagtacgagcacaccggcaagagaccccacgagtgcggcatctgcaagaaggccttcaagcacaagcaccacctgatcgagcacatgagactgcacagcggcgagaagccctaccagtgcgacaagtgcggcaagagattcagccacagcggcagctacagccagcacatgaaccacagatacagctactgcaagagagaggccgaggagagagacagcaccgagcaggaggaggccggccccgagatcctgagcaacgagcacgtgggcgccagagccagccccagccagggcgacagcgacgagagagagagcctgaccagagaggaggacgaggacagcgagaaggaggaggaggaggaggacaaggagatggaggagctgcaggaggagaaggagtgcgagaagccccagggcgacgaggaggaggaggaggaggaggaggaggtggaggaggaggaggtggaggaggccgagaacgagggcgaggaggccaagaccgagggcctgatgaaggacgacagagccgagagccaggccagcagcctgggccagaaggtgggcgagagcagcgagcaggtgagcgaggagaagaccaacgaggcctag

SEQ ID NO: 13660 - DNA, 3048 bp, synthetic construct
  misc_feature 1..3048: note = Description of Artificial Sequence: Synthetic coding sequence
  source 1..3048: mol_type = other DNA
atgatgaacgccagccagatgcagaagatgagcaagaccatgatcctgatgctgaagagcttctacaacaacaagaccctgctgagcttcttcctgagacacctgaagagaaccagaggcagagcccaccagaagcccgtggtgatgatgaagatggagcaccagatgcacttccacaactacagccccgtgcacatcgtgatcggctacaagagattcaccagcctgaaggagcacatcaagtacagacacgagaagaacgaggacaacttcagctgcagcctgtgcagctacaccttcgcctacagaacccagctggagagacacatgaccagccacaagagcggcagagaccagagacacgtgacccagagcggctgcaacagaaagttcaagtgcaccgagtgcggcaaggccttcaagtacaagcaccacctgaaggagcacctgagaatccacagcggcgagaagccctacgagtgccccaactgcaagaagagattcagccacagcggcagctacagcagccacatcagcagcaagaagtgcatcagcctgatccccgtgaacggcagacccagaaccggcctgaagaccagccagtgcagcagccccagcctgagcgccagccccggcagccccaccagaccccagatcagacagaagatcgagaacaagcccctgcaggagcagctgagcgtgaaccagatcaagaccgagcccgtggactacgagttcaagcccatcgtggtggccagcggcatcaactgcagcacccccctgcagaacggcgtgttcaccggcggcggccccctgcaggccaccagcagcccccagggcatggtgcaggccgtggtgctgcccaccgtgggcctggtgagccccatcagcatcaacctgagcgacatccagaacgtgctgaaggtggccgtggacggcaacgtgatcagacaggtgctggagaacaaccaggccaacctggccagcaaggagcaggagaccatcaacgccagccccatccagcagggcggccacagcgtgatcagcgccatcagcctgcccctggtggaccaggacggcaccaccaagatcatcatcaactacagcctggagcagcccagccagctgcaggtggtgccccagaacctgaagaaggagaaccccgtggccaccaacagctgcaagagcgagaagctgcccgaggacctgaccgtgaagagcgagaaggacaagagcttcgagggcggcgtgaacgacagcacctgcctgctgtgcgacgactgccccggcgacatcaacgccctgcccgagctgaagcactacgacctgaagcagcccacccagcccccccccctgcccgccgccgaggccgagaagcccgagagcagcgtgagcagcgccaccggcgacggcaacctgagccccagccagccccccctgaagaacctgctgagcctgctgaaggcctactacgccctgaacgcccagcccagcgccgaggagctgagcaagatcgccgacagcgtgaacctgcccctggacgtggtgaagaagtggttcgagaagatgcaggccggccagatcagcgtgcagagcagcgagcccagcagccccgagcccggcaaggtgaacatccccgccaagaacaacgaccagccccagagcgccaacgccaacgagccccaggacagcaccgtgaacctgcagagccccctgaagatgaccaacagccccgtgctgcccgtgggcagcaccaccaacggcagcagaagcagcacccccagccccagccccctgaacctgagcagcagcagaaacacccagggctacctgtacaccgccgagggcgcccaggaggagccccaggtggagcccctggacctgagcctgcccaagcagcagggcgagctgctggagagaagcaccatcaccagcgtgtaccagaacagcgtgtacagcgtgcaggaggagcccctgaacctgagctgcgccaagaaggagccccagaaggacagctgcgtgaccgacagcgagcccgtggtgaacgtgatcccccccagcgccaaccccatcaacatcgccatccccaccgtgaccgcccagctgcccaccatcgtggccatcgccgaccagaacagcgtgccctgcctgagagccctggccgccaacaagcagaccatcctgatcccccaggtggcctacacctacagcaccaccgtgagccccgccgtgcaggagccccccctgaaggtgatccagcccaacggcaaccaggacgagagacaggacaccagcagcgagggcgtgagcaacgtggaggaccagaacgacagcgacagcaccccccccaagaagaagatgagaaagaccgagaacggcatgtacgcctgcgacctgtgcgacaagatcttccagaagagcagcagcctgctgagacacaagtacgagcacaccggcaagagaccccacgagtgcggcatctgcaagaaggccttcaagcacaagcaccacctgatcgagcacatgagactgcacagcggcgagaagccctaccagtgcgacaagtgcggcaagagattcagccacagcggcagctacagccagcacatgaaccacagatacagctactgcaagagagaggccgaggagagagacagcaccgagcaggaggaggccggccccgagatcctgagcaacgagcacgtgggcgccagagccagccccagccagggcgacagcgacgagagagagagcctgaccagagaggaggacgaggacagcgagaaggaggaggaggaggaggacaaggagatggaggagctgcaggaggagaaggagtgcgagaagccccagggcgacgaggaggaggaggaggaggaggaggaggtggaggaggaggaggtggaggaggccgagaacgagggcgaggaggccaagaccgagggcctgatgaaggacgacagagccgagagccaggccagcagcctgggccagaaggtgggcgagagcagcgagcaggtgagcgaggagaagaccaacgaggcctag

SEQ ID NO: 13661 - DNA, 3360 bp, synthetic construct
  misc_feature 1..3360: note = Description of Artificial Sequence: Synthetic coding sequence
  source 1..3360: mol_type = other DNA
atggccgacggccccagatgcaagagaagaaagcaggccaaccccagaagaaacaacgtgaccaactacaacaccgtggtggagaccaacagcgacagcgacgacgaggacaagctgcacatcgtggaggaggagagcgtgaccgacgccgccgactgcgagggcgtgcccgaggacgacctgcccaccgaccagaccgtgctgcccggcagaagcagcgagagagagggcaacgccaagaactgctgggaggacgacagaaaggagggccaggagatcctgggccccgaggcccaggccgacgaggccggctgcaccgtgaaggacgacgagtgcgagagcgacgccgagaacgagcagaaccacgaccccaacgtggaggagttcctgcagcagcaggacaccgccgtgatcttccccgaggcccccgaggaggaccagagacagggcacccccgaggccagcggccacgacgagaacggcacccccgacgccttcagccagctgctgacctgcccctactgcgacagaggctacaagagattcaccagcctgaaggagcacatcaagtacagacacgagaagaacgaggacaacttcagctgcagcctgtgcagctacaccttcgcctacagaacccagctggagagacacatgaccagccacaagagcggcagagaccagagacacgtgacccagagcggctgcaacagaaagttcaagtgcaccgagtgcggcaaggccttcaagtacaagcaccacctgaaggagcacctgagaatccacagcggcgagaagccctacgagtgccccaactgcaagaagagattcagccacagcggcagctacagcagccacatcagcagcaagaagtgcatcagcctgatccccgtgaacggcagacccagaaccggcctgaagaccagccagtgcagcagccccagcctgagcgccagccccggcagccccaccagaccccagatcagacagaagatcgagaacaagcccctgcaggagcagctgagcgtgaaccagatcaagaccgagcccgtggactacgagttcaagcccatcgtggtggccagcggcatcaactgcagcacccccctgcagaacggcgtgttcaccggcggcggccccctgcaggccaccagcagcccccagggcatggtgcaggccgtggtgctgcccaccgtgggcctggtgagccccatcagcatcaacctgagcgacatccagaacgtgctgaaggtggccgtggacggcaacgtgatcagacaggtgctggagaacaaccaggccaacctggccagcaaggagcaggagaccatcaacgccagccccatccagcagggcggccacagcgtgatcagcgccatcagcctgcccctggtggaccaggacggcaccaccaagatcatcatcaactacagcctggagcagcccagccagctgcaggtggtgccccagaacctgaagaaggagaaccccgtggccaccaacagctgcaagagcgagaagctgcccgaggacctgaccgtgaagagcgagaaggacaagagcttcgagggcggcgtgaacgacagcacctgcctgctgtgcgacgactgccccggcgacatcaacgccctgcccgagctgaagcactacgacctgaagcagcccacccagcccccccccctgcccgccgccgaggccgagaagcccgagagcagcgtgagcagcgccaccggcgacggcaacctgagccccagccagccccccctgaagaacctgctgagcctgctgaaggcctactacgccctgaacgcccagcccagcgccgaggagctgagcaagatcgccgacagcgtgaacctgcccctggacgtggtgaagaagtggttcgagaagatgcaggccggccagatcagcgtgcagagcagcgagcccagcagccccgagcccggcaaggtgaacatccccgccaagaacaacgaccagccccagagcgccaacgccaacgagccccaggacagcaccgtgaacctgcagagccccctgaagatgaccaacagccccgtgctgcccgtgggcagcaccaccaacggcagcagaagcagcacccccagccccagccccctgaacctgagcagcagcagaaacacccagggctacctgtacaccgccgagggcgcccaggaggagccccaggtggagcccctggacctgagcctgcccaagcagcagggcgagctgctggagagaagcagcctgcccgagcagtgcctgttctgccccggcagaaccctggagctggtgctgaagaaggagccccagaaggacagctgcgtgaccgacagcgagcccgtggtgaacgtgatcccccccagcgccaaccccatcaacatcgccatccccaccgtgaccgcccagctgcccaccatcgtggccatcgccgaccagaacagcgtgccctgcctgagagccctggccgccaacaagcagaccatcctgatcccccaggtggcctacacctacagcaccaccgtgagccccgccgtgcaggagccccccctgaaggtgatccagcccaacggcaaccaggacgagagacaggacaccagcagcgagggcgtgagcaacgtggaggaccagaacgacagcgacagcaccccccccaagaagaagatgagaaagaccgagaacggcatgtacgcctgcgacctgtgcgacaagatcttccagaagagcagcagcctgctgagacacaagtacgagcacaccggcaagagaccccacgagtgcggcatctgcaagaaggccttcaagcacaagcaccacctgatcgagcacatgagactgcacagcggcgagaagccctaccagtgcgacaagtgcggcaagagattcagccacagcggcagctacagccagcacatgaaccacagatacagctactgcaagagagaggccgaggagagagacagcaccgagcaggaggaggccggccccgagatcctgagcaacgagcacgtgggcgccagagccagccccagccagggcgacagcgacgagagagagagcctgaccagagaggaggacgaggacagcgagaaggaggaggaggaggaggacaaggagatggaggagctgcaggaggagaaggagtgcgagaagccccagggcgacgaggaggaggaggaggaggaggaggaggtggaggaggaggaggtggaggaggccgagaacgagggcgaggaggccaagaccgagggcctgatgaaggacgacagagccgagagccaggccagcagcctgggccagaaggtgggcgagagcagcgagcaggtgagcgaggagaagaccaacgaggcctag

SEQ ID NO: 13662 - DNA, 834 bp, synthetic construct
  misc_feature 1..834: note = Description of Artificial Sequence: Synthetic coding sequence
  source 1..834: mol_type = other DNA
atgaaggtgaccaactacaacaccgtggtggagaccaacagcgacagcgacgacgaggacaagctgcacatcgtggaggaggagagcgtgaccgacgccgccgactgcgagggcgtgcccgaggacgacctgcccaccgaccagaccgtgctgcccggcagaagcagcgagagagagggcaacgccaagaactgctgggaggacgacaccggcaaggagggccaggagatcctgggccccgaggcccaggccgacgaggccggctgcaccgtgaaggacgacgagtgcgagagcgacgccgagaacgagcagaaccacgaccccaacgtggaggagttcctgcagcagcaggacaccgccgtgatcttccccgaggcccccgaggaggaccagagacagggcacccccgaggccagcggccacgacgagaacggcacccccgacgccttcagccagctgctgacctgcccctactgcgacagaggctacaagagattcaccagcctgaaggagcacatcaagtacagacacgagaagaacgaggacaacttcagctgcagcctgtgcagctacaccttcgcctacagaacccagctggagagacacatgaccagccacaagagcggcagagaccagagacacgtgacccagagcggctgcaacagaaagttcaagtgcaccgagtgcggcaaggccttcaagtacaagcaccacctgaaggagcacctgagaatccacagcggcgagaagccctacgagtgccccaactgcaagaagagattcagccacagcggcagctacagcagccacatcagcagcaagaagtgcatctag

SEQ ID NO: 13663 - DNA, 3315 bp, synthetic construct
  misc_feature 1..3315: note = Description of Artificial Sequence: Synthetic coding sequence
  source 1..3315: mol_type = other DNA
atggccgacggccccagatgcaagagaagaaagcaggccaaccccagaagaaacaacgtgaccaactacaacaccgtggtggagaccaacagcgacagcgacgacgaggacaagctgcacatcgtggaggaggagagcgtgaccgacgccgccgactgcgagggcgtgcccgaggacgacctgcccaccgaccagaccgtgctgcccggcagaagcagcgagagagagggcaacgccaagaactgctgggaggacgacatcaaggacgacgagtgcgagagcgacgccgagaacgagcagaaccacgaccccaacgtggaggagttcctgcagcagcaggacaccgccgtgatcttccccgaggcccccgaggaggaccagagacagggcacccccgaggccagcggccacgacgagaacggcacccccgacgccttcagccagctgctgacctgcccctactgcgacagaggctacaagagattcaccagcctgaaggagcacatcaagtacagacacgagaagaacgaggacaacttcagctgcagcctgtgcagctacaccttcgcctacagaacccagctggagagacacatgaccagccacaagagcggcagagaccagagacacgtgacccagagcggctgcaacagaaagttcaagtgcaccgagtgcggcaaggccttcaagtacaagcaccacctgaaggagcacctgagaatccacagcggcgagaagccctacgagtgccccaactgcaagaagagattcagccacagcggcagctacagcagccacatcagcagcaagaagtgcatcagcctgatccccgtgaacggcagacccagaaccggcctgaagaccagccagtgcagcagccccagcctgagcgccagccccggcagccccaccagaccccagatcagacagaagatcgagaacaagcccctgcaggagcagctgagcgtgaaccagatcaagaccgagcccgtggactacgagttcaagcccatcgtggtggccagcggcatcaactgcagcacccccctgcagaacggcgtgttcaccggcggcggccccctgcaggccaccagcagcccccagggcatggtgcaggccgtggtgctgcccaccgtgggcctggtgagccccatcagcatcaacctgagcgacatccagaacgtgctgaaggtggccgtggacggcaacgtgatcagacaggtgctggagaacaaccaggccaacctggccagcaaggagcaggagaccatcaacgccagccccatccagcagggcggccacagcgtgatcagcgccatcagcctgcccctggtggaccaggacggcaccaccaagatcatcatcaactacagcctggagcagcccagccagctgcaggtggtgccccagaacctgaagaaggagaaccccgtggccaccaacagctgcaagagcgagaagctgcccgaggacctgaccgtgaagagcgagaaggacaagagcttcgagggcggcgtgaacgacagcacctgcctgctgtgcgacgactgccccggcgacatcaacgccctgcccgagctgaagcactacgacctgaagcagcccacccagcccccccccctgcccgccgccgaggccgagaagcccgagagcagcgtgagcagcgccaccggcgacggcaacctgagccccagccagccccccctgaagaacctgctgagcctgctgaaggcctactacgccctgaacgcccagcccagcgccgaggagctgagcaagatcgccgacagcgtgaacctgcccctggacgtggtgaagaagtggttcgagaagatgcaggccggccagatcagcgtgcagagcagcgagcccagcagccccgagcccggcaaggtgaacatccccgccaagaacaacgaccagccccagagcgccaacgccaacgagccccaggacagcaccgtgaacctgcagagccccctgaagatgaccaacagccccgtgctgcccgtgggcagcaccaccaacggcagcagaagcagcacccccagccccagccccctgaacctgagcagcagcagaaacacccagggctacctgtacaccgccgagggcgcccaggaggagccccaggtggagcccctggacctgagcctgcccaagcagcagggcgagctgctggagagaagcaccatcaccagcgtgtaccagaacagcgtgtacagcgtgcaggaggagcccctgaacctgagctgcgccaagaaggagccccagaaggacagctgcgtgaccgacagcgagcccgtggtgaacgtgatcccccccagcgccaaccccatcaacatcgccatccccaccgtgaccgcccagctgcccaccatcgtggccatcgccgaccagaacagcgtgccctgcctgagagccctggccgccaacaagcagaccatcctgatcccccaggtggcctacacctacagcaccaccgtgagccccgccgtgcaggagccccccctgaaggtgatccagcccaacggcaaccaggacgagagacaggacaccagcagcgagggcgtgagcaacgtggaggaccagaacgacagcgacagcaccccccccaagaagaagatgagaaagaccgagaacggcatgtacgcctgcgacctgtgcgacaagatcttccagaagagcagcagcctgctgagacacaagtacgagcacaccggcaagagaccccacgagtgcggcatctgcaagaaggccttcaagcacaagcaccacctgatcgagcacatgagactgcacagcggcgagaagccctaccagtgcgacaagtgcggcaagagattcagccacagcggcagctacagccagcacatgaaccacagatacagctactgcaagagagaggccgaggagagagacagcaccgagcaggaggaggccggccccgagatcctgagcaacgagcacgtgggcgccagagccagccccagccagggcgacagcgacgagagagagagcctgaccagagaggaggacgaggacagcgagaaggaggaggaggaggaggacaaggagatggaggagctgcaggaggagaaggagtgcgagaagccccagggcgacgaggaggaggaggaggaggaggaggaggtggaggaggaggaggtggaggaggccgagaacgagggcgaggaggccaagaccgagggcctgatgaaggacgacagagccgagagccaggccagcagcctgggccagaaggtgggcgagagcagcgagcaggtgagcgaggagaagaccaacgaggcctag

SEQ ID NO: 13664 - DNA, 3645 bp, synthetic construct
  misc_feature 1..3645: note = Description of Artificial Sequence: Synthetic coding sequence
  source 1..3645: mol_type = other DNA
atgaagcagcccatcatggccgacggccccagatgcaagagaagaaagcaggccaaccccagaagaaagaacgtggtgaactacgacaacgtggtggacaccggcagcgagaccgacgaggaggacaagctgcacatcgccgaggacgacggcatcgccaaccccctggaccaggagaccagccccgccagcgtgcccaaccacgagagcagcccccacgtgagccaggccctgctgcccagagaggaggaggaggacgagatcagagagggcggcgtggagcacccctggcacaacaacgagatcctgcaggccagcgtggacggccccgaggagatgaaggaggactacgacaccatgggccccgaggccaccatccagaccgccatcaacaacggcaccgtgaagaacgccaactgcaccagcgacttcgaggagtacttcgccaagagaaagctggaggagagagacggccacgccgtgagcatcgaggagtacctgcagagaagcgacaccgccatcatctaccccgaggcccccgaggagctgagcagactgggcacccccgaggccaacggccaggaggagaacgacctgccccccggcacccccgacgccttcgcccagctgctgacctgcccctactgcgacagaggctacaagagactgaccagcctgaaggagcacatcaagtacagacacgagaagaacgaggagaacttcagctgccccctgtgcagctacaccttcgcctacagaacccagctggagagacacatggtgacccacaagcccggcaccgaccagcaccagatgctgacccagggcgccggcaacagaaagttcaagtgcaccgagtgcggcaaggccttcaagtacaagcaccacctgaaggagcacctgagaatccacagcggcgagaagccctacgagtgccccaactgcaagaagagattcagccacagcggcagctacagcagccacatcagcagcaagaagtgcatcggcctgatcagcgtgaacggcagaatgagaaacaacatcaagaccggcagcagccccaacagcgtgagcagcagccccaccaacagcgccatcacccagctgagaaacaagctggagaacggcaagcccctgagcatgagcgagcagaccggcctgctgaagatcaagaccgagcccctggacttcaacgactacaaggtgctgatggccacccacggcttcagcggcaccagccccttcatgaacggcggcctgggcgccaccagccccctgggcgtgcaccccagcgcccagagccccatgcagcacctgggcgtgggcatggaggcccccctgctgggcttccccaccatgaacagcaacctgagcgaggtgcagaaggtgctgcagatcgtggacaacaccgtgagcagacagaagatggactgcaaggccgaggagatcagcaagctgaagggctaccacatgaaggacccctgcagccagcccgaggagcagggcgtgaccagccccaacatcccccccgtgggcctgcccgtggtgagccacaacggcgccaccaagagcatcatcgactacaccctggagaaggtgaacgaggccaaggcctgcctgcagagcctgaccaccgacagcagaagacagatcagcaacatcaagaaggagaagctgagaaccctgatcgacctggtgaccgacgacaagatgatcgagaaccacaacatcagcacccccttcagctgccagttctgcaaggagagcttccccggccccatccccctgcaccagcacgagagatacctgtgcaagatgaacgaggagatcaaggccgtgctgcagccccacgagaacatcgtgcccaacaaggccggcgtgttcgtggacaacaaggccctgctgctgagcagcgtgctgagcgagaagggcatgaccagccccatcaacccctacaaggaccacatgagcgtgctgaaggcctactacgccatgaacatggagcccaacagcgacgagctgctgaagatcagcatcgccgtgggcctgccccaggagttcgtgaaggagtggttcgagcagagaaaggtgtaccagtacagcaacagcagaagccccagcctggagagaagcagcaagcccctggcccccaacagcaacccccccaccaaggacagcctgctgcccagaagccccgtgaagcccatggacagcatcaccagccccagcatcgccgagctgcacaacagcgtgaccaactgcgacccccccctgagactgaccaagcccagccacttcaccaacatcaagcccgtggagaagctggaccacagcagaagcaacacccccagccccctgaacctgagcagcaccagcagcaagaacagccacagcagcagctacacccccaacagcttcagcagcgaggagctgcaggccgagcccctggacctgagcctgcccaagcagatgaaggagcccaagagcatcatcgccaccaagaacaagaccaaggccagcagcatcagcctggaccacaacagcgtgagcagcagcagcgagaacagcgacgagcccctgaacctgaccttcatcaagaaggagttcagcaacagcaacaacctggacaacaagagcaccaaccccgtgttcagcatgaaccccttcagcgccaagcccctgtacaccgccctgcccccccagagcgccttcccccccgccaccttcatgccccccgtgcagaccagcatccccggcctgagaccctaccccggcctggaccagatgagcttcctgccccacatggcctacacctaccccaccggcgccgccaccttcgccgacatgcagcagagaagaaagtaccagagaaagcagggcttccagggcgagctgctggacggcgcccaggactacatgagcggcctggacgacatgaccgacagcgacagctgcctgagcagaaagaagatcaagaagaccgagagcggcatgtacgcctgcgacctgtgcgacaagaccttccagaagagcagcagcctgctgagacacaagtacgagcacaccggcaagagaccccaccagtgccagatctgcaagaaggccttcaagcacaagcaccacctgatcgagcacagcagactgcacagcggcgagaagccctaccagtgcgacaagtgcggcaagagattcagccacagcggcagctacagccagcacatgaaccacagatacagctactgcaagagagaggccgaggagagagaggccgccgagagagaggccagagagaagggccacctggagcccaccgagctgctgatgaacagagcctacctgcagagcatcaccccccagggctacagcgacagcgaggagagagagagcatgcccagagacggcgagagcgagaaggagcacgagaaggagggcgaggacggctacggcaagctgggcagacaggacggcgacgaggagttcgaggaggaggaggaggagagcgagaacaagagcatggacaccgaccccgagaccatcagagacgaggaggagaccggcgaccacagcatggacgacagcagcgaggacggcaagatggagaccaagagcgaccacgaggaggacaacatggaggacggcatgtag

SEQ ID NO: 13665 - DNA, 1275 bp, synthetic construct
  misc_feature 1..1275: note = Description of Artificial Sequence: Synthetic coding sequence
  source 1..1275: mol_type = other DNA
atggccgacggccccagatgcaagagaagaaagcaggccaaccccagaagaaagaacgtggtgaactacgacaacgtggtggacaccggcagcgagaccgacgaggaggacaagctgcacatcgccgaggacgacggcatcgccaaccccctggaccaggagaccagccccgccagcgtgcccaaccacgagagcagcccccacgtgagccaggccctgctgcccagagaggaggaggaggacgagatcagagagggcggcgtggagcacccctggcacaacaacgagatcctgcaggccagcgtggacggccccgaggagatgaaggaggactacgacaccatgggccccgaggccaccatccagaccgccatcaacaacggcaccgtgaagaacgccaactgcaccagcgacttcgaggagtacttcgccaagagaaagctggaggagagagacggccacgccgtgagcatcgaggagtacctgcagagaagcgacaccgccatcatctaccccgaggcccccgaggagctgagcagactgggcacccccgaggccaacggccaggaggagaacgacctgccccccggcacccccgacgccttcgcccagctgctgacctgcccctactgcgacagaggctacaagagactgaccagcctgaaggagcacatcaagtacagacacgagaagaacgaggagaacttcagctgccccctgtgcagctacaccttcgcctacagaacccagctggagagacacatggtgacccacaagcccggcaccgaccagcaccagatgctgacccagggcgccggcaacagaaagttcaagtgcaccgagtgcggcaaggccttcaagtacaagcaccacctgaaggagcacctgagaatccacagcggcgagaagccctacgagtgccccaactgcaagaagagattcagccacagcggcagctacagcagccacatcagcagcaagaagtgcatcggcctgatcagcgtgaacggcagaatgagaaacaacatcaagaccggcagcagccccaacagcgtgagcagcagccccaccaacagcgccatcacccagctgagaaacaagctggagaacggcaagcccctgagcatgagcgagcagaccggcctgctgaagagcggcagagcccagtggctgacccccctgatccccgccctgctggaggccgaggtgggcagaagcagaggccagaagatcgagaccctgctggccaacatggtggagcccagactgtactag

SEQ ID NO: 13666 - DNA, 1320 bp, synthetic construct
  misc_feature 1..1320: note = Description of Artificial Sequence: Synthetic coding sequence
  source 1..1320: mol_type = other DNA
atgaagcagcccatcatggccgacggccccagatgcaagagaagaaagcaggccaaccccagaagaaagaacgtggtgaactacgacaacgtggtggacaccggcagcgagaccgacgaggaggacaagctgcacatcgccgaggacgacggcatcgccaaccccctggaccaggagaccagccccgccagcgtgcccaaccacgagagcagcccccacgtgagccaggccctgctgcccagagaggaggaggaggacgagatcagagagggcggcgtggagcacccctggcacaacaacgagatcctgcaggccagcgtggacggccccgaggagatgaaggaggactacgacaccatgggccccgaggccaccatccagaccgccatcaacaacggcaccgtgaagaacgccaactgcaccagcgacttcgaggagtacttcgccaagagaaagctggaggagagagacggccacgccgtgagcatcgaggagtacctgcagagaagcgacaccgccatcatctaccccgaggcccccgaggagctgagcagactgggcacccccgaggccaacggccaggaggagaacgacctgccccccggcacccccgacgccttcgcccagctgctgacctgcccctactgcgacagaggctacaagagactgaccagcctgaaggagcacatcaagtacagacacgagaagaacgaggagaacttcagctgccccctgtgcagctacaccttcgcctacagaacccagctggagagacacatggtgacccacaagcccggcaccgaccagcaccagatgctgacccagggcgccggcaacagaaagttcaagtgcaccgagtgcggcaaggccttcaagtacaagcaccacctgaaggagcacctgagaatccacagcggcgagaagccctacgagtgccccaactgcaagaagagattcagccacagcggcagctacagcagccacatcagcagcaagaagtgcatcggcctgatcagcgtgaacggcagaatgagaaacaacatcaagaccggcagcagccccaacagcgtgagcagcagccccaccaacagcgccatcacccagctgagaaacaagctggagaacggcaagcccctgagcatgagcgagcagaccggcctgctgaagatcaagaccgagcccctggacttcaacgactacaaggtgctgatggccacccacggcttcagcggcaccagccccttcatgaacggcggcctgggcgccaccagccccctgggcgtgcaccccagcgcccagagccccatgcagcacctgtag

SEQ ID NO: 13667 - DNA, 408 bp, synthetic construct
  misc_feature 1..408: note = Description of Artificial Sequence: Synthetic coding sequence
  source 1..408: mol_type = other DNA
atgaagcagcccatcatggccgacggccccagatgcaagagaagaaagcaggccaaccccagaagaaagaacgtggtgaactacgacaacgtggtggacaccggcagcgagaccgacgaggaggacaagctgcacatcgccgaggacgacggcatcgccaaccccctggaccaggagaccagccccgccagcgtgcccaaccacgagagcagcccccacgtgagccaggccctgctgcccagagaggaggaggaggacgagatcagagagggcggcgtggagcacccctggcacaacaacgagatcctgcaggccagcgtggacggccccgaggagatgaaggaggactacgacaccatgggccccgaggccaccatccagaccgccatcaacaacggcaccggctag

SEQ ID NO: 13668 - DNA, 3645 bp, synthetic construct; identical to SEQ ID NO: 13664
  misc_feature 1..3645: note = Description of Artificial Sequence: Synthetic coding sequence
  source 1..3645: mol_type = other DNA

SEQ ID NO: 13669 - DNA, 2109 bp, synthetic construct
  misc_feature 1..2109: note = Description of Artificial Sequence: Synthetic coding sequence
  source 1..2109: mol_type = other DNA
atgaagcagcccatcatggccgacggccccagatgcaagagaagaaagcaggccaaccccagaagaaagaacgtggtgaactacgacaacgtggtggacaccggcagcgagaccgacgaggaggacaagctgcacatcgccgaggacgacggcatcgccaaccccctggaccaggagaccagccccgccagcgtgcccaaccacgagagcagcccccacgtgagccaggccctgctgcccagagaggaggaggaggacgagatcagagagggcggcgtggagcacccctggcacaacaacgagatcctgcaggccagcgtggacggccccgaggagatgaaggaggactacgacaccatgggccccgaggccaccatccagaccgccatcaacaacggcaccgtgaagaacgccaactgcaccagcgacttcgaggagtacttcgccaagagaaagctggaggagagagacggccacgccgtgagcatcgaggagtacctgcagagaagcgacaccgccatcatctaccccgaggcccccgaggagctgagcagactgggcacccccgaggccaacggccaggaggagaacgacctgccccccggcacccccgacgccttcgcccagctgctgacctgcccctactgcgacagaggctacaagagactgaccagcctgaaggagcacatcaagtacagacacgagaagaacgaggagaacttcagctgccccctgtgcagctacaccttcgcctacagaacccagctggagagacacatggtgacccacaagcccggcaccgaccagcaccagatgctgacccagggcgccggcaacagaaagttcaagtgcaccgagtgcggcaaggccttcaagtacaagcaccacctgaaggagcacctgagaatccacagcggcgagaagccctacgagtgccccaactgcaagaagagattcagccacagcggcagctacagcagccacatcagcagcaagaagtgcatcggcctgatcagcgtgaacggcagaatgagaaacaacatcaagaccggcagcagccccaacagcgtgagcagcagccccaccaacagcgccatcacccagctgagaaacaagctggagaacggcaagcccctgagcatgagcgagcagaccggcctgctgaagatcaagaccgagcccctggacttcaacgactacaaggtgctgatggccacccacggcttcagcggcaccagccccttcatgaacggcggcctgggcgccaccagccccctgggcgtgcaccccagcgcccagagccccatgcagcacctgggcgtgggcatggaggcccccctgctgggcttccccaccatgaacagcaacctgagcgaggtgcagaaggtgctgcagatcgtggacaacaccgtgagcagacagaagatggactgcaaggccgaggagatcagcaagctgaagggctaccacatgaaggacccctgcagccagcccgaggagcagggcgtgaccagccccaacatcccccccgtgggcctgcccgtggtgagccacaacggcgccaccaagagcatcatcgactacaccctggagaaggtgaacgaggccaaggcctgcctgcagagcctgaccaccgacagcagaagacagatcagcaacatcaagaaggagaagctgagaaccctgatcgacctggtgaccgacgacaagatgatcgagaaccacaacatcagcacccccttcagctgccagttctgcaaggagagcttccccggccccatccccctgcaccagcacgagagatacctgtgcaagatgaacgaggagatcaaggccgtgctgcagccccacgagaacatcgtgcccaacaaggccggcgtgttcgtggacaacaaggccctgctgctgagcagcgtgctgagcgagaagggcatgaccagccccatcaacccctacaaggaccacatgagcgtgctgaaggcctactacgccatgaacatggagcccaacagcgacgagctgctgaagatcagcatcgccgtgggcctgccccaggagttcgtgaaggagtggttcgagcagagaaaggtgtaccagtacagcaactag

SEQ ID NO: 13670 - DNA, 276 bp, synthetic construct
  misc_feature 1..276: note = Description of Artificial Sequence: Synthetic coding sequence
  source 1..276: mol_type = other DNA
atgaagcagcccatcatggccgacggccccagatgcaagagaagaaagcaggccaaccccagaagaaagaacgtggtgaactacgacaacgtggtggacaccggcagcgagaccgacgaggaggacaagctgcacatcgccgaggacgacggcatcgccaaccccctggaccaggagaccagccccgccagcgtgcccaaccacgagagcagcccccacgtgagccaggccctgctgcccagagaggaggaggaggacgagatcagagagggctag

SEQ ID NO: 13671 - DNA, 192 bp, synthetic construct
  misc_feature 1..192: note = Description of Artificial Sequence: Synthetic coding sequence
  source 1..192: mol_type = other DNA
atgaagcagcccatcatggccgacggccccagatgcaagagaagaaagcaggccaaccccagaagaaagaacgtggtgaactacgacaacgtggtggacaccggcagcgagaccgacgaggaggacaagctgcacatcgccgaggacgacggcatcgccaaccccctggaccaggagaccagccccgcctag

SEQ ID NO: 13672 - DNA, 3573 bp, synthetic construct
  misc_feature 1..3573: note = Description of Artificial Sequence: Synthetic coding sequence
  source 1..3573: mol_type = other DNA
atgaagcagcccatcatggccgacggccccagatgcaagagaagaaagcaggccaaccccagaagaaagaacgtggtgaactacgacaacgtggtggacaccggcagcgagaccgacgaggaggacaagctgcacatcgccgaggacgacggcatcgccaaccccctggaccaggagaccagccccgccagcgtgcccaaccacgagagcagcccccacgtgagccaggccctgctgcccagagaggaggaggaggacgagatcagagagggcggcgtggagcacccctggcacaacaacgagatcctgcaggccagcgtggacggccccgtgaagaacgccaactgcaccagcgacttcgaggagtacttcgccaagagaaagctggaggagagagacggccacgccgtgagcatcgaggagtacctgcagagaagcgacaccgccatcatctaccccgaggcccccgaggagctgagcagactgggcacccccgaggccaacggccaggaggagaacgacctgccccccggcacccccgacgccttcgcccagctgctgacctgcccctactgcgacagaggctacaagagactgaccagcctgaaggagcacatcaagtacagacacgagaagaacgaggagaacttcagctgccccctgtgcagctacaccttcgcctacagaacccagctggagagacacatggtgacccacaagcccggcaccgaccagcaccagatgctgacccagggcgccggcaacagaaagttcaagtgcaccgagtgcggcaaggccttcaagtacaagcaccacctgaaggagcacctgagaatccacagcggcgagaagccctacgagtgccccaactgcaagaagagattcagccacagcggcagctacagcagccacatcagcagcaagaagtgcatcggcctgatcagcgtgaacggcagaatgagaaacaacatcaagaccggcagcagccccaacagcgtgagcagcagccccaccaacagcgccatcacccagctgagaaacaagctggagaacggcaagcccctgagcatgagcgagcagaccggcctgctgaagatcaagaccgagcccctggacttcaacgactacaaggtgctgatggccacccacggcttcagcggcaccagccccttcatgaacggcggcctgggcgccaccagccccctgggcgtgcaccccagcgcccagagccccatgcagcacctgggcgtgggcatggaggcccccctgctgggcttccccaccatgaacagcaacctgagcgaggtgcagaaggtgctgcagatcgtggacaacaccgtgagcagacagaagatggactgcaaggccgaggagatcagcaagctgaagggctaccacatgaaggacccctgcagccagcccgaggagcagggcgtgaccagccccaacatcccccccgtgggcctgcccgtggtgagccacaacggcgccaccaagagcatcatcgactacaccctggagaaggtgaacgaggccaaggcctgcctgcagagcctgaccaccgacagcagaagacagatcagcaacatcaagaaggagaagctgagaaccctgatcgacctggtgaccgacgacaagatgatcgagaaccacaacatcagcacccccttcagctgccagttctgcaaggagagcttccccggccccatccccctgcaccagcacgagagatacctgtgcaagatgaacgaggagatcaaggccgtgctgcagccccacgagaacatcgtgcccaacaaggccggcgtgttcgtggacaacaaggccctgctgctgagcagcgtgctgagcgagaagggcatgaccagccccatcaacccctacaaggaccacatgagcgtgctgaaggcctactacgccatgaacatggagcccaacagcgacgagctgctgaagatcagcatcgccgtgggcctgccccaggagttcgtgaaggagtggttcgagcagagaaaggtgtaccagtacagcaacagcagaagccccagcctggagagaagcagcaagcccctggcccccaacagcaacccccccaccaaggacagcctgctgcccagaagccccgtgaagcccatggacagcatcaccagccccagcatcgccgagctgcacaacagcgtgaccaactgcgacccccccctgagactgaccaagcccagccacttcaccaacatcaagcccgtggagaagctggaccacagcagaagcaacacccccagccccctgaacctgagcagcaccagcagcaagaacagccacagcagcagctacacccccaacagcttcagcagcgaggagctgcaggccgagcccctggacctgagcctgcccaagcagatgaaggagcccaagagcatcatcgccaccaagaacaagaccaaggccagcagcatcagcctggaccacaacagcgtgagcagcagcagcgagaacagcgacgagcccctgaacctgaccttcatcaagaaggagttcagcaacagcaacaacctggacaacaagagcaccaaccccgtgttcagcatgaaccccttcagcgccaagcccctgtacaccgccctgcccccccagagcgccttcccccccgccaccttcatgccccccgtgcagaccagcatccccggcctgagaccctaccccggcctggaccagatgagcttcctgccccacatggcctacacctaccccaccggcgccgccaccttcgccgacatgcagcagagaagaaagtaccagagaaagcagggcttccagggcgagctgctggacggcgcccaggactacatgagcggcctggacgacatgaccgacagcgacagctgcctgagcagaaagaagatcaagaagaccgagagcggcatgtacgcctgcgacctgtgcgacaagaccttccagaagagcagcagcctgctgagacacaagtacgagcacaccggcaagagaccccaccagtgccagatctgcaagaaggccttcaagcacaagcaccacctgatcgagcacagcagactgcacagcggcgagaagccctaccagtgcgacaagtgcggcaagagattcagccacagcggcagctacagccagcacatgaaccacagatacagctactgcaagagagaggccgaggagagagaggccgccgagagagaggccagagagaagggccacctggagcccaccgagctgctgatgaacagagcctacctgcagagcatcaccccccagggctacagcgacagcgaggagagagagagcatgcccagagacggcgagagcgagaaggagcacgagaaggagggcgaggacggctacggcaagctgggcagacaggacggcgacgaggagttcgaggaggaggaggaggagagcgagaacaagagcatggacaccgaccccgagaccatcagagacgaggaggagaccggcgaccacagcatggacgacagcagcgaggacggcaagatggagaccaagagcgaccacgaggaggacaacatggaggacggcatgtag

SEQ ID NO: 13673 - DNA, 3645 bp, synthetic construct; identical to SEQ ID NO: 13664
  misc_feature 1..3645: note = Description of Artificial Sequence: Synthetic coding sequence
  source 1..3645: mol_type = other DNA

SEQ ID NO: 13674 - DNA, 1893 bp, synthetic construct
  misc_feature 1..1893: note = Description of Artificial Sequence: Synthetic coding sequence
  source 1..1893: mol_type = other DNA
atgagcatcagcgccctgggcggcagaaccaagggcaagcccctgccccccggcgaggaggagagaaacaacgtgctgaagcagatgaaggtgagaaccaccctgaagggcgacaagagctggatcaccaagcaggacgagagcgagggcagaaccatcgagctgcccagcggcagaagcagagccaccagcttcagcagcgccggcgaggtgcccaagcccagaccccccagcaccagagcccccaccggctacatcatcagaggcgtgttcaccaagcccatcgacagcagcagccagccccagcagcagttccccaaggccaacggcacccccaagagcgccgccagcctggtgagaaccgccaacgccggcccccccagacccagcagcagcggctacaagatgaccaccgaggactacaagaagctggccccctacaacatcagaagaagcagcaccagcggcgacaccgaggaggaggaggaggaggaggtggtgcccttcagcagcgacgagcagaagagaagaagcgaggccgccagcggcgtgctgagaagaaccgcccccagagagcacagctacgtgctgagcgccgccaagaagagcaccggccccacccaggagacccaggcccccttcatcgccaagagagtggaggtggtggaggaggacggccccagcgagaagagccaggacccccccgccctggccagaagcacccccggcagcaacagaagcagccccggcaacaaggacaaggaggccccctgcagcagagagctgcagagagacctggccggcgaggaggccttcagagcccccaacaccgacgccgccagaagcagcgcccagctgagcgacggcaacgtgggcagcggcgccaccggcagcagacccgagggcctggccgccgtggacatcggcagcgagagaggcagcagcagcgccaccagcgtgagcgccgtgcccgccgacagaaagagcaacagcaccgccgcccaggaggacgccaaggccgaccccaagggcgccctggccgactacgagggcaaggacgtggccaccagagtgggcgaggcctggcaggagagacccggcgcccccagaggcggccagggcgaccccgccgtgcccgcccagcagcccgccgaccccagcacccccgagagacagagcagccccagcggcagcgagcagctggtgagaagagagagctgcggcagcagcgtgctgaccgacttcgagggcaaggacgtggccaccaaggtgggcgaggcctggcaggacagacccggcgcccccagaggcggccagggcgaccccgccgtgcccacccagcagcccgccgaccccagcacccccgagcagcagaacagccccagcggcagcgagcagttcgtgagaagagagagctgcaccagcagagtgagaagccccagcagctgcatggtgaccgtgaccgtgaccgccaccagcgagcagccccacatctacatccccgcccccgccagcgagctggacagcagcagcaccaccaagggcatcctgttcgtgaaggagtacgtgaacgccagcgaggtgagcagcggcaagcccgtgagcgccagatacagcaacgtgagcagcatcgaggacagcttcgccatggagaagaagcccccctgcggcagcaccccctacagcgagagaaccaccggcggcatctgcacctactgcaacagagagatcagagactgccccaagatcaccctggagcacctgggcatctgctgccacgagtactgcttcaagtgcggcatctgcagcaagcccatgggcgacctgctggaccagatcttcatccacagagacaccatccactgcggcaagtgctacgagaagctgttctag

SEQ ID NO: 13675 - DNA, 1407 bp, synthetic construct
  misc_feature 1..1407: note = Description of Artificial Sequence: Synthetic coding sequence
  source 1..1407: mol_type = other DNA
atgaccaccgaggactacaagaagctggccccctacaacatcagaagaagcagcaccagcggcgacaccgaggaggaggaggaggaggaggtggtgcccttcagcagcgacgagcagaagagaagcagccccacccaggagacccaggcccccttcatcgccaagagagtggaggtggtggaggaggacggccccagcgagaagagccaggacccccccgccctggccagaagcacccccggcagcaacagaagcagccccggcaacaaggacaaggaggccccctgcagcagagagctgcagagagacctggccggcgaggaggccttcagagcccccaacaccgacgccgccagaagcagcgcccagctgagcgacggcaacgtgggcagcggcgccaccggcagcagacccgagggcctggccgccgtggacatcggcagcgagagaggcagcagcagcgccaccagcgtgagcgccgtgcccgccgacagaaagagcaacagcaccgccgcccaggaggacgccaaggccgaccccaagggcgccctggccgactacgagggcaaggacgtggccaccagagtgggcgaggcctggcaggagagacccggcgcccccagaggcggccagggcgaccccgccgtgcccgcccagcagcccgccgaccccagcacccccgagagacagagcagccccagcggcagcgagcagctggtgagaagagagagctgcggcagcagcgtgctgaccgacttcgagggcaaggacgtggccaccaaggtgggcgaggcctggcaggacagacccggcgcccccagaggcggccagggcgaccccgccgtgcccacccagcagcccgccgaccccagcacccccgagcagcagaacagccccagcggcagcgagcagttcgtgagaagagagagctgcaccagcagagtgagaagccccagcagctgcatggtgaccgtgaccgtgaccgccaccagcgagcagccccacatctacatccccgcccccgccagcgagctggacagcagcagcaccaccaagggcatcctgttcgtgaaggagtacgtgaacgccagcgaggtgagcagcggcaagcccgtgagcgccagatacagcaacgtgagcagcatcgaggacagcttcgccatggagaagaagcccccctgcggcagcaccccctacagcgagagaaccaccggcggcatctgcacctactgcaacagagagatcagagactgccccaagatcaccctggagcacctgggcatctgctgccacgagtactgcttcaagtgcggcatctgcagcaagcccatgggcgacctgctggaccagatcttcatccacagagacaccatccactgcggcaagtgctacgagaagctgttctag

SEQ ID NO: 13676 - DNA, 1374 bp, synthetic construct
  misc_feature 1..1374: note = Description of Artificial Sequence: Synthetic coding sequence
  source 1..1374: mol_type = other DNA
atgaccaccgaggactacaagaagctggccccctacaacatcagaagaagcagcaccagcggcgacaccgaggaggaggaggaggaggaggtggtgcccttcagcagcgacgagcagaagagaagaagcgaggccgccagcggcgtgctgagaagaaccgcccccagagagcacagctacgtgctgagcgccgccaagaagagcaccggcagccccacccaggagacccaggcccccttcatcgccaagagagtggaggtggtggaggaggacggccccagcgagaagagccaggacccccccgccctggccagaagcacccccggcagcaacagcagcagaggcgaggagatcgtgagactgcagatcctgacccccagagccggcctgagactggtggcccccgacgtggagggcatgagcagcagcgccaccagcgtgagcgccgtgcccgccgacagaaagagcaacagcaccgccgcccaggaggacgccaaggccgaccccaagggcgccctggccgactacgagggcaaggacgtggccaccagagtgggcgaggcctggcaggagagacccggcgcccccagaggcggccagggcgaccccgccgtgcccgcccagcagcccgccgaccccagcacccccgagagacagagcagccccagcggcagcgagcagctggtgagaagagagagctgcggcagcagcgtgctgaccgacttcgagggcaaggacgtggccaccaaggtgggcgaggcctggcaggacagacccggcgcccccagaggcggccagggcgaccccgccgtgcccacccagcagcccgccgaccccagcacccccgagcagcagaacagccccagcggcagcgagcagttcgtgagaagagagagctgcaccagcagagtgagaagccccagcagctgcatggtgaccgtgaccgtgaccgccaccagcgagcagccccacatctacatccccgcccccgccagcgagctggacagcagcagcaccaccaagggcatcctgttcgtgaaggagtacgtgaacgccagcgaggtgagcagcggcaagcccgtgagcgccagatacagcaacgtgagcagcatcgaggacagcttcgccatggagaagaagcccccctgcggcagcaccccctacagcgagagaaccaccggcggcatctgcacctactgcaacagagagatcagagactgccccaagatcaccctggagcacctgggcatctgctgccacgagtactgcttcaagtgcggcatctgcagcaagcccatgggcgacctgctggaccagatcttcatccacagagacaccatccactgcggcaagtgctacgagaagctgttctag

SEQ ID NO: 13677 - DNA, 2070 bp, synthetic construct
  misc_feature 1..2070: note = Description of Artificial Sequence: Synthetic coding sequence
  source 1..2070: mol_type = other DNA
atgagcatcagcgccctgggcggcagaaccaagggcaagcccctgccccccggcgaggaggagagaaacaacgtgctgaagcagatgaaggtgagaaccaccctgaagggcgacaagagctggatcaccaagcaggacgagagcgagggcagaaccatcgagctgcccagcggcagaagcagagccaccagcttcagcagcgccggcgaggtgcccaagcccagaccccccagcaccagagcccccaccggctacatcatcagaggcgtgttcaccaagcccatcgacagcagcagccagccccagcagcagttccccaaggccaacggcacccccaagagcgccgccagcctggtgagaaccgccaacgccggcccccccagacccagcagcagcggctacaagatgaccaccgaggactacaagaagctggccccctacaacatcagaagaagcagcaccagcggcgacaccgaggaggaggaggaggaggaggtggtgcccttcagcagcgacgagcagaagagaagaagcgaggccgccagcggcgtgctgagaagaaccgcccccagagagcacagctacgtgctgagcgccgccaagaagagcaccggccccacccaggagacccaggcccccttcatcgccaagagagtggaggtggtggaggaggacggccccagcgagaagagccaggacccccccgccctggccagaagcacccccggcagcaacagcgccgacggcggcagaaccaaggccagcagagccatctggatcgagtgcctgcccagcatgcccagccccgccggcagccaggagctgagcagcagaggcgaggagatcgtgagactgcagatcctgacccccagagccggcctgagactggtggcccccgacgtggagggcatgagaagcagccccggcaacaaggacaaggaggccccctgcagcagagagctgcagagagacctggccggcgaggaggccttcagagcccccaacaccgacgccgccagaagcagcgcccagctgagcgacggcaacgtgggcagcggcgccaccggcagcagacccgagggcctggccgccgtggacatcggcagcgagagaggcagcagcagcgccaccagcgtgagcgccgtgcccgccgacagaaagagcaacagcaccgccgcccaggaggacgccaaggccgaccccaagggcgccctggccgactacgagggcaaggacgtggccaccagagtgggcgaggcctggcaggagagacccggcgcccccagaggcggccagggcgaccccgccgtgcccgcccagcagcccgccgaccccagcacccccgagagacagagcagccccagcggcagcgagcagctggtgagaagagagagctgcggcagcagcgtgctgaccgacttcgagggcaaggacgtggccaccaaggtgggcgaggcctggcaggacagacccggcgcccccagaggcggccagggcgaccccgccgtgcccacccagcagcccgccgaccccagcacccccgagcagcagaacagccccagcggcagcgagcagttcgtgagaagagagagctgcaccagcagagtgagaagccccagcagctgcatggtgaccgtgaccgtgaccgccaccagcgagcagccccacatctacatccccgcccccgccagcgagctggacagcagcagcaccaccaagggcatcctgttcgtgaaggagtacgtgaacgccagcgaggtgagcagcggcaagcccgtgagcgccagatacagcaacgtgagcagcatcgaggacagcttcgccatggagaagaagcccccctgcggcagcaccccctacagcgagagaaccaccggcggcatctgcacctactgcaacagagagatcagagactgccccaagatcaccctggagcacctgggcatctgctgccacgagtactgcttcaagtgcggcatctgcagcaagcccatgggcgacctgctggaccagatcttcatccacagagacaccatccactgcggcaagtgctacgagaagctgttctag

SEQ ID NO: 13678 - DNA, 1359 bp, synthetic construct
  misc_feature 1..1359: note = Description of Artificial Sequence: Synthetic coding sequence
  source 1..1359: mol_type = other DNA
atgcagagacaggccccctacaacatcagaagaagcagcaccagcggcgacaccgaggaggaggaggaggaggaggtggtgcccttcagcagcgacgagcagaagagaagaagcgaggccgccagcggcgtgctgagaagaaccgcccccagagagcacagctacgtgctgagcgccgccaagaagagcaccggcagccccacccaggagacccaggcccccttcatcgccaagagagtggaggtggtggaggaggacggccccagcgagaagagccaggacccccccgccctggccagaagcacccccggcagcaacagcagcagaggcgaggagatcgtgagactgcagatcctgacccccagagccggcctgagactggtggcccccgacgtggagggcatgagcagcagcgccaccagcgtgagcgccgtgcccgccgacagaaagagcaacagcaccgccgcccaggaggacgccaaggccgaccccaagggcgccctggccgactacgagggcaaggacgtggccaccagagtgggcgaggcctggcaggagagacccggcgcccccagaggcggccagggcgaccccgccgtgcccgcccagcagcccgccgaccccagcacccccgagagacagagcagccccagcggcagcgagcagctggtgagaagagagagctgcggcagcagcgtgctgaccgacttcgagggcaaggacgtggccaccaaggtgggcgaggcctggcaggacagacccggcgcccccagaggcggccagggcgaccccgccgtgcccacccagcagcccgccgaccccagcacccccgagcagcagaacagccccagcggcagcgagcagttcgtgagaagagagagctgcaccagcagagtgagaagccccagcagctgcatggtgaccgtgaccgtgaccgccaccagcgagcagccccacatctacatccccgcccccgccagcgagctggacagcagcagcaccaccaagggcatcctgttcgtgaaggagtacgtgaacgccagcgaggtgagcagcggcaagcccgtgagcgccagatacagcaacgtgagcagcatcgaggacagcttcgccatggagaagaagcccccctgcggcagcaccccctacagcgagagaaccaccggcggcatctgcacctactgcaacagagagatcagagactgccccaagatcaccctggagcacctgggcatctgctgccacgagtactgcttcaagtgcggcatctgcagcaagcccatgggcgacctgctggaccagatcttcatccacagagacaccatccactgcggcaagtgctacgagaagctgttctag

SEQ ID NO: 13679 - DNA, 1428 bp, synthetic construct
  misc_feature 1..1428: note = Description of Artificial Sequence: Synthetic coding sequence
  source 1..1428: mol_type = other DNA
tgaagaagcagcaccagcggcgacaccgaggaggaggaggaggaggaggtggtgcccttcagcagcgacgagcagaagagaagcctgagaagaaccgcccccagagagcacagctacgtgctgagcgccgccaagaagagcaccggcagccccacccaggagacccaggcccccttcatcgccaagagagtggaggtggtggaggaggacggccccagcgagaagagccaggacccccccgccctggccagaagcacccccggcagcaacagaagcagccccggcaacaaggacaaggaggccccctgcagcagagagctgcagagagacctggccggcgaggaggccttcagagcccccaacaccgacgccgccagaagcagcgcccagctgagcgacggcaacgtgggcagcggcgccaccggcagcagacccgagggcctggccgccgtggacatcggcagcgagagaggcagcagcagcgccaccagcgtgagcgccgtgcccgccgacagaaagagcaacagcaccgccgcccaggaggacgccaaggccgaccccaagggcgccctggccgactacgagggcaaggacgtggccaccagagtgggcgaggcctggcaggagagacccggcgcccccagaggcggccagggcgaccccgccgtgcccgcccagcagcccgccgaccccagcacccccgagagacagagcagccccagcggcagcgagcagctggtgagaagagagagctgcggcagcagcgtgctgaccgacttcgagggcaaggacgtggccaccaaggtgggcgaggcctggcaggacagacccggcgcccccagaggcggccagggcgaccccgccgtgcccacccagcagcccgccgaccccagcacccccgagcagcagaacagccccagcggcagcgagcagttcgtgagaagagagagctgcaccagcagagtgagaagccccagcagctgcatggtgaccgtgaccgtgaccgccaccagcgagcagccccacatctacatccccgcccccgccagcgagctggacagcagcagcaccaccaagggcatcctgttcgtgaaggagtacgtgaacgccagcgaggtgagcagcggcaagcccgtgagcgccagatacagcaacgtgagcagcatcgaggacagcttcgccatggagaagaagcccccctgcggcagcaccccctacagcgagagaaccaccggcggcatctgcacctactgcaacagagagatcagagactgccccaagatcaccctggagcacctgggcatctgctgccacgagtactgcttcaagtgcggcatctgcagcaagcccatgggcgacctgctggaccagatcttcatccacagagacaccatccactgcggcaagtgctacgagaagctgttctag

SEQ ID NO: 13680 - DNA, 1146 bp, synthetic construct
  misc_feature 1..1146: note = Description of Artificial Sequence: Synthetic coding sequence
  source 1..1146: mol_type = other DNA
atgaccaccgaggactacaagaagctggccccctacaacatcagaagaagcagcaccagcggcgacaccgaggaggaggaggaggaggaggtggtgcccttcagcagcgacgagcagaagagaagaagcgaggccgccagcggcgtgctgagaagaaccgcccccagagagcacagctacgtgctgagcgccgccaagaagagcaccggcagccccacccaggagacccaggcccccttcatcgccaagagagtggaggtggtggaggaggacggccccagcgagaagagccaggacccccccgccctggccagaagcacccccggcagcaacagcgccgacggcggcagaaccaaggccagcagagccatctggatcgagtgcctgcccagcatgcccagccccgccggcagccaggagctgagcagcagaggcgaggagatcgtgagactgcagatcctgacccccagagccggcctgagactggtggcccccgacgtggagggcatgagaagcagccccggcaacaaggacaaggaggccccctgcagcagagagctgcagagagacctggccggcgaggaggccttcagagcccccaacaccgacgccgccagaagcagcgcccagctgagcgacggcaacgtgggcagcggcgccaccggcagcagacccgagggcctggccgccgtggacatcggcagcgagagaggcagcagcagcgccaccagcgtgagcgccgtgcccgccgacagaaagagcaacagcaccgccgcccaggaggacgccaaggccgaccccaagggcgccctggccgactacgagggcaaggacgtggccaccagagtgggcgaggcctggcaggagagacccggcgcccccagaggcggccagggcgaccccgccgtgcccgcccagcagcccgccgaccccagcacccccgagagacagagcagccccagcggcagcgagcagctggtgagaagagagagctgcggcagcagcgtgctgaccgacttcgagggcaaggacgtggccaccaaggtgggcgaggcctggcaggacagacccggccccagctgcacccacagcgccacctgcagaagccagtaccccagaaccgccgagcagccccagagaatctag

SEQ ID NO: 13681 - DNA, 636 bp, synthetic construct
  misc_feature 1..636: note = Description of Artificial Sequence: Synthetic coding sequence
  source 1..636: mol_type = other DNA
gaggaggccttcagagcccccaacaccgacgccgccagaagcagcgcccagctgagcgacggcaacgtgggcagcggcgccaccggcagcagacccgagggcctggccgccgtggacatcggcagcgagagaggcagactgtgcgccgccgccagcttcgccagcttcctggaggaccaggacggccacagcgccaacagccagagctgcaagcccagacccgccgccatcagcagcagcgccaccagcgtgagcgccgtgcccgccgacagaaagagcaacagcaccgccgcccaggaggacgccaaggccgaccccaagggcgccctggccgactacgagggcaaggacgtggccaccagagtgggcgaggcctggcaggagagacccggcgcccccagaggcggccagggcgaccccgccgtgcccgcccagcagcccgccgaccccagcacccccgagagacagagcagccccagcggcagcgagcagctggtgagaagagagagctgcggcagcagcgtgctgaccgacttcgagggcaaggacgtggccaccaaggtgggcgaggcctggcaggacagacccggcgcccccagaggcggccagggcgaccccgccgtgcccacccagtag

SEQ ID NO: 13682 - DNA, 666 bp, synthetic construct
  misc_feature 1..666: note = Description of Artificial Sequence: Synthetic coding sequence
  source 1..666: mol_type = other DNA
tgactgagaagaaccgcccccagagagcacagctacgtgctgagcgccgccaagaagagcaccggcagccccacccaggagacccaggcccccttcatcgccaagagagtggaggtggtggaggaggacggccccagcgagaagagccaggacccccccgccctggccagaagcacccccggcagcaacagcgccgacggcggcagaaccaaggccagcagagccatctggatcgagtgcctgcccagcatgcccagccccgccggcagccaggagctgagcagcagaggcgaggagatcgtgagactgcagatcctgacccccagagccggcctgagactggtggcccccgacgtggagggcatgagaagcagccccggcaacaaggacaaggaggccccctgcagcagagagctgcagagagacctggccggcgaggaggccttcagagcccccaacaccgacgccgccagaagcagcgcccagctgagcgacggcaacgtgggcagcggcgccaccggcagcagacccgagggcctggccgccgtggacatcggcagcgagagaggcagcagcagcgccaccagcgtgagcgccgtgcccgccgacagaaagagcaacagcaccgccgcccaggaggacgccaaggccgaccccaagggctag

SEQ ID NO: 13683 - DNA, 414 bp, synthetic construct
  misc_feature 1..414: note = Description of Artificial Sequence: Synthetic coding sequence
  source 1..414: mol_type = other DNA
tgagtgctgcccagaagacacagacacagactgagcagaagaggctggagatggtggaagagaaccggcctgctgagaagagccagaacccacctgctgtggcaggaccccctgctggcccagaccgtgagaatggaggccggccccaagagactgggccagttcggcagcagcgcctgccaggtgtgcctggcccccctgggcgccagaagcagcggcctgccccaggccaccaagaccagaagaccccccgcccccgagagcagcagaggcacctggctggtgagaagactgagcggcccccccacccagatgctgcaggcccccgtgcccctgcagagcctgctgagcctgctgatcggcagagccaccgcccagcagcccagaagaatgcagagacagacccagagatag

SEQ ID NO: 13684 - DNA, 2073 bp, synthetic construct
  misc_feature 1..2073: note = Description of Artificial Sequence: Synthetic coding sequence
  source 1..2073: mol_type = other DNA
atgagcatcagcgccctgggcggcagaaccaagggcaagcccctgccccccggcgaggaggagagaaacaacgtgctgaagcagatgaaggtgagaaccaccctgaagggcgacaagagctggatcaccaagcaggacgagagcgagggcagaaccatcgagctgcccagcggcagaagcagagccaccagcttcagcagcgccggcgaggtgcccaagcccagaccccccagcaccagagcccccaccggctacatcatcagaggcgtgttcaccaagcccatcgacagcagcagccagccccagcagcagttccccaaggccaacggcacccccaagagcgccgccagcctggtgagaaccgccaacgccggcccccccagacccagcagcagcggctacaagatgaccaccgaggactacaagaagctggccccctacaacatcagaagaagcagcaccagcggcgacaccgaggaggaggaggaggaggaggtggtgcccttcagcagcgacgagcagaagagaagaagcgaggccgccagcggcgtgctgagaagaaccgcccccagagagcacagctacgtgctgagcgccgccaagaagagcaccggcagccccacccaggagacccaggcccccttcatcgccaagagagtggaggtggtggaggaggacggccccagcgagaagagccaggacccccccgccctggccagaagcacccccggcagcaacagcgccgacggcggcagaaccaaggccagcagagccatctggatcgagtgcctgcccagcatgcccagccccgccggcagccaggagctgagcagcagaggcgaggagatcgtgagactgcagatcctgacccccagagccggcctgagactggtggcccccgacgtggagggcatgagaagcagccccggcaacaaggacaaggaggccccctgcagcagagagctgcagagagacctggccggcgaggaggccttcagagcccccaacaccgacgccgccagaagcagcgcccagctgagcgacggcaacgtgggcagcggcgccaccggcagcagacccgagggcctggccgccgtggacatcggcagcgagagaggcagcagcagcgccaccagcgtgagcgccgtgcccgccgacagaaagagcaacagcaccgccgcccaggaggacgccaaggccgaccccaagggcgccctggccgactacgagggcaaggacgtggccaccagagtgggcgaggcctggcaggagagacccggcgcccccagaggcggccagggcgaccccgccgtgcccgcccagcagcccgccgaccccagcacccccgagagacagagcagccccagcggcagcgagcagctggtgagaagagagagctgcggcagcagcgtgctgaccgacttcgagggcaaggacgtggccaccaaggtgggcgaggcctggcaggacagacccggcgcccccagaggcggccagggcgaccccgccgtgcccacccagcagcccgccgaccccagcacccccgagcagcagaacagccccagcggcagcgagcagttcgtgagaagagagagctgcaccagcagagtgagaagccccagcagctgcatggtgaccgtgaccgtgaccgccaccagcgagcagccccacatctacatccccgcccccgccagcgagctggacagcagcagcaccaccaagggcatcctgttcgtgaaggagtacgtgaacgccagcgaggtgagcagcggcaagcccgtgagcgccagatacagcaacgtgagcagcatcgaggacagcttcgccatggagaagaagcccccctgcggcagcaccccctacagcgagagaaccaccggcggcatctgcacctactgcaacagagagatcagagactgccccaagatcaccctggagcacctgggcatctgctgccacgagtactgcttcaagtgcggcatctgcagcaagcccatgggcgacctgctggaccagatcttcatccacagagacaccatccactgcggcaagtgctacgagaagctgttctag

SEQ ID NO: 13685 - DNA, 993 bp, synthetic construct
  misc_feature 1..993: note = Description of Artificial Sequence: Synthetic coding sequence
  source 1..993: mol_type = other DNA
tgaagcgagatggccgccagagacgagctgggcctgggcggcgacagcctggaggccatgcccgtgcccgccgccagaggcagacccagaatcaccaacggccccgaggagctggccgcccccagccccgccgccctggccgactacgagggcaaggacgtggccaccagagtgggcgaggcctggcaggagagacccggcgcccccagaggcggccagggcgaccccgccgtgcccgcccagcagcccgccgaccccagcacccccgagagacagagcagccccagcggcagcgagcagctggtgagaagagagagctgcggcagcagcgtgctgaccgacttcgagggcaaggacgtggccaccaaggtgggcgaggcctggcaggacagacccggcgcccccagaggcggccagggcgaccccgccgtgcccacccagcagcccgccgaccccagcacccccgagcagcagaacagccccagcggcagcgagcagttcgtgagaagagagagctgcaccagcagagtgagaagccccagcagctgcatggtgaccgtgaccgtgaccgccaccagcgagcagccccacatctacatccccgcccccgccagcgagctggacagcagcagcaccaccaagggcatcctgttcgtgaaggagtacgtgaacgccagcgaggtgagcagcggcaagcccgtgagcgccagatacagcaacgtgagcagcatcgaggacagcttcgccatggagaagaagcccccctgcggcagcaccccctacagcgagagaaccaccggcggcatctgcacctactgcaacagagagatcagagactgccccaagatcaccctggagcacctgggcatctgctgccacgagtactgcttcaagtgcggcatctgcagcaagcccatgggcgacctgctggaccagatcttcatccacagagacaccatccactgcggcaagtgctacgagaagctgttctag

SEQ ID NO: 13686 - DNA, 1575 bp, synthetic construct
  misc_feature 1..1575: note = Description of Artificial Sequence: Synthetic coding sequence
  source 1..1575: mol_type = other DNA
atgaccaccgaggactacaagaagctggccccctacaacatcagaagaagcagcaccagcggcgacaccgaggaggaggaggaggaggaggtggtgcccttcagcagcgacgagcagaagagaagaagcgaggccgccagcggcgtgctgagaagaaccgcccccagagagcacagctacgtgctgagcgccgccaagaagagcaccggccccacccaggagacccaggcccccttcatcgccaagagagtggaggtggtggaggaggacggccccagcgagaagagccaggacccccccgccctggccagaagcacccccggcagcaacagcagcagaggcgaggagatcgtgagactgcagatcctgacccccagagccggcctgagactggtggcccccgacgtggagggcatgagaagcagccccggcaacaaggacaaggaggccccctgcagcagagagctgcagagagacctggccggcgaggaggccttcagagcccccaacaccgacgccgccagaagcagcgcccagctgagcgacggcaacgtgggcagcggcgccaccggcagcagacccgagggcctggccgccgtggacatcggcagcgagagaggcagcagcagcgccaccagcgtgagcgccgtgcccgccgacagaaagagcaacagcaccgccgcccaggaggacgccaaggccgaccccaagggcgccctggccgactacgagggcaaggacgtggccaccagagtgggcgaggcctggcaggagagacccggcgcccccagaggcggccagggcgaccccgccgtgcccgcccagcagcccgccgaccccagcacccccgagagacagagcagccccagcggcagcgagcagctggtgagaagagagagctgcggcagcagcgtgctgaccgacttcgagggcaaggacgtggccaccaaggtgggcgaggcctggcaggacagacccggcgcccccagaggcggccagggcgaccccgccgtgcccacccagcagcccgccgaccccagcacccccgagcagcagaacagccccagcggcagcgagcagttcgtgagaagagagagctgcaccagcagagtgagaagccccagcagctgcatggtgaccgtgaccgtgaccgccaccagcgagcagccccacatctacatccccgcccccgccagcgagctggacagcagcagcaccaccaagggcatcctgttcgtgaaggagtacgtgaacgccagcgaggtgagcagcggcaagcccgtgagcgccagatacagcaacgtgagcagcatcgaggacagcttcgccatggagaagaagcccccctgcggcagcaccccctacagcgagagaaccaccggcggcatctgcacctactgcaacagagagatcagagactgccccaagatcaccctggagcacctgggcatctgctgccacgagtactgcttcaagtgcggcatctgcagcaagcccatgggcgacctgctggaccagatcttcatccacagagacaccatccactgcggcaagtgctacgagaagctgttctag

SEQ ID NO: 13687 - DNA, 2166 bp, synthetic construct
  misc_feature 1..2166: note = Description of Artificial Sequence: Synthetic coding sequence
  source 1..2166: mol_type = other DNA
atgagcatcagcgccctgggcggcagaaccaagggcaagcccctgccccccggcgaggaggagagaaacaacgtgctgaagcagatgaaggtgagaaccaccctgaagggcgacaagagctggatcaccaagcaggacgagagcgagggcagaaccatcgagctgcccagcggcagaagcagagccaccagcttcagcagcgccggcgaggtgcccaagcccagaccccccagcaccagagcccccaccggctacatcatcagaggcgtgttcaccaagcccatcgacagcagcagccagccccagcagcagttccccaaggccaacggcacccccaagagcgccgccagcctggtgagaaccgccaacgccggcccccccagacccagcagcagcggctacaagatgaccaccgaggactacaagaagctggccccctacaacatcagaagaagcagcaccagcggcgacaccgaggaggaggaggaggaggaggtggtgcccttcagcagcgacgagcagaagagaagaagcgaggccgccagcggcgtgctgagaagaaccgcccccagagagcacagctacgtgctgagcgccgccaagaagagcaccggccccacccaggagacccaggcccccttcatcgccaagagagtggaggtggtggaggaggacggccccagcgagaagagccaggacccccccgccctggccagaagcacccccggcagcaacagcgccgacggcggcagaaccaaggccagcagagccatctggatcgagtgcctgcccagcatgcccagccccgccggcagccaggagctgagcagcagaggcgaggagatcgtgagactgcagatcctgacccccagagccggcctgagactggtggcccccgacgtggagggcatgagaagcagccccggcaacaaggacaaggaggccccctgcagcagagagctgcagagagacctggccggcgaggaggccttcagagcccccaacaccgacgccgccagaagcagcgcccagctgagcgacggcaacgtgggcagcggcgccaccggcagcagacccgagggcctggccgccgtggacatcggcagcgagagaggcagactgtgcgccgccgccagcttcgccagcttcctggaggaccaggacggccacagcgccaacagccagagctgcaagcccagacccgccgccatcagcagcagcgccaccagcgtgagcgccgtgcccgccgacagaaagagcaacagcaccgccgcccaggaggacgccaaggccgaccccaagggcgccctggccgactacgagggcaaggacgtggccaccagagtgggcgaggcctggcaggagagacccggcgcccccagaggcggccagggcgaccccgccgtgcccgcccagcagcccgccgaccccagcacccccgagagacagagcagccccagcggcagcgagcagctggtgagaagagagagctgcggcagcagcgtgctgaccgacttcgagggcaaggacgtggccaccaaggtgggcgaggcctggcaggacagacccggcgcccccagaggcggccagggcgaccccgccgtgcccacccagcagcccgccgaccccagcacccccgagcagcagaacagccccagcggcagcgagcagttcgtgagaagagagagctgcaccagcagagtgagaagccccagcagctgcatggtgaccgtgaccgtgaccgccaccagcgagcagccccacatctacatccccgcccccgccagcgagctggacagcagcagcaccaccaagggcatcctgttcgtgaaggagtacgtgaacgccagcgaggtgagcagcggcaagcccgtgagcgccagatacagcaacgtgagcagcatcgaggacagcttcgccatggagaagaagcccccctgcggcagcaccccctacagcgagagaaccaccggcggcatctgcacctactgcaacagagagatcagagactgccccaagatcaccctggagcacctgggcatctgctgccacgagtactgcttcaagtgcggcatctgcagcaagcccatgggcgacctgctggaccagatcttcatccacagagacaccatccactgcggcaagtgctacgagaagctgttctag

SEQ ID NO: 13688 - DNA, 2079 bp, synthetic construct
  misc_feature 1..2079: note = Description of Artificial Sequence: Synthetic coding sequence
  source 1..2079: mol_type = other DNA
atgagcatcagcgccctgggcggcagaaccaagggcaagcccctgccccccggcgaggaggagagaaacaacgtgctgaagcagatgaaggtgagaaccaccctgaagggcgacaagagctggatcaccaagcaggacgagagcgagggcagaaccatcgagctgcccagcggcagaagcagagccaccagcttcagcagcgccggcgaggtgcccaagcccagaccccccagcaccagagcccccaccggctacatcatcagaggcgtgttcaccaagcccatcgacagcagcagccagccccagcagcagttccccaaggccaacggcacccccaagagcgccgccagcctggtgagaaccgccaacgccggcccccccagacccagcagcagcggctacaagatgaccaccgaggactacaagaagctggccccctacaacatcagaagaagcagcaccagcggcgacaccgaggaggaggaggaggaggaggtggtgcccttcagcagcgacgagcagaagagaagaagcgaggccgccagcggcgtgctgagaagaaccgcccccagagagcacagctacgtgctgagcgccgccaagaagagcaccggccccacccaggagacccaggcccccttcatcgccaagagagtggaggtggtggaggaggacggccccagcgagaagagccaggacccccccgccctggccagaagcacccccggcagcaacagcgccgacggcggcagaaccaaggccagcagagccatctggatcgagtgcctgcccagcatgcccagccccgccggcagccaggagctgagaagcagccccggcaacaaggacaaggaggccccctgcagcagagagctgcagagagacctggccggcgaggaggccttcagagcccccaacaccgacgccgccagaagcagcgcccagctgagcgacggcaacgtgggcagcggcgccaccggcagcagacccgagggcctggccgccgtggacatcggcagcgagagaggcagactgtgcgccgccgccagcttcgccagcttcctggaggaccaggacggccacagcgccaacagccagagctgcaagcccagacccgccgccatcagcagcagcgccaccagcgtgagcgccgtgcccgccgacagaaagagcaacagcaccgccgcccaggaggacgccaaggccgaccccaagggcgccctggccgactacgagggcaaggacgtggccaccagagtgggcgaggcctggcaggagagacccggcgcccccagaggcggccagggcgaccccgccgtgcccgcccagcagcccgccgaccccagcacccccgagagacagagcagccccagcggcagcgagcagctggtgagaagagagagctgcggcagcagcgtgctgaccgacttcgagggcaaggacgtggccaccaaggtgggcgaggcctggcaggacagacccggcgcccccagaggcggccagggcgaccccgccgtgcccacccagcagcccgccgaccccagcacccccgagcagcagaacagccccagcggcagcgagcagttcgtgagaagagagagctgcaccagcagagtgagaagccccagcagctgcatggtgaccgtgaccgtgaccgccaccagcgagcagccccacatctacatccccgcccccgccagcgagctggacagcagcagcaccaccaagggcatcctgttcgtgaaggagtacgtgaacgccagcgaggtgagcagcggcaagcccgtgagcgccagatacagcaacgtgagcagcatcgaggacagcttcgccatggagaagaagcccccctgcggcagcaccccctacagcgagagaaccaccggcggcatctgcacctactgcaacagagagatcagagactgccccaagatcaccctggagcacctgggcatctgctgccacgagtactgcttcaagtgcggcatctgcagcaagcccatgggcgacctgctggaccagatcttcatccacagagacaccatccactgcggcaagtgctacgagaagctgttctag

SEQ ID NO: 13689 - DNA, 1899 bp, synthetic construct
  misc_feature 1..1899: note = Description of Artificial Sequence: Synthetic coding sequence
  source 1..1899: mol_type = other DNA
atgcagagagaggagggcttcaacaccaagatggccgacggccccgacgagtacgacaccgaggccggctgcgtgcccctgctgcaccccgaggagatcaagccccagagccactacaaccacggctacggcgagcccctgggcagaaagacccacatcgacgactacagcacctgggacatcgtgaaggccacccagtacggcatctacgagagatgcagagagctggtggaggccggctacgacgtgagacagcccgacaaggagaacgtgaccctgctgcactgggccgccatcaacaacagaatcgacctggtgaagtactacatcagcaagggcgccatcgtggaccagctgggcggcgacctgaacagcacccccctgcactgggccaccagacagggccacctgagcatggtggtgcagctgatgaagtacggcgccgaccccagcctgatcgacggcgagggctgcagctgcatccacctggccgcccagttcggccacaccagcatcgtggcctacctgatcgccaagggccaggacgtggacatgatggaccagaacggcatgacccccctgatgtgggccgcctacagaacccacagcgtggaccccaccagactgctgctgaccttcaacgtgagcgtgaacctgggcgacaagtaccacaagaacaccgccctgcactgggccgtgctggccggcaacaccaccgtgatcagcctgctgctggaggccggcgccaacgtggacgcccagaacatcaagggcgagagcgccctggacctggccaagcagagaaagaacgtgtggatgatcaaccacctgcaggaggccagacaggccaagggctacgacaaccccagcttcctgagaaagctgaaggccgacaaggagttcagacagaaggtgatgctgggcacccccttcctggtgatctggctggtgggcttcatcgccgacctgaacatcgacagctggctgatcaagggcctgatgtacggcggcgtgtgggccaccgtgcagttcctgagcaagagcttcttcgaccacagcatgcacagcgccctgcccctgggcatctacctggccaccaagttctggatgtacgtgacctggttcttctggttctggaacgacctgaacttcctgttcatccacctgcccttcctggccaacagcgtggccctgttctacaacttcggcaagagctggaagagcgaccccggcatcatcaaggccaccgaggagcagaagaagaagaccatcgtggagctggccgagaccggcagcctggacctgagcatcttctgcagcacctgcctgatcagaaagcccgtgagaagcaagcactgcggcgtgtgcaacagatgcatcgccaagttcgaccaccactgcccctgggtgggcaactgcgtgggcgccggcaaccacagatacttcatgggctacctgttcttcctgctgttcatgatctgctggatgatctacggctgcatcagctactggggcctgcactgcgagaccacctacaccaaggacggcttctggacctacatcacccagatcgccacctgcagcccctggatgttctggatgttcctgaacagcgtgttccacttcatgtgggtggccgtgctgctgatgtgccagatgtaccagatcagctgcctgggcatcaccaccaacgagagaatgaacgccagaagatacaagcacttcaaggtgaccaccaccagcatcgagagccccttcaaccacggctgcgtgagaaacatcatcgacttcttcgagttcagatgctgcggcctgttcagacccgtgatcgtggactggaccagacagtacaccatcgagtacgaccagatcagcggcagcggctaccagctggtgtag

SEQ ID NO: 13690 - DNA, 651 bp, synthetic construct
  misc_feature 1..651: note = Description of Artificial Sequence: Synthetic coding sequence
  source 1..651: mol_type = other DNA
atgagcaccatccccaagagagccgtgtgccccttcagcacccagagatacggcatctacgagagatgcagagagctggtggaggccggctacgacgtgagacagcccgacaaggagaacgtgaccctgctgcactgggccgccatcaacaacagaatcgacctggtgaagtactacatcagcaagggcgccatcgtggaccagctgggcggcgacctgaacagcacccccctgcactgggccaccagacagggccacctgagcatggtggtgcagctgatgaagtacggcgccgaccccagcctgatcgacggcgagggctgcagctgcatccacctggccgcccagttcggccacaccagcatcgtggcctacctgatcgccaagggccaggacgtggacatgatggaccagaacggcatgacccccctgatgtgggccgcctacagaacccacagcgtggaccccaccagactgctgctgaccttcaacgtgagcgtgaacctgggcgacaagtaccacaagaacaccgccctgcactgggccgtgctggccggcaacaccaccgtgatcagcctgctgctggaggccggcgccaacgtggacgcccagaacatcaaggccatcctgagatgccacatggccctgtag

SEQ ID NO: 13691 - DNA, 1899 bp, synthetic construct; identical to SEQ ID NO: 13689
  misc_feature 1..1899: note = Description of Artificial Sequence: Synthetic coding sequence
  source 1..1899: mol_type = other DNA

SEQ ID NO: 13692 - DNA, 2667 bp, synthetic construct
  misc_feature 1..2667: note = Description of Artificial Sequence: Synthetic coding sequence
  source 1..2667: mol_type = other DNA
atgcttagtcggctgttcagaatgcacggactattcgtcgcctcacacccatgggaagtgatcgtgggcaccgtcacattgacaatttgcatgatgagcatgaacatgtttactggtaataataagatatgtgggtggaattatgagtgtccaaaattcgaagaggacgtcctgagctcagacattattatacttaccattacaaggtgcattgcgattttgtacatttactttcagttccagaatctacgacagcttggttcaaagtatatactggggattgccgggctcttcactatcttcagttccttcgtcttcagtaccgttgtgattcattttctggacaaggaactcactggcctgaatgaggctctgcctttcttcctgctgctgatcgatctgagtcgagcatccaccctagcgaaatttgcgctgagtagcaattcccaggacgaagtgcgcgagaacattgcaaggggaatggccattctgggcccaactttcactttagatgcattggttgagtgcctggtgatcggagtgggaacaatgtcgggggtgaggcaacttgaaattatgtgttgtttcggctgcatgagcgtgctggccaactacttcgtgttcatgacattctttcccgcctgcgtgagtttggtcctggagctgtccagggagagcagggagggcagacccatctggcagctgagccatttcgcccgtgtcctcgaggaggaagagaacaaacccaaccctgtcacccaacgggtgaagatgattatgtcccttgggctggttctcgttcacgctcatagccgttggatcgccgatccttcgccacaaaatagtacggccgatacaagcaaggtgagcctgggtctcgatgaaaacgttagtaagagaatcgagccatctgtctcattgtggcagttctatctttcaaagatgatcagtatggacatcgagcaagtgatcaccctgagccttgctctcctgcttgccgtgaagtatatctttttcgaacagaccgaaacggaatccaccctctcccttaagaatcctataacttctccagttgtcacccaaaaaaaagtgcctgacaactgctgtcggagggaacctatgttagtccgaaacaatcagaagtgtgatagcgttgaggaggagaccggtatcaatagagaacggaaggttgaagtgattaaaccactggtggcggagactgatacacccaaccgcgccacatttgttgtcgggaactcttcactgctggatactagcagcgtactcgtgactcaggagccggaaatcgagcttcctcgcgaacctaggccaaatgaggaatgtctccagatcctgggcaacgctgagaagggagccaagtttctctccgacgctgagatcatccaattagtcaacgccaaacatattcccgcctataaactggagacccttatggaaactcatgagagaggggtgtcgatcagaaggcagctgctgagtaaaaaattgagtgaaccttcttccctccagtacctcccgtaccgcgactacaattacagtctcgtgatgggagcatgctgcgaaaatgtaatcgggtacatgccaattcctgttggcgtagcaggcccactctgtctggatgaaaaagagttccaagtgcccatggcaactaccgagggctgtctagtggcctcaacaaaccgtggctgtcgcgccattggattggggggcggtgcaagtagcagggtgctggcggatggcatgacacgcggccctgtggttaggctacccagagcctgcgatagcgccgaggtgaaagcatggctggagacctcagagggatttgcggtcatcaaagaggctttcgatagcactagccggttcgcgcgcctccagaagttacacaccagcattgcaggacggaatctatatatacgatttcagtctcggagcggtgatgcaatgggcatgaacatgatctccaaaggcacggagaaagcactctctaaacttcacgaatatttcccagagatgcagatccttgcagtgtccgggaactactgcacagataagaagccagctgccattaattggattgagggcagaggcaagtccgtggtatgtgaggccgtgataccagccaaagttgtgcgagaggtccttaaaacaaccacggaggccatgattgaagtgaatatcaataaaaatctcgtcggatcagctatggcggggtccattggaggttacaacgctcatgcagcaaacatagttactgcaatttacatagcatgcgggcaggacgctgcccagaacgtaggctcctctaattgtattacgctgatggaggcttctgggccaactaacgaagacctttatatatcttgtaccatgcccagcatcgaaattggaactgtcggcggtggaaccaatctcctgccccagcaggcctgcctccagatgctgggagtccagggggcctgtaaggataaccctggggaaaacgcgcgccagttggcaagaattgtttgtggcactgtcatggccggcgaactgtcccttatggccgccctcgcggctgggcacttggtcaagtcacacatgattcacaatcggtccaaaatcaatctgcaagatctccagggagcatgtacaaaaaagacagcctag

SEQ ID NO: 13693 - DNA, 2508 bp, synthetic construct
  misc_feature 1..2508: note = Description of Artificial Sequence: Synthetic coding sequence
  source 1..2508: mol_type = other DNA
atgctgagtaggctctttaggatgcatggcctgttcgtggcttctcacccttgggaggtgatcgttggaactgtcacactaaccatatgcatgatgagcatgaacatgttcacaggaaacaataagatttgtggctggaattatgagtgccccaaattcgaggaagacgtactttcctccgatataataattctgactattacacgctgcatcgccatcctgtatatctacttccagtttcagaacttgcggcagttgggctcaaagtacatcctcggcattgctgggctttttacgatcttttcctcctttgttttctccacggtggttattcacttcctagacaaagagctcaccggactcaatgaggccttgccattttttctactgttaatcgatctgagccgcgcttccactctcgctaaattcgctctgtccagcaacagccaggacgaagtgagggaaaatatagcccgtgggatggcaattctgggaccaacgtttacgttggacgcgctggtcgagtgtctggtgatcggcgtcgggacgatgtctggcgtgaggcaactagaaatcatgtgctgtttcggctgcatgtcagtgctcgcaaattactttgtcttcatgacctttttccccgcctgcgtctctctggttttggagcttagccgcgagtcgagggaaggtcggcctatttggcagctctcccattttgccagagtactggaagaggaggagaacaagccaaatcctgttactcaacgagtgaagatgataatgtcattgggcctggtcctggtccacgcacattctagatggatcgccgatcccagccctcagaatagcacggccgatacaagcaaggtctcattgggcctggatgagaacgtttccaagaggatcgagccttccgtgagtctgtggcagttttatctgtccaagatgattagcatggacatcgagcaagtgatcactctcagcctggcactgctgctcgctgttaagtacatttttttcgagcagacagagacagagagtactctgtccttgaagaatccaattacctctcccgtggtcacccaaaaaaaggtgccagataactgttgcaggcgggaaccgatgctagtccggaacaaccaaaaatgcgacagcgttgaggaagagacaggcattaatagggagcgcaaggtagaagtgatcaagccgctggttgccgagacagatacccctaaccgggcaacttttgtggttggaaattcctcactcttagatacctcctcagtactcgtgactcaggaaccggagatcgaactgccacgcgagcctcgcccgaacgaggaatgtttgcagatcttagggaatgcggagaagggggccaagttcctttccgacgccgagatcattcaactggtcaacgccaagcacatccccgcttacaagctcgagacactgatggagacacacgaaagaggtgtgtccatccgccgacaactactgtctaagaaactgagcgagccatcatctctgcagtacctcccctatcgcgactacaattatagcctgcttggtggtggagcgagctctcgcgtgctggcagacggtatgaccaggggccctgtggtgaggcttcctcgtgcatgcgattctgcggaggtaaaggcatggctcgagactagtgaagggttcgcagttatcaaggaggcgtttgactctacctctaggttcgcacggctgcagaagcttcacacgagcatcgccggcagaaacctctacatccgctttcagtcccggtcgggcgacgctatggggatgaacatgatcagcaaaggtaccgagaaggccctgagcaaactgcacgagtactttccagagatgcaaattctcgcagtctcgggcaactactgtacagacaagaaaccagctgcaatcaattggatcgaggggcgcggaaagtcagtggtatgtgaagcggtgatcccagccaaagtcgtccgcgaagtgctcaagactacaaccgaggccatgattgaggtgaacatcaataagaatctggtcgggagtgccatggccggctcgatagggggatacaacgctcacgcagctaacattgtgactgcgatttacatcgcctgcggacaggacgccgcccaaaacgtcgggagttcaaactgcattactctcatggaagcatcaggaccaacgaacgaggacctttatatctcttgtaccatgccgagtatagaaatcgggaccgtgggcggggggactaatctgctgcctcaacaggcatgcctgcagatgcttggggttcaaggggcttgtaaggataaccccggcgagaacgcccgacaactggcccgaatagtttgcggtaccgtcatggccggcgagctgtccctgatggccgccctggcggccggccacttagtgaagagccacatgattcataatagaagcaagataaacttacaggacctccagggcgcatgcaccaagaaaactgcatag

SEQ ID NO: 13694 - DNA, 798 bp, synthetic construct
  misc_feature 1..798: note = Description of Artificial Sequence: Synthetic coding sequence
  source 1..798: mol_type = other DNA
atgttatccaggctcttccgaatgcacggcttgtttgttgcatcacacccttgggaggtgatagtgggcactgttacactcacaatctgtatgatgtcaatgaatatgttcaccgagggcaccgaaaaagccttaagtaaactgcacgagtattttccggagatgcagattcttgcggtgagtggaaattattgcacagacaagaaacctgccgccatcaattggattgaggggagagggaagtccgtcgtatgtgaagcagttattcccgctaaggtggtcagggaagtgctgaagacaacaaccgaggcgatgatcgaggtcaacatcaataagaacctggtcggctctgccatggccggatcaatcggaggctacaacgcccacgccgctaatatcgtgacagccatttatatcgcatgcgggcaggatgcagcacagaacgtgggatcgtcgaactgcatcactctgatggaggcgtccggccctactaatgaggacctgtacatatcctgcactatgccatcaattgagatcgggacagttggcggggggactaacctgttaccacagcaggcctgtctccaaatgttgggggtacagggcgcctgcaaagataatcctggggagaacgctcggcaactcgctcgcatagtgtgtggaaccgtgatggctggcgagctcagcctcatggctgcactagcagcagggcatctcgtcaaatctcatatgatccacaacagatctaagataaacctccaggacctccagggtgcatgtaccaagaagaccgcttag

SEQ ID NO: 13695 - DNA, 57 bp, synthetic construct
  misc_feature 1..57: note = Description of Artificial Sequence: Synthetic coding sequence
  source 1..57: mol_type = other DNA
atgctgtcccgccttttccgaatgcatgggctgtttgtggcgtctcatccatggtag

SEQ ID NO: 13696 - DNA, 336 bp, synthetic construct
  misc_feature 1..336: note = Description of Artificial Sequence: Synthetic coding sequence
  source 1..336: mol_type = other DNA
atgctgtcccgactgtttcgcatgcacgggctgtttgtcgccagtcatccctgggaggtgatcgtgggtaccgtaactttaactatttgtatgatgtccatgaacatgttcaccggaaacaacaagatttgcggatggaactatgagtgtccgaaatttgaggaggatgtcctgtccagcgacatcattatacttacgataactcggtgtattgctatcctgtatatctatttccagtttcaaaatctgcgccagctcggctccaagtatattctcggcattgccggcttgtttaccatctttagcagtttcgtattcagcacagtcgtgatttag

SEQ ID NO: 13697 - DNA, 2667 bp, synthetic construct
  misc_feature 1..2667: note = Description of Artificial Sequence: Synthetic coding sequence
  source 1..2667: mol_type = other DNA
atgctgtcacgcctgttccggatgcacggactctttgtcgcctcccatccttgggaggttatagtcggcaccgttacactgactatctgtatgatgagtatgaacatgtttacagggaacaacaagatatgcggctggaattacgagtgtcctaagtttgaggaagacgttctctcgagtgatatcattatcctgacaattacccgttgcatcgccatcctctatatctatttccagttccagaacctacggcagctcggtagcaagtacattcttggcattgccggactcttcacgatcttctcttccttcgtcttctctacggtcgtgattcattttttagacaaagagttgacaggcttgaatgaagcgcttcccttcttcttactcctcatagacttatcccgggcgagcaccctggcgaagttcgccctcagttcgaacagtcaagacgaagtgagggaaaatatcgccagggggatggccatcctcggccctaccttcacactcgacgccttggtagagtgtctggttatcggagtcggcaccatgtctggagtacgtcagctggaaatcatgtgttgctttgggtgcatgtctgtgctcgctaactactttgtctttatgactttctttccagcatgtgtcagtctggtgctggagctaagtcgggagtctagggagggcaggcccatctggcaactgtcccacttcgcccgcgtgctcgaagaggaggaaaacaagcccaacccagtaacgcagagggtcaagatgattatgtcccttggactggtgctcgtgcatgcccattctcggtggattgctgaccccagccctcagaacagtacagcagacacgtctaaggtgtctctgggcctggacgaaaatgtttcgaaacggatagagccttcagtgtcgttatggcagttctacctcagtaaaatgattagcatggacatcgaacaggtgatcaccctctcattggctctgctgctggcagtgaagtacattttcttcgaacagaccgagacagaatcaactttgtctctgaagaacccaatcactagtccagtcgtgacccagaagaaggtccccgataattgctgtcgtagggaacctatgctggtcaggaacaaccagaaatgtgattctgtagaagaagagacaggcatcaatagagagaggaaagtggaggtcataaaacctctcgtggccgagactgacacccccaatcgggccaccttcgtggtcgggaattcctctttgcttgataccagttccgttctggtcacccaagagccagagatcgagcttccaagggaacctcgcccaaacgaggaatgtttgcaaatcctgggaaacgcagaaaagggggctaaattcctctctgatgctgaaattattcagctggtcaatgcgaagcacattcccgcctataaactggagacccttatggaaacacatgagaggggtgtgtcaatccggagacaactgctcagtaagaaactttccgaaccctcttccctgcaatacctgccctaccgtgactataactactcactcgtcatgggtgcttgctgtgagaatgtgatcggatacatgccaatccccgttggagtagcaggcccgctgtgtctagacgaaaaagaatttcaggtgcctatggcgacaactgaaggctgcctagtggcctccaccaatagaggctgccgagccataggtctaggagggggagcaagttctcgggtcctcgctgacggcatgaccagaggacccgtagtccgcctccccagggcctgcgacagtgcagaagttaaagcttggcttgaaacatccgagggatttgctgtcatcaaagaggcattcgattcaaccagcaggttcgcacggttgcaaaaacttcacaccagcatagctggacgaaacctttatatccgcttccagagccgtagcggggatgcaatgggtatgaatatgatctctaagggtaccgaaaaagctctgtctaagctccatgagtattttcccgaaatgcagatcttggctgtgtccggcaattattgtacagataagaagccagcagcaattaattggatcgaggggcgcgggaagagcgttgtctgcgaagctgtgatccccgcgaaagtggtgagagaagtgctgaaaactacaacggaggccatgattgaggttaacattaacaaaaatcttgtaggaagcgccatggcgggaagtatagggggttataatgctcatgcagctaatattgtaacagcaatttacatcgcttgcggccaagatgccgcccagaacgttggatctagcaattgcattacactaatggaggcctcaggcccaacgaacgaggatctgtacatctcatgtactatgccctctattgaaattggaaccgtgggtggcggcacaaacctgctgcctcaacaggcctgtttgcagatgttaggagtgcagggtgcttgcaaagacaacccaggcgaaaatgcccgccagctcgctcgaatcgtatgcgggactgtgatggcgggagagctctctctcatggcagccctggcagccggacatctggttaagtcccatatgatccacaatcggagtaaaataaacctccaggatttgcagggtgcatgtaccaagaagactgcctag

SEQ ID NO: 13698 - DNA, 2460 bp, synthetic construct
  misc_feature 1..2460: note = Description of Artificial Sequence: Synthetic coding sequence
  source 1..2460: mol_type = other DNA
atgcatagccatccggtctacctcctacctgtgcctgaatttacaagcacatggatcaagatatatttcggctactgttggccctttcacaactttctgaagttctgcatccaatattcatgtcactctctcctgagacagaggatagataggttggaagaagctctgcccttctttctgctattaatcgacttgtcacgggctagtaccttagccaagtttgcactcagctcgaactcacaggatgaagtcagggagaatatcgcccgggggatggccatcttgggtcctacctttactcttgatgccctggtcgagtgcctggttatcggagtaggtactatgtctggggtgcgacagctcgagattatgtgctgcttcgggtgtatgagcgttctcgccaactactttgtgttcatgaccttttttcccgcctgtgtctcattggtgctggaactgtcacgggaaagccgggagggacggcctatctggcaattgagccacttcgctagggtcctggaagaagaggagaacaagcctaatccggtcacacagagagtgaagatgattatgagcctcggtctggtactggtgcacgctcatagtagatggatcgccgacccgtctccccagaacagtactgcggacacctctaaagtcagcctggggctggatgaaaatgtgtcaaaaaggatcgagcctagtgtgtctctctggcagttttatctctctaaaatgattagtatggatattgagcaggtaatcacactaagtttggcattacttctcgctgtgaagtacatctttttcgaacagaccgagactgagtcaacgctatctctcaagaatccgatcactagccccgtagtgacccagaaaaaagtgcccgacaactgttgtagaagggagccaatgttagtgagaaacaaccaaaagtgtgacagtgttgaagaagagactggaatcaatcgggagagaaaggtggaggtgattaaaccattagtagcagaaacggatacgcctaaccgggccacgttcgtcgtcggaaactctagccttctggacacatcctccgtcctagtaacccaggagcctgaaatcgagctgccccgggagccacgccccaacgaggagtgtctgcaaattttgggaaatgcagaaaagggggcaaagtttctctccgatgcagagataatccagcttgtcaacgcgaagcatatccccgcttacaaactggagacactcatggagacacatgagagaggagtatccatcaggcgtcagctcctgtccaagaaactgagcgaaccctcgagcttgcagtaccttccctaccgtgactataactacagcctggtgatgggggcgtgttgcgaaaacgtgattgggtacatgccaattcccgtgggcgtagccggacccctctgtttggatgagaaggaatttcaggtccccatggctaccactgaagggtgtctggtggcatccacaaaccggggctgccgtgcaataggacttgggggtggggcaagtagccgagtgctggccgacgggatgacccgaggcccggtggtgcggctgcctcgcgcctgcgatagtgcagaagtaaaagcatggctcgaaacaagtgagggattcgccgtgatcaaggaagccttcgacagtacttctcggtttgctagacttcagaaactccacactagcattgcaggcagaaatctgtacatccggttccagtcccggagcggagatgcaatgggcatgaatatgatttctaaagggaccgagaaagccctgtccaagcttcatgagtacttcccagaaatgcagattctggccgtgtctggcaactactgcacagataaaaagcccgcggccataaactggattgagggaagagggaaaagcgtggtgtgcgaagccgttataccagccaaagttgtgagggaagtgctaaaaaccaccacggaagctatgattgaggtgaacataaataagaatctggtggggtctgctatggctggttcaataggaggctacaacgcccacgcagccaacatcgtgacggcgatatacatagcttgtggtcaggacgccgctcagaacgttggatccagtaattgtatcacattaatggaggcttcaggccctacaaacgaggacctctacatttcgtgtacaatgccctctattgagattggaacagttggaggggggactaacttacttccccagcaggcgtgcctgcagatgcttggggttcagggggcctgtaaggataaccccggcgaaaacgcacggcagcttgccaggattgtgtgcggcacagtcatggctggcgagctgagtctgatggctgctctggcagcaggccatctcgtgaagtcacatatgattcacaaccggagcaaaatcaacctccaggatcttcagggagcatgcacaaagaaaacggcctag

SEQ ID NO: 13699 - DNA, 1671 bp, synthetic construct
  misc_feature 1..1671: note = Description of Artificial Sequence: Synthetic coding sequence
  source 1..1671: mol_type = other DNA
atggcccgcaccacctctcagctgtacgatgcggtgcccattcagagctccgtggtactttgtagttgtccaagcccatctatggtgagaactcagactgagtcttccactcctccagggattcctggtgggtctcgtcaaggccctgccatggacggcacggccgcagagcctaggcctggcgctggaagtctgcaacatgcccagcctccacctcaaccaagaaagaaacgacccgaggatttcaaatttggtaagatactcggtgagggctcgttcagcactgtcgttctcgctcgcgagcttgccacatcccgagaatacgccatcaagatactggaaaagaggcacatcataaaagagaataaagtaccttacgtaacacgcgaaagggacgtcatgtccagactggaccaccccttcttcgtgaaactgtatttcaccttccaagatgacgagaagttatactttggcctgtcctatgctaagaacggcgaacttctcaaatatatccgcaaaatcgggagctttgatgaaacttgcacccgattctataccgccgaaatagtgagtgcgctggagtacctccatggaaaggggatcattcaccgtgatttgaaaccggagaacattctgctcaacgaagacatgcatatccagatcacagactttggcaccgccaaggtgctcagtccggaaagtaagcaggcgcgggctaatagttttgtggggacagcacagtacgtgtctcctgaactattgactgagaagtcggcctgtaaaagcagcgatttgtgggccctcggttgcattatttaccaactggtggctggcctgccaccctttagggccgggaatgaataccttatattccagaagatcattaagctggaatacgatttcccagagaagttctttcctaaggctagagatctcgtggagaagctcctcgtgttagacgccactaagagattgggatgtgaggagatggaagggtacggccccttgaaggcacacccctttttcgaaagtgtaacgtgggaaaacctgcatcagcagacacctcccaagctgactgcctatctgcccgcaatgtcagaggatgacgaggattgttacggcaactacgacaatctgctcagccagtttgggtgtatgcaggtgagtagctccagctcctcccactccctgagtgccagtgacaccgggctgccccagcgatcaggctcgaacatcgagcaatacatccacgacctggactcgaactcttttgagctcgacttgcagttcagtgaggatgagaaacggttgctgctggagaaacaggcaggaggaaacccttggcatcagtttgttgaaaacaatcttatactgaaaatgggaccagtcgacaagcgtaagggcttatttgcccggcgcaggcagctcttactgacggaaggtccccacttgtactacgtggatcctgtgaataaagtcttgaagggtgaaattccatggtcacaagaactgcgcccagaagcaaagaacttcaaaacatttttcgtgcatacccccaaccggacatactatctgatggaccctagtggcaacgcacataagtggtgcagaaagattcaggaagtatggcggcagagatatcagagccatcctgatgccgcggtgcagtag

SEQ ID NO: 13700 - DNA, 1599 bp, synthetic construct
  misc_feature 1..1599: note = Description of Artificial Sequence: Synthetic coding sequence
  source 1..1599: mol_type = other DNA
atggcccggacgaccagccagttgtatgacgccgtccccatccaaagtagcgtggtgctttgctcttgccccagtccctcaatggtgcgaactcagaccgagtcatccacccctcctggcatcccaggcggatcccgccaagggcccgctatggacggaaccgccgctgagccacgcccaggggctgggtcgctccagcatgcccagccccctccccagccaagaaagaagaggccagaagatttcaaatttgggaaaatcctaggtgaagggagtttttctaccgtggtgctggcaagggagctcgctacttcaagggaatacgctatcaagatactggagaagaggcacatcatcaaagagaacaaagtcccatacgtcacaagggagcgagacgtgatgagcaggctggaccacccgttcttcgtgaaactgtacttcactttccaggacgacgagaagctgtacttcgggttgagctatgccaaaaatggggagctcttaaagtatatccgtaagatcggatcgtttgacgagacctgtacgcgcttttacaccgcagagatcgtgagcgcccttgagtacttgcacgggaagggcattattcatcgagacttaaaacccgaaaatatcctgttgaatgaggatatgcacatccaaattaccgattttgggacagcaaaagtgctgtctcccgaatcaaaacagggggtctctgatctatgggcacttgggtgcataatctatcagctcgtcgcgggccttccaccatttagagcagggaacgaatacttgatttttcaaaaaatcatcaagctcgaatacgatttcccggagaagtttttccccaaggctagagacctggtagaaaaactcttggtgctcgacgccaccaaacggctgggctgtgaggagatggagggttacggacccctcaaagcgcacccattctttgagtcagtgacatgggagaatcttcaccagcagacgccgccgaagcttacagcttacctgccagcaatgagtgaagacgatgaggattgttatggaaattacgataatctgctgagccagttcgggtgcatgcaggtgtcgagttcatccagctcacattctctcagcgctagcgataccggcctaccacagcggtcaggttctaacatcgagcaatacattcatgatttagactcaaactcatttgagttggacctgcagttctctgaggacgaaaaacgacttctactggagaagcaagccggtggaaatccctggcatcaattcgtagagaacaatctgatccttaagatggggcctgtggataagcggaaaggcttattcgccagaaggagacaactattgctgactgagggtccccacttgtattacgtggacccagttaacaaagtgctcaagggggagatcccatggtctcaagaacttcggcccgaggcaaagaactttaaaacttttttcgttcacacgcctaataggacatactaccttatggatccatcgggcaacgctcataaatggtgtcgcaagatacaggaagtgtggcgtcagcgttaccagagccatcctgacgccgccgttcagtag

SEQ ID NO: 13701 - DNA, 1479 bp, synthetic construct
  misc_feature 1..1479: note = Description of Artificial Sequence: Synthetic coding sequence
  source 1..1479: mol_type = other DNA
cgtgcgcaggacgagggcggccactgctggggctccgcctccggccgacgaacactgcgcagacgtcgcgccgcacagaggtgcggtggaggggcaagggccgacgccggaccaatggcgaggaccaccagtcaactgtacgacgcggttcccatacagagtagcgtggttctgtgctcctgcccttcacctagcatggttcggacacaaacagagagctcaacgcctccagggatccccggcggtagtcgccagggaccagccatggacgggacagccgcagaaccacggcccggcgctggcagcctgcagcatgcgcagcctccccctcaacctcgcaagaaaaggccagaggacttcaagtttggcaaaatcttgggagagggctccttttctacagttgttctcgctcgggagctggccacctcaagggagtatgcgattaaaattttagaaaaacgacatattattaaggagaacaaggtgccctatgtcacaagagagcgcgatgtcatgtctcggttggaccatcctttcttcgttaaactctactttacctttcaagatgatgaaaaactgtacttcggtctgtcctatgccaagaacggtgagctcctgaaatatatacgcaagatcggaagtttcgatgagacctgtacaaggttttacactgccgagatcgtgtcagcgctggagtacttgcatggaaaggggatcattcatcgggacctgaagccagagaatatcctccttaatgaggacatgcatatacagatcacggacttcgggactgcaaaagtcctgtcgcctgaaagcaagcaggcacgcgccaatagcttcgttggtacagctcaatacgttagcccagagcttttaactgaaaaatctgcatgcaaatcgtccgacttatgggctctgggatgcattatctatcagctggtggctggattaccacctttcagagcaggcaacgagtatctcattttccagaagattataaaactggaatacgactttcccgaaaagttctttccaaaagctcgtgatcttgttgagaaattactcgtgctggacgcgaccaagagactcggttgcgaggaaatggaagggtacggccccctgaaagctcaccccttcttcgagtcggtgacctgggagaacctgcaccagcagacacctcccaagttgaccgcctatctaccagccatgtctgaggatgatgaggactgttatggtaactacgacaacctgcttagtcagttcggttgtatgcaggtgtcttcttcatcaagctcccactccctttccgcctccgacactggactcccccaaagatcgggaagcaacattgaacagtatatccacgacttggacagcaacagcttcgaactcgacttgcaattctccgaggacgaaaagcggctcctgctagagaaacaggcgggagggaacccttgtctgacggggcgcattatttag

SEQ ID NO: 13702 - DNA, 1290 bp, synthetic construct
  misc_feature 1..1290: note = Description of Artificial Sequence: Synthetic coding sequence
  source 1..1290: mol_type = other DNA
atggccagaaccacatcccagctgtatgatgccgttcctatccagtcaagcgtggtgttgtgctcctgcccaagtccatcaatggtgagaactcagacagagagtagcacgccccccgggatacccggcggctccagacagggacccgcaatggacggcaccgccgccgagcccaggccgggagccggctctctgcaacacgcacagccccctccccagcctcgtaagaagcgccctgaggacttcaaatttggtaagatcctgggcgagggatccttttctaccgtagtcctcgcgcgtgagcttgccacaagccgcgaatacgcaactagggctaattccttcgtaggtaccgcgcagtacgtgtcacctgaactgctgaccgaaaagtctgcttgtaaaagttccgatctgtgggcattaggctgcataatttatcagctagttgctggcctgccccccttcagggccgggaacgagtatctgattttccaaaaaatcatcaagctagaatacgacttccctgaaaaattttttccgaaggctagagatctggtagagaaactcctggtactagacgctaccaagagattggggtgcgaggagatggagggctatggtcccttgaaggcacaccctttcttcgagagtgttacatgggagaacctgcatcagcaaacaccacccaagttgaccgcctatttgccagccatgagcgaggacgatgaagattgttatggcaattacgataatttattgtctcaattcggatgcatgcaggtgtcttcgtcatcttctagccattcactgagtgctagcgacaccgggctgccccagcggagtggctccaacatcgagcagtatatccacgacttagattctaattcttttgaactggaccttcagtttagcgaagacgaaaagcgcttgctgcttgagaagcaagccgggggcaacccatggcaccagttcgtcgaaaacaacctgatcctgaagatgggccctgtcgacaagcgcaagggcctttttgctagacgccgccagctgctgttgacagagggtcctcatctttactatgtggatcccgtaaataaggtgcttaaaggggagattccttggtcgcaggagctgcggcctgaagccaagaatttcaagacatttttcgtgcatacacccaatagaacctactatctgatggatccaagcgggaacgctcataagtggtgtcgtaagatccaggaagtctggcgccagaggtaccagtcccacccagatgctgccgtgcagtag

SEQ ID NO: 13703 - DNA, 5121 bp, synthetic construct
  misc_feature 1..5121: note = Description of Artificial Sequence: Synthetic coding sequence
  source 1..5121: mol_type = other DNA
atgggcgtgccgaagttttatagatggatcagtgagcggtacccttgtctctctgaagtggtaaaggaacaccagattcccgaatttgataacctctatctggacatgaacggtataatccaccagtgttcccatccaaatgacgacgacgtgcattttcgcatctcagatgacaaaattttcaccgatattttccattacctagaagttttattccgaataataaaaccaaggaaagtgttctttatggcggtggacggagtggccccacgcgcaaagatgaaccaacaacggggccggaggtttagatctgccaaagaagctgaggacaagattaaaaaggccatcgagaagggggagaccctccccactgaagctcgttttgattcgaactgtattaccccgggcaccgaattcatggcaaggctgcacgagcacctcaagtatttcgtgaacatgaagatttctacagacaagtcttggcagggcgtgaccatctacttttccggccacgagacgccaggagagggtgagcacaaaatcatggaattcatccggtctgagaaagccaagcccgaccacgatcctaacacacggcactgcctatacggccttgatgctgacctgattatgctgggactgacttctcatgaggctcatttctctctcctgagagaggaggtaaggttcggcgggaagaagactcagagggtgtgtgcccctgaagagaccactttccatttactgcatctgtctctgatgagggaatacattgattacgaattctctgtgcttaaggagaagattaccttcaagtacgacatcgaacgtataatcgatgattggatcttgatggggttcctcgtcggaaatgactttatcccgcatcttccccatctccacataaaccatgacgcactgcctctactttacggtacttacgtgactatactacccgagttggggggatatattaatgaatcagggcatcttaatctgccccggtttgagaaatacctcgtaaaactgagcgattttgacagggagcacttcagtgaagtttttgtcgatcttaaatggttcgagtctaaggtgggaaacaagtatcttaacgaggctgcaggcgtggctgccgaagaagctcgtaactataaggagaagaagaaactcaagggccaggagaattcattatgctggactgcgttagataaaaacgagggcgaaatgatcactagtaaagacaatctggaggatgagaccgaggacgatgatctttttgaaactgagtttcggcaatataaaaggacttactatatgacaaaaatgggagtggacgtggtaagcgatgactttttggctgaccaggccgcatgctacgtacaagcaatccagtggatcctgcactattattatcacggcgttcaatcctggtcttggtattacccctaccattacgcaccatttctctccgacatacataatatctctaccttgaagattcatttcgagctaggaaagccgtttaaaccattcgagcagttactagcagtcctgccagcagcaagcaaaaatcttctgcccgcttgttaccagcaccttatgacaaacgaggacagccctatcatagagtactacccgcctgacttcaagaccgatctcaatggaaagcagcaggaatgggaggctgtcgttctgataccctttattgatgagaaacggttgctggaagccatggagacttgcaaccactccctaaagaaagaggagcgcaaacgaaatcagcactccgagtgcctgatgtgctggtacgatcgagacactgagttcatctatccaagcccatggcctgagaaattcccagctattgaacgctgttgtacaaggtataagatcatcagtctggacgcttggcgggtcgacataaacaagaacaagatcacaagaatcgaccagaaggccctgtatttttgtggattcccaacgctcaaacacatcaggcacaagttctttctgaagaagagcggtgtgcaggttttccagcagagtagcagaggcgagaacatgatgctcgagatccttgtcgatgcggagtcagacgagttaacagtcgaaaatgttgctagttctgtgttaggtaagtctgtgtttgttaactggccccacctggaagaagcccgtgtcgtcgccgttagtgatggtgagacgaaattctacttggaagagccaccggggacccaaaaattgtactcggggaggacagcccctcctagtaaggtcgttcacttgggtgataaggagcagagtaactgggcaaaggaagtccaggggatatcagagcactatttgcgacgcaagggaataataatcaatgaaacgtcagcagttgtgtacgcacagcttttaactggcagaaagtaccagatcaatcaaaatggagaggtccggttagaaaaacagtggtccaagcaagtagtgccattcgtgtatcaaacgatcgtcaaggacatccgagccttcgatagtaggtttagcaacataaagacattggacgatcttttcccccttcgctcaatggtctttatgctggggactccttattacggctgcacgggggaggtgcaagactctggggatgtcatcacagaagggcgtatcagagtcattttttcaattccttgtgagcctaacctcgacgctctgattcagaatcagcataagtactctattaaatacaatccaggatacgtacttgcatccaggctgggggtctcgggctatctggtttctaggtttacaggttctattttcattggccgaggatccaggcggaatccccatggggatcacaaagcaaatgtaggcctgaatttaaagttcaacaaaaaaaatgaggaagtgcctgggtacacgaagaaagtgggcagcgaatggatgtatagcagtgccgcagaacagctgctcgcagagtatctggaacgggcccccgaattgttcagttacatagcaaaaaactcacaggaagatgtcttttatgaggacgacatctggccgggcgagaacgagaatggcgccgaaaaggtgcaggaaatcataacatggttgaaagggcacccggtgtcgacactgagccgatcctcttgcgatctgcagatcctggatgccgccatcgtggagaaaatagaggaagaagtggaaaagtgtaaacagcgcaaaaataacaaaaaggttcgagtcactgttaagccccatctgctctaccggccccttgagcaacaacacggagttatccccgatagagatgcagaattctgcttgtttgatcgggtggttaatgtgcgggagaatttcagtgtgccagtgggtctgcgaggaaccattattgggattaagggcgcaaatcgggaagcagacgtgctgttcgaagtgctattcgacgaagagtttcccggaggcctgacaatcagatgtagtcccgggaggggctataggttacccaccagcgcgctcgtaaacctatctcacgggagccggagtgagaccggcaaccagaaactcaccgccattgttaagccacagcctgcggtgcaccagcacagttcaagtagctctgtctcctcaggccatttaggcgccctaaatcactccccccagtccctctttgtaccaacacaggtccctacaaaggatgacgatgaattttgtaatatatggcagtcattacagggctcaggaaaaatgcagtatttccagcccaccatccaggaaaaaggagctgtcttgccccaggagatttcccaggtgaatcagcatcacaaatcaggctttaacgacaatagtgttaaataccaacaaaggaaacacgacccccatcgaaaatttaaagaagaatgtaaatctcctaaggcagaatgttggagccaaaagatgtctaataagcagcctaacagcgggattgaaaatttcctcgcctctctcaacatttctaaagaaaacgaggtgcagtcctctcatcatggggaaccccctagcgaagaacatctgtcccctcagagcttcgcgatgggtacccggatgctcaaggagatattaaaaatcgatggttctaacaccgtcgaccacaagaatgagattaaacagatcgccaacgagatcccagtcagctccaatcgacgggatgagtatggcctgccctctcagccaaaacagaacaaaaagctggcctcctacatgaacaaacctcactccgcgaatgaatatcataacgttcaatctatggacaatatgtgttggcccgcacctagccaaatccctcccgtgagcaccccggtgacggagctctccaggatctgctccctggtggggatgccgcagccagatttctcattccttcgaatgcctcagaccatgaccgtgtgccaggtcaaacttagcaacgggctcctcgtccacggcccccagtgccacagtgagaacgaagccaaagaaaaagctgccttattcgcacttcagcaacttgggagcctgggcatgaatttccctcttccgtcacaagttttcgccaattacccaagtgcagtgcctcctggcacaatcccaccggcttttcctcctccgaccggatgggatcactacggcagcaactatgccctcggggccgccaacattatgccctctagtagccacctgttcggctccatgccatggggaccaagtgtgccagtaccaggcaagcccttccatcacacattgtattctggtaccatgcccatggccgggggtattcccgggggggtgcataatcagtttatcccgttgcaagtgacaaaaaagcgcgtcgcgaacaagaaaaattttgagaacaaggaagcacaatcctctcaggcaacacccgtccagacctcacagcctgattcctcgaacatcgtgaaggtgagtccccgcgagtcaagcagcgcttcgcttaagtcctcgcccattgcccaacctgcatctagtttccaagtggaaaccgccagccaaggtcatagcatcagccaccataagagcactcccatcagctcgtctcgaagaaagtctcggaaactggctgtcaatttcggtgtgtctaaaccgagcgaatag

SEQ ID NO: 13704 - DNA, 5085 bp, synthetic construct
  misc_feature 1..5085: note = Description of Artificial Sequence: Synthetic coding sequence
  source 1..5085: mol_type = other DNA
atgggcgtccctaagttttatcgatggatctccgaaagatatccatgtctcagtgaggtggtgaaggagcatcagattcccgagttcgataacctgtatttagatatgaacgggataatacaccagtgttcccacccaaacgatgatgatgtccactttcggattagtgatgacaaaatcttcacagacatttttcattatctcgaagtgctctttcggattatcaaaccaagaaaagtgttctttatggccgttgatggagtagccccccgagccaagatgaatcagcagcgcggaagacgctttagatccgctaaagaagctgaagataaaataaaaaaggccatcgagaaaggtgagacgctgcccaccgaggccaggtttgacagcaactgtattacgccgggcaccgaattcatggccaggctgcacgaacacctcaagtacttcgtaaacatgaaaatctctacagacaagtcgtggcagggcgtgaccatctatttctcgggacatgagactcccggagaaggtgaacataagattatggaatttataagatccgaaaaagccaagcctgatcatgatcctaacacaaggcactgtctgtacggccttgatgctgacttgatcatgctgggcttgacaagtcatgaagcccacttctctcttcttcgtgaagaggtgagattcggaggcaagaaaacacagcgggtgtgcgcccccgaggaaacgacattccacctgctccacctgagcctcatgagagagtacatcgattacgagttttctgtgcttaaagaaaagattacatttaagtacgatattgaaaggatcatcgacgactggattctgatgggcttccttgtgggcaacgacttcatcccccatcttcctcatttgcatattaaccatgacgccttgccgctgctatacggaacgtacgttacaatcctgcctgaattaggcgggtatatcaacgaaagcggccaccttaatctgccccggttcgagaaatatttggtcaagctgtctgacttcgaccgcgaacacttctcggaagtcttcgttgatctaaaatggttcgagtccaaagtgggcaataagtacctcaacgaggccgcgggggtggccgcagaggaagcaaggaactataaggagaagaagaagctgaaaggccaggaaaactctctttgttggacagcattggacaaaaacgagggggaaatgattacctctaaggacaacttggaggacgagaccgaagacgacgacctgttcgagacggaattccgccagtacaagcgcacctattacatgactaagatgggggtagatgttgtgtcggatgacttcctggcggatcaagcagcctgttatgtccaagccatacagtggatcctccattactattatcatggagtacagtcttggtcctggtattatccataccactacgccccgtttctgtccgatattcacaacattagtacactgaagatccacttcgagctgggcaagccatttaaaccatttgaacagcttctggctgtattacctgcggctagcaagaacctcctgccagcctgctaccagcacctgatgacaaatgaggactctcctattattgagtattacccgccagattttaagacagacttaaatggtaagcaacaggagtgggaggctgtagttctcattccgttcatcgacgagaaacggcttcttgaggcaatggagacctgcaatcattccctgaagaaagaagagcgtaaacgcaatcagcattctgagtgcttgatgtgctggtatgaccgggacactgaatttatctaccccagtccctggcctgagaagttccctgcaattgagcgatgctgcacacgatataagatcatcagcttggacgcatggcgcgtggacatcaacaagaataagattacacggatcgatcagaaagcgctgtacttttgcggctttcccacacttaaacacattagacataaattttttcttaaaaagagcggggtgcaggtattccagcagtcttcacgtggcgaaaacatgatgcttgagattctagttgacgccgagtcagatgagctgaccgttgagaacgtagccagtagcgtcctagggaagagcgtgttcgtgaattggccgcacctggaggaggcccgcgtggtagcagtgtccgacggagaaactaagttctatctggaggagccacctgggacacagaaactctattcaggacggacagcaccgcccagcaaagtagtgcaccttggcgataaagagcagtcgaactgggccaaggaagtccagggtatttctgaacactacctacgtagaaaaggaattatcatcaatgaaaccagtgctgtcgtgtatgcccagttgcttacgggccgcaaatatcagatcaaccagaacggcgaagttcgcttagagaaacagtggagcaagcaggtggtgccattcgtctaccagaccatcgtgaaggatatccgcgccttcgacagccgcttcagcaatattaaaactctggatgacctttttccgttgagatcgatggtgtttatgttaggcacaccttactacggctgtactggcgaggttcaggactctggcgatgtcatcactgaggggagaattcgagtgatatttagcatcccgtgcgaacctaaccttgacgccctcatccaaaatcaacataagtatagcattaaatataacccaggctatgtactagcctcaagattaggggtgtccggctacctggtatcccggttcacaggatctatcttcataggcaggggtagtcggaggaatcctcacggggaccacaaagccaatgtgggcctgaaccttaaattcaataagaaaaacgaagaggtgcccggttacacaaagaaggtgggcagcgaatggatgtactcaagtgccgccgaacaattgctggccgagtaccttgaacgagcccccgagctcttcagttatattgcgaagaattctcaggaagatgtgttttatgaagatgatatttggcctggagagaacgagaatggcgccgagaaggttcaggagatcattacatggcttaaaggacaccccgtctccacactgtcgagatcatcctgtgacctccagatcctggatgctgcgattgtagaaaaaatagaagaagaagtcgagaagtgtaagcagcgcaaaaataacaaaaaagtcagagttaccgttaagccccacttattgtatcgacctctggagcaacagcatggtgtgatcccggatagagacgccgagttctgtcttttcgatcgagtcgtgaacgtgcgggaaaacttctccgtgcccgtaggcctacggggaaccatcataggaatcaaaggagccaaccgcgaggccgacgtcctgtttgaggtgttatttgacgaggagtttccgggaggtctgacgatacgctgctcacccgggaggggttacagactgccaacatcagccctggtgaaccttagccatggcagtcggagtgagactgggaaccagaagctgacagccattgttaaacctcaacctgctgttcaccagcacagtagttcttcatctgttagttctggtcatctgggcgctttgaaccactccccccaaagtctcttcgtgcctacccaggtgcctacaaaggatgatgacgaattctgcaatatttggcagtcattgcagggatcagggaaaatgcagtacttccagccaacaatccaagagaagggtgccgttctcccacaggagatttcgcaggtcaatcaacaccacaaatcaggcttcaacgataattctgtcaaatatcagcagagaaagcacgatccacaccgcaagtttaaggaagagtgcaagagccctaaggccgagtgttggagccaaaagatgagcaacaagcaacctaattctgggatcgaaaatttcctcgcctccttgaatatatcaaaggagaacgaagtgcagtcatcccatcacggagagccccccagtgaggaacatcttagcccgcagagcttcgctatgaagggtactcgcatgctgaaggagattctgaaaattgatggatccaatactgttgatcacaagaatgagattaagcagattgcgaatgagattccagtcagttcgaatagacgggacgaatatggtctgccttctcagcctaagcaaaataagaagctggcgtcttatatgaataagcctcactctgccaacgaatatcataacgtgcagagcatggataatatgtgctggcccgcccccagccaaatccctcccgtatccacacccgtcacagagctcagcagaatatgtagcctcgtggggatgccccagccggatttttcattcctgcgcatgccacagaccatgaccgtgtgccaggttaaactgtcgaatggcctgttggtgcatggaccccagtgtcactccgaaaatgaggccaaagaaaaagccgcgctttttgccctgcaacaattgggatcattaggaatgaattttccacttccctctcaggtgttcgccaactatccttccgctgtgcctcccggcactatccctcctgcgttccctccgcccacagccaatatcatgccatcttcttcacatctctttggctctatgccctggggcccatctgtacctgtgcctgggaagccattccaccacacactgtattcaggtactatgcctatggctggtggcattcctggtggagtgcacaaccagttcatcccattgcaggtcacaaagaaacgggtggcaaataaaaagaacttcgaaaataaagaggcccagagcagtcaagccactcctgtgcagacatcacaaccagacagtagcaacatcgtcaaagtgtcaccccgcgagtcctctagtgcaagcctgaagtcctccccaattgctcagccggctagctcatttcaagttgaaaccgcgtctcagggacattcaatctcccatcacaagtctactccgatttcaagcagtcggcggaagagtaggaagctggcagtgaacttcggcgtgtcaaagcctagtgaatag

SEQ ID NO: 13705 - DNA, 1380 bp, synthetic construct
  misc_feature 1..1380: note = Description of Artificial Sequence: Synthetic coding sequence
  source 1..1380: mol_type = other DNA
atgggcgtaccaaagttttacagatggatcagtgaaaggtacccttgtctgtccgaggtggtgaaagaacaccaaatacccgaattcgataacctttatttagatatgaacggtatcatccatcagtgcagtcaccccaacgacgacgacgtgcactttagaatctctgacgacaaaatcttcactgatatcttccactacctggaagtactgtttcgcattataaagcctagaaaggtgttctttatggcggttgacggggttgctccccgagcgaaaatgaaccagcagagaggtcggcgattccgttccgccaaggaagcagaagataaaataaaaaaggccattgaaaaaggtgagaccctgcccaccgaggctagatttgattctaattgtatcaccccagggacggagttcatggctcgactgcatgaacaccttaagtattttgtcaatatgaagatcagcacagacaagtcttggcaaggggttaccatatatttcagcggccacgagacaccaggagagggagaacacaagattatggagtttatcagatcagaaaaagcgaaacccgatcacgatccgaacacaaggcactgcctgtacgggctggatgccgacctgattatgctgggactaacctctcacgaggcacacttcagccttctgcgcgaggaagtgcgctttgggggaaagaagacccagcgagtatgcgcaccagaagaaacaacctttcaccttctgcatctcagccttatgcgcgaatacatagactacgagttctctgtcctgaaggagaaaatcacatttaagtatgatattgaacgcattatcgacgactggattttgatgggctttctggtgggcaatgactttatccctcatctccctcatctgcatattaatcacgatgcgctgccgcttctgtacggcacctatgtgacaattttgccagagcttggaggctatatcaatgagagcggacaccttaaccttccacgctttgaaaagtacctcgtgaagttgagcgattttgaccgagagcattttagcgaggtatttgtcgatctgaagtggttcgaaagcaaagtggggaacaagtatctgaacgaggccgcgggcgtggccgctgaagaggctagaaattacaaggagaagaaaaagcttaaaggccaggaaaactccctgtgctggacggcactggacaaaaatgagggcgagatgataacaagtaaggataacctggaagacgaaacagaagacgacgatctgttcgaaacagagtttcgacagtataagagaacgtattatatgaccaaaatgggcgtagatgtggtcagcgagtatgtatttgcaaatgcgttcatcctaaagtag

SEQ ID NO: 13706 - DNA, 750 bp, synthetic construct
  misc_feature 1..750: note = Description of Artificial Sequence: Synthetic coding sequence
  source 1..750: mol_type = other DNA
atgctcggcttgacatcccatgaagctcacttctctttactccgcgaggaggttaggttcggagggaaaaaaacacagagagtttgtgcacccgaggagacaaccttccacttgttgcatctcagcttgatgagagagtatatcgattacgaatttagcgtgctgaaggagaagatcacatttaagtatgacatagaacgtatcattgatgactggatcttaatgggctttttggtcggaaatgatttcatcccccacctcccgcatcttcacatcaatcacgatgctttacctttgctgtacgggacatacgtgactattttgcccgagctcggcgggtatattaatgagagcggtcacttgaaccttccccgcttcgaaaaatatctggtcaaactatccgactttgaccgcgagcacttcagtgaggtctttgttgacttaaagtggtttgaatccaaagtgggcaataaatatctgaacgaggctgctggcgtggccgctgaggaggctaggaattacaaggagaagaagaagctgaaagggcaggagaattccctgtgttggaccgcccttgacaaaaatgaaggcgaaatgatcacgtctaaagataatttggaggatgaaacagaggacgatgatctattcgagactgaatttagacagtacaaacggacttattacatgaccaagatgggcgtagacgtggtatccgaatacgtctttgcaaacgctttcatcctgaaatag

SEQ ID NO: 13707 - DNA, 3483 bp, synthetic construct
  misc_feature 1..3483: note = Description of Artificial Sequence: Synthetic coding sequence
  source 1..3483: mol_type = other DNA
tagacaaatgaggactcccccataattgagtactacccccccgacttcaagacagacctcaacggcaagcagcaggagtgggaagccgtcgtgctgattcctttcatcgacgaaaggttactggaggctatggagacctgtaatcactcactaaagaaagaagagagaaaaaggaaccagcatagtgaatgcttgatgtgttggtacgacagggacaccgagtttatataccctagtccatggccagaaaagtttccagcgatcgagagatgctgcactaggtataagatcatctccctggacgcctggcgggtcgatattaataagaacaaaatcaccagaattgaccagaaagcactctatttctgcggattcccaacactgaaacatatcagacacaaatttttcttgaagaaatctggcgtgcaagttttccagcagtcctcccgcggagagaatatgatgctggaaatcctggtcgacgcagagtcagatgagctcacggtcgaaaatgtggcatctagtgtgctcgggaaaagtgtctttgtgaactggccgcatcttgaggaggcaagagtagtcgccgtcagcgatggggagaccaaattttatctggaggagcctcccgggactcagaaactttattccggtcggactgcacccccttctaaggtggtgcacctgggcgataaagagcaatcaaactgggccaaagaggtgcaaggaatctctgagcattacctgcgccggaaggggatcattatcaatgagacctcagccgtcgtctacgctcagttgctgacgggtcgaaagtaccaaatcaatcagaacggggaagtccgactggagaaacaatggtcaaaacaagtggtccccttcgtatatcagacaattgtgaaggatatccgtgcttttgactcccgcttctctaatattaagaccctggacgacttattcccccttagatccatggtgttcatgctcggcaccccgtattacggctgcaccggagaagtccaggattcaggcgacgtgatcaccgaggggaggatccgtgtgatcttcagcatcccatgcgaacctaacctggatgctctaattcagaatcaacacaaatactcgattaaatacaaccctggatacgtgttagcatcacgcttgggtgtgtcagggtatttagtgtcgagattcactggctccatctttatcggccgtggatccaggaggaatccccatggcgaccataaagcaaacgttggtctgaatcttaagtttaataagaaaaatgaagaagtcccaggttatacaaagaaggttggttctgaatggatgtactcatccgccgctgagcagctgttagcggaatacttggagagagctccggaactgttttcatacatagcaaagaattctcaggaagacgtgttttacgaggatgatatctggcctggagagaacgagaatggggctgaaaaggtgcaagagatcattacctggctaaaggggcatcccgttagcacgctgtctagaagcagctgcgacctccagatactggatgccgcgatcgtggagaaaattgaggaagaagtcgagaagtgtaagcaaaggaaaaacaataagaaggtcagggtgaccgtcaagccccatctgttgtatcgtcccctggagcagcagcacggtgttattcccgaccgggacgctgagttttgccttttcgatagagtcgtgaatgtgcgcgaaaatttttcagttcccgtggggctacgtggaacaattatcggcattaagggggctaaccgagaagccgacgtcctttttgaagtgctattcgacgaagagttccccggaggcctcaccattcggtgttcccccggcaggggttaccggctcccaacctctgctctggttaacctctctcacggatctaggtctgagaccgggaatcaaaagctgaccgcgattgtgaaacctcaaccggctgtacaccagcactcttcaagtagctcggtgtcatctggccatttgggtgccctgaaccatagcccccagagtctgttcgtaccaactcaagtgcctactaaagacgacgacgagttctgtaatatctggcaatccctgcagggctcgggaaagatgcagtatttccagccaaccattcaagaaaaaggagcggttttgcctcaagaaatatcccaggtcaaccaacatcacaagtctggatttaatgataatagcgttaaatatcagcagcggaagcacgacccacataggaaatttaaggaggagtgcaagtccccaaaagctgagtgctggtcccagaagatgtccaacaaacagcctaatagcgggatcgagaactttcttgcctctctcaatatctctaaggaaaatgaagttcaatcgtcacatcatggcgagcccccctccgaagagcacctgagccctcagtcctttgccatgaagggtactagaatgctcaaggagattctgaagattgatgggagcaacacagtcgaccataaaaacgaaataaaacagatagctaatgagattccggtgagcagcaaccggagagatgaatatggtctgccatcccagccaaagcagaataaaaaattggcctcgtacatgaacaaaccccattctgccaacgaatatcataacgtgcaatccatggacaacatgtgttggcctgcgccttcccagatcccccccgtaagtaccccagttacggagcttagcagaatctgctccctcgtgggcatgccccaaccagacttctcgttcctcagaatgccacagaccatgaccgtgtgtcaagtcaagttgagtaacgggttgctcgttcatggtccccagtgccattcagaaaacgaagcaaaggaaaaggcagctctttttgccttgcaacagctcgggtcgcttggtatgaacttccctcttccatcccaagttttcgcaaactatcctagtgccgtcccaccagggacaattccccccgcctttcccccccccaccgccaatatcatgccctcttctagccatctctttgggagcatgccctggggcccctcagtgcccgtgcccggtaagccattccaccacactctgtattcaggcaccatgccaatggccgggggcatccctggaggagttcacaatcaattcatcccactgcaggtaactaaaaagagggtggcaaacaagaaaaactttgagaacaaggaagcgcagtcctcccaagcgaccccagtgcaaactagtcagcctgacagttctaatatcgtgaaagtaagtccgcgggaaagttcctcggcaagcctgaagagctcccctatcgcccagccagcctcatcttttcaggtggagacggcctcccagggtcacagtatatcccaccacaagtctactcccattagtagctcgaggcgcaaaagtagaaaactggcggtcaacttcggtgtttccaaaccatctgaatag

SEQ ID NO: 13708 - DNA, 1233 bp, synthetic construct
  misc_feature 1..1233: note = Description of Artificial Sequence: Synthetic coding sequence
  source 1..1233: mol_type = other DNA
atgccagcacgcgcacttctaccccgcaggatggggcatcgcacgctcgcaagcacgcccgccttatgggccagcatcccatgcccgagatccgagctaaggctggatttagtgctcccaagtggacagtctttccgttggcgcgaacaaagccccgcgcattggtctggtgtcttggccgatcaggtctggactctcactcagacagaggagcagctgcattgtactgtgtacagaggagataaatcccaggccagccggcccacccccgacgagctggaagccgtgcgcaagtacttccagctcgatgtcactcttgctcagttgtatcaccattggggctctgttgatagccacttccaggaggtggcccaaaagttccagggggtaagattactgcgacaggaccctatcgaatgcctgtttagctttatctgctcttcaaacaacaacatagcaagaattactgggatggtcgaacgcttgtgccaggcttttgggcctcggcttatacaattggatgatgtgacttatcacggattcccatccctgcaggcattagctggccccgaggttgaggctcatctgcggaagttaggcctcggataccgcgctcggtatgtctctgcctctgcgagggccatcttggaagagcagggggggctcgcttggctgcagcagctgcgagaaagctcctacgaggaagctcacaaagcactttgtattttgcctggggtgggtaccaaagtagctgactgtatttgccttatggcgctggataagcctcaagccgtgcccgtggatgtacatatgtggcacatcgcccagcgtgattactcttggcatcccaccacatcccaagccaaaggcccctcaccacagacaaataaggaactggggaactttttcagatcgctctggggcccttacgccggatgggctcaggctactcccccatcctacaggtgttgtagcgtccccacctgcgctaacccagcgatgctcagaagtcaccagcagagcgcagagcgggtgccaaaagggcgcaaggccagatggggcaccctggacaaagagattccccaggcccctagtccacccttccctacctccctctcgccttctccaccatccctgatgctgggtcggggactccccgtgacgaccagcaaagccagacatccacaaataaaacagagcgtgtgcacaacacgatggggaggcggttactag

SEQ ID NO: 13709 - DNA, 1071 bp, synthetic construct
  misc_feature 1..1071: note = Description of Artificial Sequence: Synthetic coding sequence
  source 1..1071: mol_type = other DNA
atgcccgccagagccctgctgcccaggaggatggggcataggaccttggctagtacccctgccctgtgggctagtatcccctgcccgaggagcgaactcaggctcgatctggtcctcccgtccggacaatcttttagatggagagagcagagccctgcccactggtcaggagtcttagcagatcaggtttggaccttaacgcagacagaggagcagcttcactgcaccgtgtatagaggggataagagccaggcgtccaggccaactcctgacgagctcgaagccgtgcgtaaatacttccagcttgacgttactcttgcccaactgtatcatcactggggctctgtagatagccacttccaagaggtggcccaaaagttccagggagtacgcctgcttcgccaagatcccatcgaatgtctcttcagctttatctgctcctccaataacaacatcgcccggattacgggaatggtggaacgcctctgtcaggccttcgggcccagactaattcagcttgacgatgtcacataccacggatttccaagcctgcaagctctggctggcccggaggtggaggcccacctgcggaaactcggcctgggatatcgtgccagatatgtttcagcctccgctagagccattttggaagaacagggtggcttggcttggctccagcagctccgggaatctagttatgaagaagcacataaggcgctttgcattcttccaggagtaggcacgaaggtcgccgattgtatctgcctgatggccctcgataagccacaggcagtccccgtggacgtgcacatgtggcatattgcacaacgcgattattcatggcatccaaccacatcccaggccaaaggtcccagtcctcagaccaacaaggagctaggaaacttcttcagatccctgtggggcccatacgcgggttgggcccaggccctgtgtcaggtgatcacaactttcatgaccttcctggggccccatcggttggatcagatgccccccgaggagctccaaacctcgtcctcccgccttggcggccctccctggcaatgcatctag

SEQ ID NO: 13710 - DNA, 1275 bp, synthetic construct
  misc_feature 1..1275: note = Description of Artificial Sequence: Synthetic coding sequence
  source 1..1275: mol_type = other DNA
atgcctgcaagagcacttctgcctagacgcatgggacatcggacactcgcgtccaccccagcattatgggcatctattccctgtccccgtagcgagctccgcctggatctggtgctcccttctggccagtccttccggtggagggaacagtcacctgcacattggtccggtgtccttgccgaccaagtttggactctgactcaaacagaagagcagctgcactgcaccgtttaccgcggtgacaagtcccaagcctcaagaccaactcctgatgagctggaggccgtcaggaagtacttccagctggatgtcaccttagcgcagctgtatcatcattggggaagcgtggatagccacttccaggaagttgcccagaagttccagggcgttaggttgcttcgacaggatccgattgaatgtcttttttcctttatatgcagtagcaataacaatatcgcccgcataacaggtatggtcgaacgcctgtgccaggccttcggtccacgactgattcagctggacgacgtgacttatcatggattcccctccctacaagcactggccggaccggaggtagaggcccacttaagaaaactcggactcggctaccgggcgcgctatgtgtcggctagtgcccgcgctatcctggaagaacaggggggcttagcttggctgcagcagctgagagagagttcctacgaagaagcgcacaaagctctatgcattttgccgggtgtggggacgaaagtggccgattgcatttgcctcatggcgcttgataagcctcaggccgtgcctgttgatgtgcatatgtggcacatcgctcagcgagattactcctggcaccctacaacgtcccaggcaaagggcccctctccacagaccaacaaagaactcggtaacttttttagatcactgtggggtccgtacgccggctgggctcaggctggtctgctggggaatgcctttgatggccaccaactcctgaggcccctcattttctgtcaggatcacctgcgggaaggcccgcccattggccgcggggatagccaaggcgaggagcttgagccccagttgccctcttctttgtcttctattccctatggattctgtgaccattgctggacaaaagatgttgacgacccacctctggttacccacccctccccggggtcccgcgacggacacatgacgcaagcttggcctgtgaaagtagtgtcccccctggcgactgtgatcggtcacgtcatgcaggccagtctgctcgcactgtag

SEQ ID NO: 13711 - DNA, 975 bp, synthetic construct
  misc_feature 1..975: note = Description of Artificial Sequence: Synthetic coding sequence
  source 1..975: mol_type = other DNA
atgccggcaagggcgctgctgccacggagaatggggcaccggacattggcaagcacgcctgccctttgggcatctatcccctgtcctcggtcagagcttagactggatctggtgctacccagcggccaaagcttcaggtggcgggaacaatcccccgcccactggtcgggagttctggctgaccaagtttggactttaacgcagacggaagaacagctgcactgtacggtgtatagaggggacaaaagtcaggcttctcgcccaactccagatgaactggaagctgtgcgcaaatattttcagctggacgtgacccttgcccagctgtatcatcactggggctccgtggacagccactttcaggaggtggctcagaaatttcagggagttcgcctcctacgccaggatcccattgaatgtctcttctcatttatctgttcttctaataataacattgcccggatcacgggcatggtggagaggctgtgtcaggctttcggtcctcggctaattcagctggatgacgtaacataccacgggttcccctctctgcaagccctggccggacccgaagtggaggctcaccttcggaagctgggactgggttacagggcccgttacgtcagtgccagcgccagagctattctggaagagcaaggcggcctggcatggctgcagcaactgagagaaagctcctatgaagaggcccacaaagctctttgcatactgcccggagtcggaaccaaggttgccgactgcatctgtctcatggcgctggataagccccaggcggtaccagttgacgtacacatgtggcatatcgctcagagggactacagttggcatccaaccaccagccaggccaaaggaccctccccccagaccaataaagaactagggaatttttttaggtccctgtgggggccatatgctggctgggcccaagcagtctccgtacccagatgccctccatag

SEQ ID NO: 13712 - DNA, 594 bp, synthetic construct
  misc_feature 1..594: note = Description of Artificial Sequence: Synthetic coding sequence
  source 1..594: mol_type = other DNA
atggtcgaacgcctctgccaggcgttcgggccaagactcattcagctggatgacgtcacataccatggcttcccttcacttcaggcgctggcagggcccgaagtagaagctcatctacggaaactgggattgggctatcgagccagatacgtcagtgcaagcgcacgggctattctcgaggagcagggaggactcgcatggcttcagcagctgcgagaatcatcgtacgaggaagcccacaaagccttatgcattttaccaggggtcggcaccaaagagacttttagcggtgcgtgcggggacctcatgctggccggccctaagcgctgttgttctgtccctacctgcgccaacccagcaatgctgcgctcccaccagcagtccgcggagcgggtgcccaaaggtcgaaaagccaggtggggcacccttgataaagagatccctcaggccccctccccccccttcccaacctccctctctccctctcctccaagtttaatgttagggaggggcctgcccgtcactacctccaaggcgcgccaccctcagattaagcagagcgtgtgcaccactcgttgggggggtggatactag

SEQ ID NO: 13713 - DNA, 1038 bp, synthetic construct
  misc_feature 1..1038: note = Description of Artificial Sequence: Synthetic coding sequence
  source 1..1038: mol_type = other DNA
atgcctgcaagagcactgctcccccggcgaatgggacatcggacactggcctcaacgcctgccctgtgggcgtccatcccttgcccaagaagtgaactgagactggatctagttctaccttccggacagtccttccgttggagagaacagagcccagcgcactggtcaggcgtactagctgatcaagtatggacattgacccaaacagaagaacaactccactgtacggtctaccgcggagacaaatcacaagctagcagaccgacccctgacgagttagaggcagttcgaaagtatttccagcttgatgtcaccctggcacagttatatcatcattggggtagcgtggacagtcacttccaggaagttgctcaaaagttccagggggttcgcctccttaggcaggatcccattgaatgtctgttcagctttatttgcagttccaacaataatatcgcaaggattaccggtatggtagagaggctctgtcaggcctttggccctagacttatacagttggatgacgtcacataccacggctttcccagtctacaggccttggctgggccagaagtagaagctcacctgcgcaagctcgggcttgggtaccgggccagatacgtctccgcgagcgcacgtgcaatcctggaagagcagggaggcttggcctggttacagcaattgagggagtcctcgtacgaggaggcacataaggctctttgcatcctcccgggagtaggaacaaaagtggcagactgtatatgcttgatggccctggacaagccgcaagccgttccggtggacgtccatatgtggcacattgctcagagagactatagctggcaccctacaacatcacaggctaaaggccctagtccccagacaaacaaggaattgggtaatttcttccggagcctgtggggaccatacgcaggttgggcccaggccgtgctttttagcgccgacctccgacagagccgtcatgcacaggagccacccgccaaacgccgcaagggcagcaaaggacccgagggatag

SEQ ID NO: 13714 - DNA, 1074 bp, synthetic construct
  misc_feature 1..1074: note = Description of Artificial Sequence: Synthetic coding sequence
  source 1..1074: mol_type = other DNA
atgcctgctcgggccctgctgccacgtcggatggggcatcggactctcgcctccaccccagcgttgtgggcaagtatcccttgcccacgcagtgaattgcgtctcgacttagtcttacctagtgggcaatcttttagatggcgggagcaaagtcccgcccattggtccggagtattggctgaccaggtctggactttgacacaaacagaggaacaacttcattgtaccgtgtatcgaggcgacaaatctcaggcttcccgcccaactccagatgagctcgaagctgtgcggaagtactttcagctggatgtgactttggctcagctttatcatcattgggggtcagtagactcacactttcaggaagtggcacagaagtttcagggcgtacgcctgctgagacaggatcctattgagtgcctattttccttcatctgctcatcaaacaacaatatcgccagaatcacagggatggtagagcgactgtgccaggctttcgggccccggctgattcaactagacgacgtgacataccatggtttccccagcctgcaggcactcgctgggcctgaagtggaggcccacctgcggaagttgggtctgggctatagggccagatatgtgtccgcaagcgctcgagcaatacttgaggagcagggcggactggcttggctgcagcagctgcgcgaatctagttacgaagaagcccacaaggctctatgtatcttacctggcgtcggcactaaaggcctgcttgggaacgcttttgacgggcatcagcttctgcgccctctcatcttctgtcaagatcacctgagagagggccctcctatagggcgcggcgactcccagggtgaggaattggaaccccagctgccatcatccctgtcctcaataccttatggcttttgcgaccactgctggacaaaagatgttgacgatccgcctcttgtgacccacccctcgcccggttcacgcgatggacacatgacccaagcctggccggtcaaggtcgtttctcctctcgccaccgtgataggccacgtgatgcaggctagcttgctggccctttag

SEQ ID NO: 13715 - DNA, 588 bp, synthetic construct
  misc_feature 1..588: note = Description of Artificial Sequence: Synthetic coding sequence
  source 1..588: mol_type = other DNA
atgcccgcccgtgccttactccccaggcggatgggccaccggaccctggcatcgactcccgccctctgggcctctatcccttgtcccaggagtgagttgcgactggatttggtgttgccatcaggtcagagcttccgctggcgggaacagtcaccggcccattggtccggtgtcctggctgaccaggtgtggaccctgacccaaacagaggaacagttgcattgtaccgtgtatcgtggagacaagtcccaggcatcccgccccacgccggacgagctcgaggcagtcagaaagtacttccagctggacgtgaccttggcccagctctatcaccattggggtagcgtcgattcccacttccaagaagttgcacaaaagttccagggcgtaaggctgctgcgtcaggaccccatcgagtgcctgttttcctttatctgtagcagcaacaacaacattgcccgaatcacaggcatggtggagcggttgtgtcaggccttcggtccccgcctgatccagctggatgacgtgacctaccacgggtttccgagcctgcaagcgctggcaggaccaccgtggcagtgcatatag

SEQ ID NO: 13716 - DNA, 969 bp, synthetic construct
  misc_feature 1..969: note = Description of Artificial Sequence: Synthetic coding sequence
  source 1..969: mol_type = other DNA
atgccagcccgcgcactgctaccaaggagaatgggccacaggactctagcctcaactcctgctctgtgggcctcgatcccttgccctaggtcagaacttcggcttgatctggttcttcccagcggtcaaagcttccgatggagagaacagtctccggcgcattggagcggggtcctggcagatcaggtgtggactttgacacagacagaagaacaactgcactgcaccgtgtaccgcggcgacaaatcccaggccagcagacctactcccgacgaactggaggccgtccgtaagtattttcagctggatgtgacactggcacagctgtaccaccactgggggtccgtggactcccatttccaagaggttgcacaaaagtttcaaggagtaagactccttagacaagacccaatcgagtgtctcttttcttttatttgttcgagtaacaataatatagctcgtatcaccggaatggtggaacgcctgtgccaggctttcggaccaaggctgatacagctcgatgacgtcacctaccacggcttcccaagccttcaggcgttagctggccccgaggtggaagcacatctgcggaagctggggctgggctacagagcaaggtacgtttcagcttcggctagagccatactcgaggagcagggaggcctcgcttggctgcagcagcttcgggagagttcctacgaagaggcacataaagccctctgtatattgcccggcgtgggaacaaaagtcgcagattgtatatgcctcatggcgctagataagccccaggctgtcccagtggacgtccacatgtggcacatagctcaacgcgattattcttggcaccccactacatcacaagctaagggtcccagtccccagaccaacaaggagttgggtaatttttttagaagcctgtggggcccatatgccggatgggcccaggcagcaggcagtgacgctagctag

SEQ ID NO: 13717 - DNA, 6807 bp, synthetic construct
  misc_feature 1..6807: note = Description of Artificial Sequence: Synthetic coding sequence
  source 1..6807: mol_type = other DNA
atgagcggattacacctcgtcaagcaggggagggatcgcaagaagatcgactcacagagagatttcaccgtggcaagcccagccgaatttgtgactagattcggaggcaacaaggtcatcgagaaggtgttaatagctaacaacggaattgccgccgtgaagtgtatgaggagcattcgccgttggagctatgaaatgtttagaaatgagagggccattagattcgtagtgatggtgacaccagaggatctcaaggctaatgcagagtatatcaaaatggccgaccactatgtgcctgttcctgggggacctaataacaacaactacgccaacgttgagttgatcctggacattgctaaacgaatacctgtgcaggccgtgtgggcaggctggggtcatgccagcgagaatccgaaactgcccgaactcctgttgaagaacggcatcgctttcatgggccctccttcccaagccatgtgggcgctcggagacaaaatcgcctcctctatcgtggcacaaaccgcgggtatccccacacttccgtggagtgggagcggtctgagggtggattggcaggagaacgacttctcaaagcggattctgaatgtgccccaggagctttatgagaaaggctacgtaaaagacgtggatgacggcctccaggctgctgaggaagtaggctatccagtaatgatcaaggcctccgaaggggggggaggcaaggggattcggaaagtgaacaacgccgacgatttcccgaatttgtttagacaggtgcaggcagaagtgccaggcagtcccatatttgtcatgcggttagcaaagcagtccagacatctcgaggtccagattctcgctgatcaatacggcaacgccatctccctgttcgggcgggattgttccgtccagagacgtcatcagaaaatcatcgaagaggccccagctacaatcgctacaccggctgtgtttgagcacatggagcagtgtgcagttaaattggctaagatggtcggatatgtctctgccggaacagtggaatatctctattctcaggacgggtctttttacttcctcgaactgaatcctagactgcaagtagagcatccttgcaccgaaatggtggccgacgttaacctgccagccgcccagcttcaaatcgctatggggatcccattgtataggattaaagacatccgtatgatgtatggcgtgtctccgtggggagacagccctattgatttcgaagactccgcccatgtgccttgtcctaggggacatgttatcgcagccagaattacaagtgagaaccccgatgaaggctttaagccctctagtggtacagtgcaggagctaaatttccggagtaataagaatgtgtggggttacttttcagtggccgcggcaggcgggttgcacgagtttgcagattcccagttcggccattgtttttcatggggcgaaaatagggaggaagctattagtaatatggtggtggctttaaaggagctgtctatccggggcgatttcagaactaccgtggagtatcttattaagttgttggaaaccgagagctttcagatgaaccgcatcgacacaggttggctcgatcgtctgatagcagagaaagtccaagcagagcgacccgatacgatgttgggcgtagtgtgcggagctctgcatgtagcagacgtaagcttgcgtaacagtgtatcaaattttctgcattctctcgagcggggtcaggtactgcccgctcacactttattgaacacagtggatgttgaactgatttacgagggtgtcaaatacgtgctcaaagtcacaaggcaatcccctaactcatatgttgttattatgaatggttcttgtgtcgaagtcgatgttcatcgactctctgatggtggcctcctcctgtcgtacgacggctcgtcatacactacttatatgaaggaagaagtcgaccggtaccgtataaccattggcaataaaacctgcgttttcgagaaggaaaacgatccatccgtgatgcggtcaccaagcgctggcaagctgatccagtacattgtggaggacggtggacacgtcttcgcaggtcagtgctacgccgagattgaagtgatgaaaatggtgatgaccctcacagccgtagaatctggatgcatccactatgtgaaacgccctggtgcagccctcgatccaggctgtgtcttggctaagatgcaacttgacaatccgtctaaggtccaacaggcggagctccacacaggaagtctcccacgtatacagtccacagcgctgcggggagaaaaattacacagagtgtttcactatgtcctggataaccttgttaacgtgatgaacggatactgtctgcccgatccattctttagcagtaaggtcaaagattgggtggagcggttgatgaagactctgagggacccctctctacctctgctggagctgcaagacattatgacctccgtgtccggacggatccctccaaatgtggaaaaaagtatcaaaaaggagatggcccagtacgctagtaacatcactagcgtattgtgccagttcccctctcagcagattgcaaatattctggacagtcatgctgcaactctgaacagaaagtctgagagagaagtgtttttcatgaacactcagagcattgtccagctcgtacagcgctacaggagcggcatccggggtcatatgaaggccgtcgtgatggatttgctgaggcagtacttgcgcgtagaaacacagttccagaatggacattatgacaaatgtgtgttcgcactgcgggaggagaacaaatcagacatgaataccgtgttgaattacatctttagccacgcccaggtcacaaaaaagaatctgctagtgaccatgctcatagaccagttgtgtggtagggaccctaccttaacggatgagttgcttaatattcttaccgagctcactcagctgtccaagacaactaatgccaaggtagccctgcgcgctcgtcaggtgctcattgctagccacttgccttcctatgaactcagacataatcaggttgaaagcatttttctgtccgccatcgacatgtacggacaccagttttgtatcgagaacctgcagaagcttatcctttccgagactagcattttcgatgtgctgccaaactttttttatcacagcaatcaggtcgttcggatggccgccctagaggtctatgtgaggcgtgcatacatcgcttatgagctaaattccgtccagcaccgccagctgaaggacaacacctgtgtagtggagttccaattcatgctgccaacttcccatcccaatcgcgggaacattcctactctgaataggatgtctttttcctcaaatctcaaccattacgggatgacacatgtcgcctcagtgagtgatgtgttgttggacaactcttttaccccgccctgtcagcggatgggcggcatggtgtccttccggacttttgaggatttcgttcgcatttttgatgaggttatgggatgctttagcgactctcctccgcagagtccaacctttcccgaagccggccataccagcctgtatgacgaggacaaagtacctcgggacgagcctatccatattctgaatgttgctattaaaacagactgcgatatcgaggacgatagactggctgcaatgttccgcgaattcactcagcagaataaggctactcttgtagatcatggcattagaagactaacatttcttgtggcacagaaagatttccgcaagcaggtgaattatgaggtcgacaggagattccatagggagtttcccaagttttttaccttccgggcacgggataagtttgaagaggaccggatctatcgtcacttggaacctgcactagccttccagctggaactcaatcggatgagaaacttcgacttgaccgccatcccatgcgccaatcacaagatgcatttgtacctaggagctgccaaagtcgaggttggaacagaagtaacggactatcgtttcttcgtgcgggcaattatccgacattccgacctagtcacaaaagaagcttcatttgaatacctgcagaacgagggtgagcggctgctgctggaagctatggacgagctcgaggtcgcttttaataataccaatgtgaggactgactgtaatcacattttcctgaacttcgtgcccactgttatcatggaccctagcaaaatcgaagagagcgtgcgatccatggtgatgagatatgggagtcgcctctggaagctacgcgtgctgcaggcggaactgaagatcaacatacgactgactccaacaggcaaggcaataccgatacggcttttcctgactaatgagtcaggatactatctggatattagcctgtacaaagaggtgacagattcacgtactgctcaaattatgttccaggcatatggagacaaacagggtcctctgcacggtatgctcatcaatacaccttacgtgactaaggacctgcttcagtcgaagcgcttccaagctcaatccctgggcactacctatatttacgacatccccgaaatgtttcgtcaatctctcattaaactgtgggaatcgatgagcacacaggcattccttccaagcccgccccttcccagtgacatgttgacctacacggagctcgtgctcgacgaccagggacagctcgtgcacatgaatcgcctccctggtggtaacgaaataggtatggttgcctggaaaatgacttttaaaagtccagaataccctgagggcagagatataattgtgatcggaaatgatattacatacaggatcgggagtttcggtccccaagaggacctcttgttcctgagggccagtgagctggcacgggccgaaggaattccccgtatctacgtgtctgcaaactccggagccaggattggcttggccgaggagatccgccacatgtttcatgtcgcctgggtcgatccggaagatccctacaaaggataccgctacctgtaccttacccctcaggactacaaacgggtgtcagccctgaatagtgttcattgtgaacacgtggaggacgagggggagagccgatacaagattacggatatcataggcaaagaggaggggattgggcccgaaaacctccgaggcagcggtatgattgctggcgaatcaagtcttgcctacaatgagatcattactatctcactggtcacatgtagagcaatcggcataggcgcctatctggttcgattggggcagaggaccattcaggtagaaaactcccacctcatcctgaccggggccggggccctgaataaggtattagggagagaggtgtacacaagtaataatcaactcggtggtatccagataatgcataacaatggcgtgactcattgtaccgtgtgtgacgattttgagggggtgttcaccgtgctgcattggctgtcatacatgcccaaatccgtgcactcttccgtgccactactgaacagcaaggatcccatagatcggatcatcgaatttgttccaaccaaaactccgtatgatccaagatggatgctcgccggcagaccacaccctactcagaaagggcaatggcttagtggctttttcgattacggcagctttagcgagataatgcaaccctgggctcagacagtagtggttgggcgcgccaggctcggggggattcctgtgggcgtggtggccgtcgaaaccaggacggttgagctaagtatccctgcagaccccgccaatctcgacagcgaagctaaaataattcagcaagctggccaggtgtggtttcccgatagcgcttttaagacttatcaggcaattaaggatttcaaccgggagggcttacctcttatggtattcgcaaattggaggggtttctcgggggggatgaaagacatgtacgatcaagtgctgaagttcggagcatatattgtcgacggcctgcgggagtgttgccagcctgtgctcgtgtatattcctcctcaggccgagctgaggggcggctcctgggttgttatagattcatccattaatccccgacacatggagatgtacgctgatagggagagcagaggaagcgtccttgagcccgaaggcacggtcgagatcaaatttaggcgcaaagaccttgtgaagaccatgcggagggtggatcccgtctacatccacctggctgaacgtttggggacgccagaactgagtactgcagaacggaaagagttggaaaataaattaaaagagcgggaggagttccttattcccatctatcaccaggtggccgttcagtttgccgatctccacgacacaccagggcgcatgcaggagaagggggttattagcgacattctcgactggaagacatctcgtacatttttttactggcggctgcgccgccttctcctagaggatttagtgaagaaaaagattcacaatgcaaacccagagcttacggatggccagatacaggccatgctccgccggtggttcgtggaggttgaggggaccgtgaaggcctacgtctgggataataacaaggatttagccgagtggctggagaagcaactcaccgaggaagatggagtgcactccgtgattgaggagaatatcaaatgtatctccagagactacgttctgaaacaaattcgctctttggttcaagcgaatcctgaagtggcaatggatagcatcattcacatgacacagcatatctccccaactcagagggctgaagtcatccgaatcctgtccacgatggatagcccgagcacatag

SEQ ID NO: 13718 - DNA, 7152 bp, synthetic construct
  misc_feature 1..7152: note = Description of Artificial Sequence: Synthetic coding sequence
  source 1..7152: mol_type = other DNA
atgtggtggtccacgctaatgtccatcctccgagcaaggtcattctggaaatggatctccacacagacggtcagaattatccgggcagtccgcgcacatttcggcggaattatggacgagccttcacctctcgcgcaacccctcgaattgaaccagcacagccgcttcattataggcagtgtcagcgaggataattctgaggatgagatctcgaatctggttaaactcgacttgctcgaagagaaagaggggtcactttccccagcaagtgttggatctgacactctgtctgacctgggtatctcatcactacaagatgggctggctctgcatatcaggtcctcaatgtccggacttcatctggtcaagcaagggcgagacaggaagaaaatcgactcccagagagactttactgttgccagcccagcagagttcgttacaaggttcggtgggaacaaagtgatcgaaaaggtacttatcgccaacaatggcattgccgctgtcaagtgcatgcggagtatcagaaggtggagctatgagatgttccggaatgaaagagcgatacgattcgtggttatggtgactccggaggacctgaaagctaacgccgagtatatcaaaatggccgaccactatgtccccgtgcccgggggacccaataacaataactacgcaaacgtggagctcattctggatatcgcaaagcggattcccgtacaggcagtttgggccggctgggggcacgcatccgaaaaccccaaacttcctgaactactgctgaaaaacggcattgcttttatggggcctccatcacaggccatgtgggccctgggagacaaaattgcctcatctatcgtggctcagactgctggtataccaacattgccctggagcggctccgggctgcgagttgactggcaggaaaacgacttttcgaagcggatacttaacgttccccaagagctgtatgagaaagggtatgtgaaggatgtggacgatgggctgcaggccgccgaagaggtgggttaccccgtgatgatcaaggcgtctgaaggcggaggcgggaaagggattaggaaagtgaataacgccgatgatttcccgaacctgttcagacaggtgcaggccgaagttcctggctcccctatcttcgtcatgaggctggccaagcaaagtcgtcacctggaggtgcagatcctggccgatcagtacggcaatgctataagcctttttggcagggactgctctgtacagcgccgacatcagaagataatcgaggaggccccggctacaatagcaactcctgccgtgttcgagcacatggaacagtgtgccgtgaaacttgccaagatggtgggatatgtaagtgccggaaccgtggaatacctttacagccaggacgggtctttctattttctggaactgaatcctcgcctgcaggttgaacacccttgcaccgagatggtggctgatgtgaatctgcctgcagctcagctacagattgccatgggcatccccttgtaccgaattaaggacatacgaatgatgtacggcgtcagtccctggggcgactctccaatcgacttcgaagactcagcacacgtcccctgtccacggggccatgtgattgccgccagaattacgtctgagaacccagacgaggggttcaaaccaagctccggtaccgtgcaggagttgaactttcgctccaataagaatgtctgggggtatttttccgtcgccgcggcagggggcttgcacgaattcgcagattcacagtttggacactgctttagctggggggaaaaccgggaggaagccatatctaatatggtggttgccctgaaggaactcagcatccggggagattttaggaccactgttgagtatctgatcaagctcctcgaaacggagtccttccaaatgaatcgcatcgacacaggctggctggaccgtctgattgccgagaaggtgcaggccgaacggcctgatacaatgctgggggtcgtttgtggagcgctccacgtcgccgacgtgagtctcagaaatagtgtcagtaactttctacacagcttggaacgcggacaggttttacccgcacacactttattaaacacagtcgatgttgaactgatctatgagggtgtcaaatacgttctcaaggtgaccagacagagtcccaacagctacgtcgttatcatgaatggcagttgcgtggaggtagacgtacatagattgtctgatggaggcctgctgctaagctatgatggctcatcatacactacctacatgaaggaagaagtggacaggtaccgcattaccattggcaataagacttgtgtgttcgagaaggagaacgacccatctgtgatgaggtcaccttcggctggcaaattaatccagtatatcgttgaggacggcggacacgtgttcgccggccaatgctatgctgagatcgaggtcatgaaaatggtgatgaccctgacagccgtagaatccggatgtatccactatgtcaaaaggccaggggcagctcttgatcccgggtgcgtcctggccaagatgcagcttgataatccctcaaaggtgcaacaggcagagttacacaccggtagcttgccgcgaatacaaagcactgcgctaaggggtgagaagttgcatcgagtgttccactatgtgctggacaatctcgtaaatgtcatgaacggctattgtctgcccgaccccttcttctcctccaaggtgaaggattgggtcgagagacttatgaagacactgagagacccttctttgcccttgttggagctccaggacataatgaccagcgtctcagggagaattccgcccaatgtcgagaagtccataaagaaggagatggcacagtatgcctctaacatcacctccgtgctgtgccagtttccttcccagcagatcgcaaatatcctcgattcacatgcggctaccctgaaccgaaagtcagagagagaagtattttttatgaatacacagtcaattgttcagcttgtccagcgctatagatccgggataagagggcacatgaaggccgtcgtgatggatctgctgcgtcagtatctgcgcgtagagacacagttccagaacggccattacgataaatgcgtgtttgccctcagggaagagaacaagtctgacatgaacaccgttcttaactatatctttagtcatgcacaggtgacaaaaaagaacctgcttgtgaccatgctcattgaccagttatgcggacgcgatcccactttgacagatgaactgttgaacatcctcaccgagctgacacagttgagcaaaaccaccaacgctaaggttgccctgcgggcccgtcaggtcttgattgcaagccacctccccagttacgagttgagacataaccaggttgagtcaatctttttgtcagcaattgatatgtatggacaccagttttgtatagaaaacctgcagaaattgattctttccgaaacttcgatattcgacgtgttgcccaattttttctaccactccaaccaggtggtccggatggcagccctggaggtgtatgtgagacgggcctacattgcctacgagctgaactccgtccagcaccgccagttaaaggacaacacttgcgtggtggagtttcagttcatgttgccaacttcacaccccaacaggggtaacatcccaactctgaatagaatgtcattttccagcaaccttaatcactatgggatgacacacgtagcctccgtgtccgacgtgctgttggacaattccttcacgccaccctgccagcgaatggggggaatggtgagcttccgaacttttgaagatttcgtgcggatttttgatgaagtcatggggtgtttctccgattctcctcctcagagtccgacatttccagaagccgggcacaccagcttgtacgatgaggacaaggtgccacgcgatgaaccgatccacattctcaatgtggctattaagacagactgtgacattgaagacgataggcttgcggccatgttcagagagtttacgcagcagaataaggctactctggtcgatcatggcataaggcgcctgacttttttagtggcacaaaaggatttccggaaacaagtcaactacgaggtggaccgaagatttcaccgtgaatttcccaagttttttaccttcagagcccgggataaatttgaagaagacagaatttaccggcatctagagcccgccctggcatttcagctggaattaaatagaatgcgaaatttcgatcttacggctataccctgcgccaatcacaaaatgcatctctatttgggtgctgctaaggtcgaggtgggtacggaggtcaccgactatcgatttttcgtcagggccatcatacggcactcggatctggtgacaaaggaagcttcgttcgaatacctgcagaatgaaggcgaacgtcttctgctcgaggctatggacgaattagaagtcgcttttaataacactaatgtgagaactgattgcaaccacatatttttgaatttcgtaccgaccgtaattatggaccccagtaagatcgaagaatcagtgcgctccatggtgatgaggtacggatctcggttgtggaaactgagggtgttacaggctgagttgaagattaacatccggctgacgccaacaggaaaggccatcccaatcagactcttcttaacgaatgagtccgggtactaccttgatatatcactgtataaagaggtaactgattcccggactgcccagattatgtttcaggcttacggggacaaacagggtcctctgcatgggatgctgattaacacaccttacgtgactaaggacctgctccaaagtaaacgattccaggcgcagtccctgggcactacgtatatttacgatatcccggaaatgtttcgacagtctcttatcaaactttgggagtcgatgagcacccaggcatttctgccttctccacctctcccttctgacatgctcacctacaccgagctggtgttagatgaccaaggccagttggtacacatgaaccgccttccagggggcaacgagattggaatggttgcatggaagatgaccttcaagagccctgaatacccagaggggagagatattatagttataggcaatgatatcacataccgcatcggatcatttggccctcaggaagaccttcttttcttgcgggccagcgagcttgcgcgcgccgaagggataccacgaatctacgtctccgccaatagcggagcacgcattggactggccgaggagatacgccatatgttccatgtggcctgggtggaccccgaagatccctacaaagggtacagatacctgtacctaactcctcaggattacaagcgggtaagcgcactcaacagtgttcactgcgagcacgtcgaggatgaaggtgaaagccggtacaagatcactgatattatcggcaaggaagagggcatcgggcccgaaaatctccggggaagcgggatgattgctggagagagctccctggcatataacgagattatcacaattagcctggtgacgtgtagggcaattggcataggagcctatctcgtccgtcttggtcagcgcaccattcaggtcgaaaactcccatctgatcctgaccggcgccggggccttaaataaagtgctgggcagggaggtgtatacatccaacaatcaactgggggggatccagattatgcacaacaacggggttacacattgcaccgtctgcgatgacttcgagggcgtgttcacggtgctgcactggctaagttacatgccaaagagcgttcatagcagcgtcccacttctaaactcaaaggatcccattgatcgcatcatcgaatttgtgcctactaagactccatatgacccacgctggatgctggcgggcagacctcaccctactcagaaaggacagtggctcagcggctttttcgactatggatccttctctgagataatgcagccatgggcccaaaccgtcgtcgtcggaagggcaaggctggggggcattcccgtaggggttgtcgccgtagaaacacgcaccgtggaactgtctatcccggctgaccctgccaacctggatagtgaagctaaaataatccagcaggccgggcaggtgtggttcccggattccgccttcaaaacttatcaggccattaaggacttcaatagggagggactgccgctgatggtgtttgcaaattggcggggttttagtggcggcatgaaagacatgtatgaccaggtactgaaattcggtgcctacattgttgatgggcttagagagtgttgccagccagtgttagtgtacattccacctcaggctgagctccgtggcgggtcatgggtggtcatcgattcctccatcaacccgagacatatggagatgtacgccgacagagagtcaagaggttccgtgttggagcccgaaggtaccgtggaaattaagttcagacggaaagacctagtgaaaacaatgagacgcgtcgaccccgtgtacattcaccttgcagaacgattaggcacaccagagctgagcaccgctgagagaaaggaacttgagaacaagctcaaggagagggaggagttcttgatccccatttaccaccaggtggctgtgcaattcgcggacctccacgatacacctggaaggatgcaggaaaagggagtgatctcggacatcctggattggaagaccagtcgcaccttcttctattggagactccggagactccttttggaggatttggtaaagaagaaaatacataatgcaaaccccgagctgaccgatggccaaatccaggccatgctaaggcgctggttcgtcgaggtagaagggacagtgaaggcatatgtttgggacaacaacaaggatctagccgaatggctggagaagcagctcactgaggaggatggtgtccacagcgtgattgaggaaaatatcaagtgtatttccagggactatgttctcaaacagatccgctctctggtgcaggcgaaccccgaggtagccatggatagtatcatccatatgacacagcacatatctccaacccagagagcagaagtaatacgcattctgtctacgatggactctccctctacctag

SEQ ID NO: 13719 - DNA, 6867 bp, synthetic construct
  misc_feature 1..6867: note = Description of Artificial Sequence: Synthetic coding sequence
  source 1..6867: mol_type = other DNA
atggagggctcacccgaagagaacaaggagatgaggtactacatgctacagaggtcttccatgagcggattgcacctcgttaagcaggggcgtgaccgcaagaaaattgatagtcagcgcgacttcaccgtggccagccctgcagagtttgtaacccgctttgggggaaataaggtgatcgagaaagttctcatcgcaaacaacggcatagccgctgtcaaatgcatgcgtagcattcggcgctggtcttacgagatgttccgcaacgagcgagctattcgttttgtagttatggtgacaccagaggatctgaaggcaaacgcagagtatatcaaaatggccgaccactatgttcctgtgccaggggggcccaacaacaacaactacgctaacgtggaactgatcctggacatcgctaaacgaattcctgtccaagccgtttgggcaggctggggccacgcatccgagaatcctaagctgccagagctgcttcttaaaaatggaatagccttcatggggccgccctcacaggccatgtgggccctgggggataagatcgcttcttcaattgtggcgcagaccgcagggattccaacgctgccttggtcaggaagtggactccgagttgattggcaggagaatgacttcagtaagcgaatacttaatgtgccccaagaattgtatgaaaaggggtacgtgaaagatgtcgacgacggactgcaggccgccgaggaagtcggataccctgtcatgattaaagcttctgaaggtggcgggggaaagggcatccgcaaagttaataacgccgatgacttccctaaccttttccgccaggtccaagccgaggtccctggttctcccatcttcgttatgcggctcgccaagcagtctcgacacctcgaagttcaaatcttagctgatcagtatggtaacgctatctccttattcggacgagattgctcagttcagagaaggcatcagaaaatcattgaggaagcaccggcgacaatagccactccggccgtattcgaacatatggagcagtgcgccgtgaagctggcaaagatggtcggctacgtctcagcaggcacagtagagtacctctacagccaagatggtagtttttacttcctcgagttaaacccacggctccaggtggaacacccatgcaccgaaatggttgccgacgtgaatcttccagccgcccaactccagattgccatggggattccactttacagaataaaggatatccgcatgatgtacggtgtctccccctggggggatagcccaatcgatttcgaggatagtgcccatgtgccctgcccgcgcggccacgtgatcgccgcacgcatcaccagcgaaaaccctgatgaagggtttaaacccagttccggcaccgtgcaagagcttaacttccgatcgaataagaacgtgtggggttatttctccgtggccgcagcaggtggcctgcacgagttcgccgatagtcaatttggccactgtttttcctggggggagaacagggaggaagcaatctcaaacatggtcgtggctttaaaagaactaagtattcgaggggattttcggacaactgtggagtacctgattaagcttctggaaaccgaaagtttccagatgaatcggattgacacaggctggctggacagactaatcgccgagaaggtgcaagccgaacggccagacactatgctcggtgtcgtctgcggtgcccttcacgtcgcggatgtcagtttgaggaattcagtatctaactttcttcacagccttgagcgaggtcaggtcttgcccgcgcatactctgctcaacaccgttgatgtggaactgatctacgaaggtgtcaaatacgtgctgaaagttactcgacaaagtccgaactcctatgttgtaattatgaacggctcttgtgtggaagtcgacgtccatcgactttcagatgggggcttactgctttcctacgacggtagcagctatacgacatacatgaaggaagaggttgaccggtatcggatcactatcgggaacaaaacatgcgtgttcgagaaggagaacgacccttcagtgatgcgcagtccaagcgccgggaaactaatccagtatattgtggaagatggtggccatgtgtttgccggtcagtgttatgctgagattgaagtcatgaagatggtgatgaccctgacggccgtggaaagcggatgtattcactatgttaagcgtcctggggcagctctggatccaggttgtgtactcgcgaagatgcagttggataacccctcgaaggtccagcaagctgaacttcacaccgggagtctacctcgcatacagtctaccgctttacgcggcgagaaattgcatagggtgttccactacgtgttggataatctggtcaacgtaatgaatggctactgcctgccagaccccttcttttcttctaaggtgaaggactgggtcgaacgtctgatgaaaaccctccgagatccttccttgccactgctggagcttcaggacataatgactagtgtatctgggcggatccctcccaacgtggagaagtcaattaagaaagagatggcgcagtacgcctccaatattacctccgttctatgtcaatttccaagtcagcaaatagcgaatattttggattcccacgccgcaacgcttaaccgcaaatctgaacgggaagtgtttttcatgaacacccagagcattgtgcagttggtccaacgatatcgcagtggcataagaggacacatgaaggccgttgtcatggatttgctgaggcagtaccttagggtcgaaacccagttccagaacgggcactatgacaagtgcgtgttcgccctgcgcgaagaaaataagtctgacatgaacaccgtgttaaactatatattcagccatgcccaagtgactaaaaaaaacctgctggtgacaatgttgattgaccagctgtgtggtcgtgatcccaccttaacggacgaactgctcaacatcttgacggaactgacccaactctccaagacaaccaacgccaaggtcgccttgagggcacgacaggtgttaatcgcatcacaccttccgagctacgaactgaggcacaatcaagtcgagtccatctttctgtctgccatcgacatgtacggccaccagttctgtattgagaaccttcagaagttaatcctatctgagacatctatttttgatgtgttaccaaacttcttttatcacagcaaccaggttgtgcgcatggccgccctggaggtctatgtccggagggcctacattgcctacgaactaaatagtgtccagcacaggcagctgaaggacaatacttgcgtcgttgagtttcagttcatgctgcccacgtcacatcctaatagagggaatatacctacattgaatcggatgagctttagctctaaccttaaccattacgggatgacacatgtggcttctgtatccgacgtgctcttggataatagttttacaccgccttgtcagagaatgggcgggatggtcagcttcagaaccttcgaggattttgtgaggatcttcgacgaagtaatgggatgcttctcagatagtcctccgcagtctcccacctttccagaggctgggcatacctctctttacgatgaggacaaagttcccagagatgagcccatccatatcctcaatgtggccatcaaaactgattgcgacattgaggatgacagactagccgcaatgttcagagagttcacacaacagaataaggccaccttggtcgaccacggcattcgacgactgacattcctcgtggcacagaaagacttccggaaacaggtcaattatgaggtggatagacgtttccatcgagagttcccgaaattttttacattcagggccagggacaaatttgaggaagataggatataccgccaccttgagcccgccctggcatttcaactagagctgaatagaatgcgcaactttgacctcaccgctattccctgtgctaaccacaagatgcatttgtacttaggagcagccaaggtcgaggtgggcacagaggtaacggactaccgtttcttcgtaagagctattataagacactccgacctcgtgacaaaggaagcttcctttgaatatctgcaaaatgagggagagagactgttgctggaagccatggatgaactggaagtcgcctttaataataccaacgtccgcaccgattgcaaccacatattcctcaattttgtgcctaccgtgattatggatccctctaaaattgaggaatctgtgcgatcaatggtaatgagatacgggtcccgcctgtggaaattgcgtgtgctgcaggcagagctcaaaatcaacattcgtctgacacccacaggcaaagcgatccccatcaggctgttcctcacaaatgagagcggatattacctagatattagcctctacaaggaggtgacagactccagaacggcccaaatcatgtttcaggcctacggcgacaaacagggtccactgcacggaatgctcattaacaccccttatgtcactaaggatctgctccagagcaagagatttcaggcccagtcgctcggcactacgtatatctatgacatccccgagatgttccgccagtccctgatcaaactgtgggagagtatgagcactcaggcctttttaccctccccgcccctgccaagcgatatgctcacgtacaccgagctggtgctcgatgatcaggggcagctggttcacatgaacagactccccggtggcaacgagattgggatggtggcttggaagatgacctttaaaagtccagaatacccagaggggcgagatatcatcgtaattggaaatgatatcacttacaggatcggatcctttggcccgcaggaggacctgctgttcctgcgtgcctccgagttggcacgagcggaggggatccctaggatctacgtgtcggcaaactctggcgcccgtattggattggcagaggaaatccggcacatgttccatgtggcctgggttgacccagaggatccctacaagggctatagatatctctatctgactccacaagattacaagcgagtgtccgcacttaactcagtgcattgtgaacacgtggaggatgagggcgagagtcggtacaagattacagatattataggtaaggaggagggcatcggcccagagaatttgagaggttccggcatgattgcgggcgagtctagccttgcctacaatgaaatcatcactatttccctggtgacatgccgggccattggtatcggagcctacttggtgaggctgggccagagaacaatacaggtggagaattctcaccttatcttaaccggggctggggcattgaacaaggtcttggggcgtgaagtatacacaagcaataaccaactaggcgggatccagataatgcacaataacggagtcacccactgtaccgtatgcgacgattttgaaggagtgtttacagtccttcactggttaagttacatgcccaagtccgttcattcgtcagtacctctcctgaattcgaaggacccgatagatcggatcatcgagttcgtgccaacaaagaccccatatgacccgcgctggatgcttgccggtcgccctcaccctacccaaaaaggtcaatggttgtccggtttctttgactacgggagcttttccgaaataatgcagccgtgggctcagacggtcgtcgtggggcgtgcacggttaggggggatccccgtgggagtagtggcagtcgagactcgaaccgtggaactgagtattcccgctgaccccgcgaatctcgattctgaggctaaaattatccagcaagccggtcaggtttggttccctgacagtgcatttaagacctatcaggcaatcaaagattttaaccgggagggcctgcccctaatggtttttgcgaattggcgggggttcagtggtgggatgaaggacatgtacgaccaggttttgaagttcggagcttatattgtcgacggtctcagagagtgttgtcagccggtcctggtatatatccctcctcaggccgagctgcggggtggcagttgggtagtcatcgattcctccatcaaccctcggcacatggaaatgtatgcagaccgcgagagtcggggttccgttctcgaacccgaaggaacagtggaaataaaattccggagaaaggaccttgtgaaaaccatgcgccgggtggatcctgtgtatatacatctagccgaaaggttgggcacgccggagctgagcactgcggagcgcaaggagctggagaataaactgaaggagcgagaggagtttttaattcccatctaccatcaggtcgctgtgcagtttgcagacctacacgatactccagggcggatgcaggagaagggagtgatcagcgatattctggactggaagacctcccgaaccttcttttattggagacttaggcgcctgttattagaggacctcgtcaagaaaaaaatccataatgctaatcccgagctgacagacggccagatccaagccatgctgagacgctggttcgtcgaggtggagggcacagtgaaagcctacgtgtgggataataataaagatcttgctgaatggcttgagaaacagctgacagaggaagacggggttcactctgtgattgaagaaaatatcaagtgcatttcccgggactacgtgctgaaacagattaggagcttagttcaagcaaatcccgaggtggcaatggactctataattcatatgacccagcatatctccccgacgcagagggcagaggtcatacggattctctcgaccatggacagtccttcgacatag

SEQ ID NO: 13720 - DNA, 1419 bp, synthetic construct
  misc_feature 1..1419: note = Description of Artificial Sequence: Synthetic coding sequence
  source 1..1419: mol_type = other DNA
atgcacaataacggtgtcacccattgtacagtctgcgacgacttcgagggtgtcttcacagtccttcactggcttagctacatgcccaagtccgtgcattccagcgtgccactactgaactctaaggatccaatcgacaggataattgagttcgtccctaccaagaccccctacgatccccggtggatgctggccggccgcccccacccaactcaaaagggacagtggttatcgggattttttgattatggcagcttttcagagattatgcagccttgggcacaaacggtagtggtcggccgtgcccgtttaggggggatccccgttggcgtcgtggcagtcgagacacgcactgtcgagctgtccattcccgctgaccctgccaatctggacagcgaagctaagatcatccagcaggccggtcaagtatggttccctgactcagccttcaagacttatcaagcaataaaggactttaaccgggagggattgcctctgatggtgtttgccaattggagaggattttcaggtggtatgaaagatatgtacgatcaggtcttaaagtttggcgcatatatagtagacgggctgcgggagtgctgccagcccgtattggtatacattccaccacaggccgagctgcggggaggttcctgggtggtcattgacagtagcattaacccccgtcacatggagatgtatgccgatagagagtcccgcggatctgtcctggagccggagggtaccgtggagatcaagtttcgtagaaaggacttggttaagactatgcgacgggttgatcctgtgtacatccatttggctgaaagattgggcacgcccgaactcagcaccgccgaacgcaaagagttggagaataaattgaaggagagagaggaatttttgattccaatttatcaccaggtcgccgtacagttcgcggatcttcacgacacgcccggacgaatgcaggaaaagggcgttattagcgacattttggactggaaaacttcgaggacctttttctattggcggctacgccgacttttactggaggacctagtaaaaaagaagattcataatgccaaccccgaactcactgacggtcagatacaggcgatgcttcgccgatggttcgttgaggtggagggtacagttaaggcgtatgtgtgggataacaacaaggacctagcagagtggctggagaagcaactgactgaagaagatggggtgcacagtgtcattgaagaaaatatcaaatgtatttctcgagactacgtgctcaagcaaatcagatctctggtccaggcaaaccctgaggtggcaatggattccatcatacatatgacacaacatattagtcccacccagagagctgaggttatccgcatactgtccacaatggatagtccctcaacctag

SEQ ID NO: 13721 - DNA, 129 bp, synthetic construct
  misc_feature 1..129: note = Description of Artificial Sequence: Synthetic coding sequence
  source 1..129: mol_type = other DNA
atgtccggactccacctggtgaaacagggacgcgataggaagaagatagatagccagcgagattttaccgtcgcgagtcccgccgaatttgtcaccagatttggcggtaacaaggtaatcgagaagtag

SEQ ID NO: 13722 - DNA, 7041 bp, synthetic construct
  misc_feature 1..7041: note = Description of Artificial Sequence: Synthetic coding sequence
  source 1..7041: mol_type = other DNA
atggacgaaccctcaccattagcccagcctctcgagttgaaccaacactctcgcttcataattggatcggttagcgaggacaacagtgaagatgagatttccaaccttgtcaaattggatctgctggaggaaaaagagggatccctttccccagcatcggtgggctcagatacactgagcgacctggggataagtagcctgcaggacgggctcgcactgcacattagatccagcatgtccgggctgcatttggtgaaacaaggcagagaccggaaaaaaatcgactcccagcgggactttaccgtcgctagtccggcagagtttgtgacacgcttcggcgggaataaggtgatagaaaaggtgctcatagccaacaacggaattgcagccgtcaaatgcatgcggagtattcggcgttggagttacgagatgtttcgaaatgagcgggcaattcggttcgtggtcatggtcactcctgaagatctgaaagcaaatgctgaatacatcaagatggcagaccattatgtgcctgtgccgggtgggcctaacaacaacaactatgccaatgttgagctaattctggacatagccaagagaataccagttcaggccgtttgggctggttggggacacgcatccgagaaccccaagctccctgagcttttgctaaagaacggtattgcatttatgggccccccgtcacaagctatgtgggcattaggagataaaatcgcctccagcatagtggctcagacagccggcatccccaccctgccgtggtctggctctggccttcgggtggactggcaagagaacgacttttcgaagcgcattttgaatgtccctcaggaactgtacgagaagggatatgttaaggatgtagatgatggacttcaagcggctgaagaagtgggttatcccgtgatgataaaagccagcgaggggggtgggggcaaggggattcggaaggtgaacaacgccgacgatttcccaaatctgttccgtcaggtccaggctgaggtcccaggatcccccatctttgtaatgagactggctaagcagtctagacatttagaagttcagatcctcgccgaccaatacggcaatgcaatttcactgtttggtcgtgactgttcagtccagagacgccatcagaagattatcgaggaagcgcccgctaccatcgctacccctgccgtgtttgagcatatggagcagtgcgctgttaagttggccaaaatggtcggctatgttagcgccggaacggtggaatacctgtacagccaggatggatcattctattttctcgaactgaacccccgactgcaggtggagcatccctgtacagagatggttgctgatgtgaacctcccagcggctcagctgcaaatagcgatgggcattcccctgtatcgtattaaagatatcagaatgatgtatggggtctctccatggggtgatagcccaatcgattttgaggatagcgcccatgtgccatgtcctcgtggccacgtcattgctgcaaggattacctcagaaaatccagatgagggtttcaagccgtcctcaggcaccgttcaagagctgaattttcggtctaacaagaacgtatgggggtatttttcagtcgcagccgcgggcggactgcatgaattcgccgacagccagtttggacattgcttctcctggggtgaaaatagagaagaggcgattagcaatatggtagtggcattaaaagaactgtcgattagaggggacttccgcactacagtggaatatctcattaagctgctggaaactgagtcatttcagatgaataggattgataccgggtggcttgaccgcctgattgcagagaaggttcaggccgagagacccgatactatgctgggcgtggtgtgcggagcactgcacgttgcggatgtgagtttgcgtaatagtgtcagcaattttcttcattccttggagcgggggcaagtccttccagcccatacccttctgaacaccgttgatgttgagctgatctatgaaggtgtgaagtatgttctcaaagttacccgccagagcccaaattcctacgtcgtcataatgaatgggagttgcgtggaagtggacgtgcatcggctgtcggacggcgggttgcttctgtcatacgatggttctagctacacaacctacatgaaggaggaggtggataggtataggattactatcggaaataaaacatgcgtgttcgagaaggagaatgaccccagcgtgatgcgctctccatctgccgggaaacttatacaatatatcgtggaggacggcgggcacgtgttcgctggccagtgctacgccgaaatagaggtgatgaaaatggttatgactttgacagctgttgagagcggctgtatccactatgtgaaacggcccggcgcagccctcgatccgggctgtgtcctggctaaaatgcaactcgacaaccccagtaaagtgcagcaggcagaactgcacacgggctccctcccccgaatccagtctactgccctgcgaggagaaaagctgcatagagtctttcattatgtgctggataatctggttaatgttatgaacggttactgcttgcccgatccatttttcagttcaaaagtcaaggattgggtggagcgcctgatgaagacattgagggatccatccctccctttgttggaactacaagacataatgacttccgtgtcaggtaggatcccaccgaatgtcgaaaagagcatcaaaaaagagatggcacagtacgcttctaatatcacttctgtgctatgtcaatttcccagccagcagattgccaatatactggactcgcacgctgcgactctcaaccgcaagtccgagcgggaagtattcttcatgaacactcagagtatcgtgcagctggtccagcggtaccggagtggcatcagaggtcacatgaaggccgtcgtgatggatttactaagacagtatcttcgagttgagactcagttccaaaatggtcattacgacaagtgcgtgtttgccctgagggaggaaaataagagcgacatgaacactgtgctgaattacatcttcagccacgctcaggttacaaaaaaaaatttactggttacaatgctaattgaccagctgtgtgggagagatcccactttaacagatgagctgctgaatattctcactgaactgacccagctgagtaagacgacaaatgctaaagtagcgctgcgtgcacgacaagtccttattgctagtcacttgccttcttacgaattgaggcacaatcaagtcgagagcatttttctttcagcaatagatatgtacggtcatcagttctgcatagaaaaccttcagaaattaattctgagcgagacctcgatttttgacgtgttgccgaactttttttaccactcgaatcaggtcgtgcgaatggccgccctcgaggtgtatgtgcggcgagcctacattgcatacgaattaaattccgttcagcacagacagcttaaggataatacttgcgtcgtggagtttcagtttatgttacccacaagccatcccaatcgggggaatattccaaccttaaatcgcatgtcctttagctccaatctcaatcattacggcatgacacatgtggcatcagtgtctgatgtgctgcttgacaattcgttcacacccccatgtcagaggatgggcgggatggtctccttcaggacattcgaagactttgttcgcatatttgacgaggttatgggctgttttagtgactctcccccgcaatcccccaccttccccgaggcaggtcatacgtcactttacgacgaggacaaagtcccacgcgacgagcccatccatatactgaatgtggccatcaagacagattgtgatattgaagacgacaggctcgcagccatgtttcgggaattcacccagcagaataaggctaccctcgtggaccatggaattcgcaggctcacatttctcgtcgcccaaaaagatttcagaaaacaggtaaactatgaagtggatcgacgatttcacagagagttccctaaattcttcacgttcagggctcgagataagtttgaagaagacagaatatatcgccacctggagcccgcgcttgcctttcagctggagctgaatcgcatgcggaacttcgatttaaccgccataccatgcgccaaccataagatgcacctatacctgggcgccgcgaaggtggaagttggcaccgaggttacagactacagattttttgttcgagccattattagacattctgaccttgtgactaaggaagcgagctttgagtacctgcagaatgaaggggagagactgttactagaagccatggatgaacttgaagttgcttttaacaacactaacgtgagaacagactgtaatcacatttttctgaacttcgtccctaccgtcatcatggacccttccaagattgaagaaagtgtccgaagtatggtgatgcgctacgggagccgtctgtggaaacttagggttctgcaggccgaattaaaaataaacatcaggttgactcctaccggaaaggccatccctataagactctttctaactaacgagtcggggtactacctcgatatttcactttataaggaggtaaccgatagccgaacagctcagattatgtttcaagcctacggtgacaagcaggggcccctgcacggaatgttgataaacactccttacgtcactaaggatctgttgcaatctaagcggttccaggcccaatcccttggaaccacttacatttacgatatcccagagatgtttaggcagtccttgatcaaactctgggagagtatgagcactcaggcatttcttccttctcccccacttcccagcgatatgcttacctacactgagctcgtgcttgacgaccagggacagctcgtacatatgaatagactgcccggggggaatgaaatcggaatggtagcttggaagatgaccttcaagtctcccgaatacccagaggggagagacataattgttatcgggaacgacatcacatataggattggatctttcggcccacaagaagatctcctatttttacgggccagcgagttggctcgagctgaaggaattccacgcatatacgtgtctgctaattctggagctcgcattggtcttgcagaggagatccgtcacatgtttcacgtagcatgggtggatccggaggatccttacaaagggtaccgttacctctatctcacaccgcaggactacaaaagggtgtccgctttgaactcagtgcactgcgagcacgtcgaagatgaaggagaatccaggtacaagatcactgatataatcggtaaggaagagggtatcggccccgaaaaccttcgaggatccgggatgattgcgggagagtcaagcttggcttataatgagatcatcactatttctctcgtcacctgccgcgcgatcggaatcggcgcctatttggtgcgattggggcagagaacaatccaggtcgaaaattctcacttgatcctgactggtgcaggcgctctgaataaggttctaggccgcgaggtgtacactagcaacaatcagttgggaggtatccagattatgcataataatggtgtgacccactgcaccgtctgtgatgactttgagggcgtatttacggtactgcactggctgagttatatgccaaagagtgtccattccagcgtgcctctgctgaattctaaggacccgatcgatcgaataatcgaattcgtccccactaagaccccgtatgaccccaggtggatgctggcaggcaggccacatccaacacaaaaaggccaatggctatcaggatttttcgactacggctcatttagtgaaataatgcagccctgggcacagactgtggtggtggggagggctcggctgggcgggatccctgtgggtgtggtggccgtggagacccggaccgtggagctcagtatccccgccgaccccgctaacctggattcagaggctaaaatcatacagcaagcgggacaagtttggttccctgacagcgccttcaaaacctaccaggccataaaagactttaatcgtgagggactgccactcatggtgtttgctaattggcgcgggttttcagggggtatgaaggatatgtatgatcaagttcttaagtttggtgcttacatagtggatggcctacgagagtgctgccagccggtgctggtgtatatccccccacaggccgagctgcgaggggggtcctgggttgtcatcgatagctctattaacccaaggcacatggagatgtacgccgacagggagtcccgagggtctgttctcgagcctgaggggactgtcgagatcaaatttcgccggaaagatctggtgaagactatgaggagggtggatccggtgtatatacacctcgccgagcggctgggtacacctgaactgagtacagcggaacgcaaagagctagaaaataagctgaaggagagggaagaattcctcatccccatctaccaccaggtcgctgtccagttcgcagaccttcatgataccccaggtagaatgcaggaaaagggggtgatatcggatatcctagactggaaaacatctagaaccttcttctattggcgattacgacgtctactattggaagatttggtcaagaagaagatccataatgccaaccccgagttaacggacggacagattcaggcaatgctgcgacgttggttcgtggaagttgagggtacggtaaaagcgtacgtgtgggataataataaggatcttgccgagtggctggagaaacagctaaccgaggaagacggcgtccatagcgttatcgaggagaatattaagtgtatttccagagattacgtactgaagcagatccgctccctggtgcaggctaatccagaggtagctatggattctattatccacatgacgcagcatatcagccccacacaaagggcagaggtaatcaggattttaagtaccatggattctccatctacctag

SEQ ID NO: 13723 - DNA, 129 bp, synthetic construct
  misc_feature 1..129: note = Description of Artificial Sequence: Synthetic coding sequence
  source 1..129: mol_type = other DNA
atgagtgggcttcatctcgtcaagcagggcagggataggaagaaaatagactctcagcgggacttcaccgtagcttcaccagcagagttcgttacaaggtttggggggaataaagtaatcgagaaatag

SEQ ID NO: 13724 - DNA, 234 bp, synthetic construct
  misc_feature 1..234: note = Description of Artificial Sequence: Synthetic coding sequence
  source 1..234: mol_type = other DNA
atggatgaaccttctcctttggcgcaacccctggagctgaatcagcattccagattcatcattggaagcgtttccgaggacaatagcgaggatgagatctccaacctcgtgaaactcgatctgcttgaggagaaggagggctcgttaagcccggcttcagtcggatcagacacactcagcgacctcggaatctcctcactgcaggacggcctggccctgcacataagattatag

SEQ ID NO: 13725 - DNA, 3138 bp, synthetic construct
  misc_feature 1..3138: note = Description of Artificial Sequence: Synthetic coding sequence
  source 1..3138: mol_type = other DNA
atgggatgcttttccgactcccccccacaaagcccaaccttccccgaggcaggtcatacatccctttacgacgaggataaggtcccccgggacgaacctattcatattcttaacgtcgcgattaagactgactgcgatattgaggatgataggctggcagcgatgtttagggaattcacacagcagaataaggccactctggtagatcacggtatccgccgactgaccttcctcgtggctcaaaaggattttcgcaaacaggttaactacgaagtggacagacgctttcacagggagtttcctaagttctttacgttccgagcccgggacaaattcgaggaggaccggatctaccggcatctggagcccgctttggcctttcagttagaactcaacaggatgaggaactttgatcttactgcgattccatgcgcgaaccataagatgcacctgtacttaggagctgccaaggtagaggtggggaccgaagtaactgattaccgcttcttcgtgagagctattatccgccatagcgaccttgttaccaaagaagcctctttcgagtacctccagaacgaaggagagcgtctcctgttagaagctatggacgagcttgaggttgcttttaataatacaaacgtgcggaccgattgcaaccacatttttctcaactttgtgccaaccgtcattatggatccttcaaagattgaggaatccgtccggtcaatggtaatgaggtatggaagcaggctatggaaattgagggtgctccaggcagagctcaaaattaatattcgacttactcctactggcaaggccattcccatcagactctttttgaccaatgagtccggatactatctggatatctctctatataaggaggttacagactccagaacagcacagattatgttccaagcttacggcgataagcagggaccgcttcacggtatgttgatcaatacaccctacgtgacgaaagatttactccagagcaaacggttccaggcacagagtctgggaaccacctacatttatgacattccagagatgttccgtcaaatcggcatggttgcttggaagatgactttcaagagccccgaataccctgagggaagagacataatcgtgattggaaacgacatcacctacaggattggatctttcggaccccaggaggacctcctgttccttagagcttccgagctggctagagccgaggggatacccagaatctatgtttccgccaattcaggcgctcgcattggtcttgcagaagaaattaggcatatgtttcatgtcgcttgggtggaccctgaggacccatataagggctaccgctatttgtacctgacgcctcaagactacaagcgcgtctccgcattgaattccgttcattgcgagcacgtggaggacgaaggggagtcacggtacaagatcacagatattataggaaaggaggaagggatcggccctgagaaccttagagggtctggcatgatagcaggcgaatcaagcctggcatataacgaaatcatcacgatcagtctcgttacttgccgcgctatcggcattggagcttatttggtaagacttgggcagagaacaatccaagtggaaaattcccatctcattctcacaggcgcaggggccctgaataaggtgctcgggcgggaagtgtacaccagcaacaaccagttgggcggaatccagattatgcacaataacggcgtgacacattgcacagtctgcgacgacttcgagggagttttcactgtgttacactggttgagctacatgcctaagtccgtgcactctagcgtccccctgctcaacagcaaagatcccatagaccgaattattgagtttgtccctacaaaaacaccgtacgaccccagatggatgctcgccggtcgcccgcatccaacgcagaagggacagtggcttagcggtttttttgattatggatctttctccgagatcatgcagccatgggctcagacagtggtcgttggtagggcacggttagggggaatcccagtgggtgtcgtagccgtcgagacaaggaccgtggaactcagcattccagccgaccctgccaatttggatagtgaggccaagataatccagcaggcaggacaggtctggtttccagacagcgctttcaaaacctatcaagctattaaagacttcaatcgggagggtttacccctgatggtgttcgccaactggcggggtttcagcggaggcatgaaagacatgtacgatcaggtgctcaagtttggggcctatattgtcgatggtctgcgagagtgttgccagcctgttctcgtgtatatccctccacaggctgagttgcggggtggaagctgggtggtcatagactcctctatcaaccccagacacatggaaatgtacgctgaccgggagagtagaggcagcgtgctggagccagaaggtaccgtggagatcaaatttcggcgtaaagatctggtcaagaccatgcgtcgcgttgacccggtgtatattcaccttgcggagcgccttgggaccccagaactaagtaccgctgagaggaaggagctggaaaacaagttgaaagagagagaagaatttctgattcccatctatcaccaggtcgcggttcagttcgccgatctgcacgatacccctgggagaatgcaggaaaaaggcgtgatctccgatatattggactggaagacttcccgaacatttttctactggcggcttaggcgactgctcctggaggatctggtcaaaaaaaaaattcataatgccaatccagagctcacggatggccaaattcaggcaatgctgcgtcgatggttcgtcgaggttgagggcaccgtcaaggcttacgtgtgggataataataaggacctggccgaatggttggaaaaacaactgaccgaggaggacggcgtgcactccgtcatcgaggagaacattaagtgcatttcacgggactatgtgctgaagcagattcgctctctggtgcaggctaatccagaagttgccatggatagcatcatacatatgacccaacacatttcgcctacacagcgcgcagaagtgattagaatcctgtccaccatggatagccccagcacgtag

SEQ ID NO: 13726 - DNA, 363 bp, synthetic construct
  misc_feature 1..363: note = Description of Artificial Sequence: Synthetic coding sequence
  source 1..363: mol_type = other DNA
atggatgagccctcacccttggcccagcccttagagcttaaccaacactctcgctttatcattgggtccgtgagtgaggacaattcggaagatgaaatcagtaatctcgttaaactggatttgctcgaggagaaagaaggaagcctgtctcctgccagtgtagggagtgataccttgtctgatctggggatctcatccttgcaggatggacttgctctccatatccgttcgagcatgagcggcttgcacttggtgaagcagggtcgagatcggaagaaaatcgactcccagagggatttcacagtagcctctcccgctgaattcgtgactaggttcgggggcaataaagtgattgagaaatag

SEQ ID NO: 13727 - DNA, 7113 bp, synthetic construct
  misc_feature 1..7113: note = Description of Artificial Sequence: Synthetic coding sequence
  source 1..7113: mol_type = other DNA
agcttctggaagtggatcagcactcagacagtgagaattatccgggctgtgagagcgcattttggcggaatcatggatgaaccatctccactggctcagccattggagctgaaccagcacagtaggtttattattggttcagtctctgaagataatagtgaagatgagattagtaatctggtgaagttggacctacttgaggaaaaggaaggatctttgtcacccgctagtgttggctccgataccttaagtgatctgggcatctcctctctgcaagacgggctggccttgcacatacgaagttctatgtcgggactgcatttggtgaaacagggtagggaccgcaagaaaattgatagccagcgggatttcactgtggcgtcccccgccgagtttgtaacccggttcggcggtaataaggttattgaaaaggtgcttattgcaaacaacgggatcgctgcggtaaaatgcatgagatccatcagaagatggtcatatgagatgtttaggaacgagcgagccattcgttttgtcgtgatggtgacccctgaggatctaaaagccaatgctgagtacattaagatggcagaccattatgtcccagtgccaggcggccccaataacaataactatgccaacgttgagctaatcctggacattgctaagagaatacccgtgcaagcagtgtgggccgggtgggggcatgcttcagaaaatcccaagttacccgagttgttactcaagaatggaatcgcgtttatgggtcccccatcacaagcgatgtgggctctcggggataagatagcctcatctatagtcgcccagaccgccgggattcctaccctgccctggagtggctccggtctacgagtggattggcaggaaaacgacttttcaaagaggatactcaatgtcccccaagagctgtacgagaagggctacgtaaaagatgtcgatgacggccttcaggcagccgaagaagtgggatatccagtgatgatcaaagccagcgagggaggtggtggcaaaggaatacggaaagtcaacaacgctgatgattttccaaacctctttcggcaggttcaggccgaggtgcccggcagcccaatttttgtgatgagactggccaagcagtcacggcaccttgaagtccaaattctggcggatcagtatggtaacgctatttcactgtttggaagagactgttccgttcagaggcgacaccagaagataatcgaggaagctccggccacaatagctacacctgcggtcttcgagcatatggaacagtgcgccgtgaaactcgcgaagatggttgggtatgtctcagcaggcactgtcgagtacctttattcccaagacggcagtttctactttctcgaactgaatccaaggctacaggtcgaacacccctgtaccgagatggtagctgacgtgaatctgcccgccgcccagttgcagattgccatggggatccctctctatagaatcaaggacattaggatgatgtatggggtctccccttggggcgacagccctattgattttgaggattcagcacacgttccctgtccccggggccatgttattgctgctcgcatcacatcagagaaccccgacgaaggtttcaagcccagctccggcaccgtccaagagctaaacttcaggtccaacaagaatgtttgggggtacttctctgttgccgcagcaggtgggttgcacgaattcgccgacagccaatttggacactgcttctcgtggggggagaaccgcgaggaggccataagtaatatggtggtggcactgaaggaactaagcatcaggggagattttcgcactaccgtggaatatctcatcaagttactggaaactgagagctttcagatgaataggatcgacaccggctggctggacaggctgattgctgagaaggtccaagccgagcgtccagacacgatgctaggtgtcgtctgtggcgctctacatgtcgccgacgtgtcgctgcgcaactcagtgtctaatttcttgcacagtctggagcgcggtcaggtgctgcctgcccatacactgctcaataccgtcgatgtggaactcatttacgaaggagtaaagtacgttttaaaagttactcggcagtcccccaatagctatgtcgtcataatgaacggcagctgtgtggaagtggacgtgcatcggctaagtgatgggggactgctgctcagttacgatggaagttcttacacgacgtacatgaaggaagaggttgatcgctatcgcattaccatcggcaacaagacatgcgtgttcgagaaagaaaatgaccctagcgttatgcggtcaccttctgcaggcaaattgatccaatatattgtggaagatggcggtcacgtcttcgcaggtcagtgctacgcagaaattgaggtcatgaagatggttatgacattgactgcagtagagtctgggtgtattcattatgtcaaacggcccggtgcggctttagaccccggctgcgtccttgccaagatgcagctagacaacccttccaaagttcagcaggcagaattgcatacaggatcactgcctagaatacaatcaaccgccctcaggggggaaaaactccatcgagtgtttcactacgtgctagataatctcgtcaacgttatgaatggctactgcctccctgatccttttttttcttccaaggtgaaggattgggtagagagactcatgaagactctacgcgatccatcactgccattactcgagcttcaagacatcatgacgtcggtcagtggccggataccacccaacgttgaaaaatcaatcaagaaggaaatggcccagtacgcttccaacatcacgtctgtgctctgtcagtttcctagccaacagatagccaacatccttgattcacacgcagcaacactcaacaggaagtctgaacgcgaggtattcttcatgaacacgcagagcatcgtacagctcgtccagaggtacagaagcgggatcaggggccatatgaaggccgtcgtgatggacctgctgcgccagtatcttcgggtggagacgcagttccagaacggtcactacgataagtgcgtcttcgcgctccgcgaagagaataaatcagatatgaacactgttctcaactacattttcagtcatgcccaggtcacaaagaagaacctactagtcactatgctgattgatcagctgtgcgggcgagatcccacattgacagacgaattgttgaacatccttaccgaattgacccaactgtcaaaaacaaccaacgctaaagtggccctccgagcccgccaagttctgattgccagtcacttgcccagttacgaactccgtcataatcaggtggaaagtatcttcttaagcgccatagacatgtacggccaccagttttgtatcgaaaacctacaaaagctcatcctgtccgagacgtccatctttgatgtgcttcccaactttttctaccactcgaatcaggtcgtcaggatggctgccctcgaagtgtacgttaggagagcgtacatcgcctacgaactgaatagcgtgcagcacaggcagcttaaggataacacctgcgtggtcgaatttcagtttatgctaccgactagtcatcctaatcgcggcaatattcccactctgaatcgtatgagtttctcttccaacctcaatcactatgggatgactcacgtagcaagtgtctccgacgtgttgctcgataactcttttacacccccgtgtcagcgcatgggaggcatggttagcttccggactttcgaggactttgtgcgaatcttcgatgaggttatggggtgttttagcgactcaccccctcaaagccccacttttcccgaggctggccacaccagcctgtacgacgaggacaaggtgcccagagacgaaccaattcacatcctgaacgtagcgattaaaacagactgtgatatcgaggatgatcgactggccgccatgttccgagagttcacacagcagaataaggcaacccttgttgatcatgggataagacgcctgactttcctcgtggcccagaaggatttccggaagcaggttaattacgaggtagaccggagattccatagagagttcccaaaattcttcacattccgcgctagggataagttcgaagaagatcgcatctaccgtcacctggaacctgccttggcctttcagctggaactcaacaggatgcgaaacttcgatctgacagctattccctgtgctaaccacaaaatgcacctgtatttgggcgctgcaaaggttgaggtcggaaccgaggttaccgactatcggttcttcgtccgagcgatcatccgccatagcgacctggttacaaaggaggcatctttcgagtaccttcagaacgagggcgagcgtttactcctggaggccatggacgaactggaggtcgcattcaacaatacaaatgttcgaactgactgcaatcacatcttcctcaactttgtgccaacagtgattatggacccatctaagatagaagaatcggtcaggtcgatggtgatgaggtacgggagtaggttgtggaagctgcgggtgttacaggcggagctgaagattaacatccgtctgaccccaacggggaaagcaattccaatcaggctgtttcttacaaacgaaagcggttattatcttgacatctctctgtataaggaagtgaccgactcccggactgctcagattatgtttcaggcttatggcgataaacagggccccctgcatggaatgctcattaacacaccgtacgtgactaaggatctgctgcaatccaaacggttccaggcgcagtcactaggaacaacctatatctacgacattcctgaaatgtttagacagtctctcataaaactgtgggagtctatgtcgactcaggcgttcctgccatctccaccactcccttctgacatgctaacatatacagaattggtgctcgatgaccagggacagttggtccatatgaacagactgccaggggggaacgagatcggcatggttgcctggaaaatgacattcaaaagtccagagtaccctgagggcagagatattatcgtgatcggtaatgatatcacataccgcatcgggtcttttggcccccaggaggatctgctgttcttacgtgcttcagagctcgcaagagctgaggggatccctagaatctatgtgtctgctaactcgggagccagaattggactggccgaggaaattcgtcatatgtttcatgtcgcatgggttgaccctgaagatccgtataagggatacaggtacctttacctcacccctcaggactataaacgagtttctgccctgaattcggttcactgcgagcacgtcgaggatgagggagagtcaaggtataaaataacagacattataggcaaagaagagggaatcgggccagaaaatcttagaggcagcggaatgattgccggagagagtagcctcgcgtataatgagatcatcaccatcagtctcgtcacttgccgagccattgggataggcgcttatctggtgcgactagggcagaggactattcaggtggagaatagccacctgatcctgaccggcgccggcgcacttaacaaagtgctgggccgcgaggtgtatacctctaataaccaactgggtggcatacagattatgcataacaacggcgtcacgcattgtacagtttgcgatgacttcgagggagtgttcaccgtgttgcactggctttcatacatgcctaagagcgttcactcctccgtccccctgctgaattccaaggacccaattgatcgcatcatcgagtttgttcctaccaagaccccgtatgatccacgctggatgttagcggggcggcctcacccaacacagaagggacagtggttgagtggtttcttcgactatgggtcatttagtgagattatgcagccttgggcacagactgtggtcgtcggaagagctagactggggggcatccccgtgggcgttgtcgcagtggagacccgcaccgttgaacttagtattcctgctgaccccgctaacctcgacagcgaggcaaagatcatacagcaggcgggtcaggtgtggtttcccgactccgcgtttaagacataccaggcaatcaaggacttcaatcgggaaggactcccgctcatggtgtttgccaactggagagggttttcgggcgggatgaaagatatgtacgaccaggtgctgaagttcggcgcatacatcgttgatgggttaagggagtgctgccagcccgtgctggtgtatatccctccacaggctgagctgcgtggcggttcctgggtggttatcgacagctccataaacccacgccatatggaaatgtacgccgaccgcgaaagtcgagggtcagtcctggaaccagaaggcaccgtggaaattaagttccggcggaaagacttagtcaagacaatgaggagagtagatccggtgtatattcacttggccgagcggcttggcacccctgagctgtcaaccgccgagagaaaggaattggagaacaagctgaaagaacgggaagaattcctcatccccatataccatcaagtggcagtgcaattcgctgacctccacgacactccaggaaggatgcaggaaaaaggtgtaatttccgatatcctggattggaagaccagtagaacctttttttactggaggcttagacgcctgcttctagaggatttagtcaagaaaaagatccataacgccaatcccgagctaacagacggacagatacaggcaatgctccgaagatggttcgttgaggtagaaggtactgtcaaggcatacgtgtgggataataataaagatctcgccgaatggctggaaaaacagctaacagaagaggacggggtacattccgtaatagaagaaaacataaaatgcattagcagggactacgtactcaagcaaatccgctccctggttcaggccaacccggaagtcgcaatggacagcataatacatatgacccaacacatcagccccacccaacgtgctgaggtaatccggattctgagtaccatggactcaccgtccacatag

SEQ ID NO: 13728 - DNA, 777 bp, synthetic construct
  misc_feature 1..777: note = Description of Artificial Sequence: Synthetic coding sequence
  source 1..777: mol_type = other DNA
atgtctggcttacacttggtgaagcaggggcgcgacagaaagaagatcgacagtcagcgcgattttactgtggccagccctgcggagtttgtgaccagatttggcgggaataaggtgattgagaaagtgctgattgccaataacgggatagccgccgtcaagtgtatgcgatccatccggcggtggagctacgagatgttcagaaacgagcgagccataaggttcgttgtgatggtaacaccagaggacttgaaggctaacgccgagtacatcaagatggcggatcattacgtgccagttcccggtgggcccaacaacaataattacgctaacgtggagctcatcttggatattgctaaacgaattccggtacaggctgtctgggcaggctggggtcatgcctctgagaacccaaagcttccagaattactgctaaagaatggaattgccttcatgggacccccaagccaggcgatgtgggcattgggcgacaagattgcatcttctattgtcgctcaaacagccgggatacctaccctgccatggtctggatccggcctgagagtggactggcaggaaaatgacttttcaaagcgaatcctaaatgtacctcaagagttgtacgaaaaaggatacgtgaaggatgtggatgacggcttacaggctgctgaggaagtgggctatccagttatgatcaaagcgtcagagggtggaggaggtaaagggatccgtaaagttaataatgccgatgacttcccgaacctctttcgccaatag

SEQ ID NO: 13729 - DNA, 144 bp, synthetic construct
  misc_feature 1..144: note = Description of Artificial Sequence: Synthetic coding sequence
  source 1..144: mol_type = other DNA
atggatgaaccaagccctcttgctcagcctcttgagctgaaccagcactcacgctttatcatcggaagtgtcagcgaagacaacagcgaagacgagataagcaatctcgtgaagctggaccttctcgaagagaaggaaggatag

SEQ ID NO: 13730 - DNA, 2679 bp, synthetic construct
  misc_feature 1..2679: note = Description of Artificial Sequence: Synthetic coding sequence
  source 1..2679: mol_type = other DNA
atggaccattatgacagtcaacaaacgaacgattacatgcagccggaggaagactgggaccgcgatttgctactggatcccgcttgggagaaacagcagcgaaagaccttcactgcatggtgcaactcacacctgcgaaaagcaggcacccaaatcgaaaatatagaagaggatttcagggatggtttgaaacttatgctactgctcgaggttatcagtggagagcgcctcgccaagcccgagagaggcaagatgagggttcacaaaatctccaacgtgaacaaggctttagatttcattgccagcaagggcgttaagctcgtgtcaataggcgcagaggaaatagtggatggaaacgtgaagatgacattaggaatgatttggacaatcattctgagatttgcaatccaggacatctcagtcgaggagacctcagccaaggaagggctgctgctgtggtgccagagaaagaccgctccttacaaaaacgtgaatatccagaattttcatattagctggaaagatgggctcggtttttgcgcactgattcaccggcaccgccctgagctcatcgactacggcaaactgaggaaggatgatccactgacaaatctcaatacggctttcgacgtcgccgaaaagtaccttgatatacccaaaatgctcgacgccgaagatattgtgggtaccgcgagacctgatgaaaaggccatcatgacgtacgtgagcagcttttatcacgccttctcaggagcccagaaagcggaaactgctgccaatcgcatttgtaaagtgcttgccgtaaaccaggaaaacgagcagctcatggaggactatgagaagctggcatctgacctactagagtggattagacgaacaataccttggctggaaaaccgcgtcccagaaaacaccatgcacgcaatgcagcagaaactcgaagacttccgagattacagacgcctgcataagcctcctaaggtgcaagagaagtgccagctcgagatcaattttaatacccttcagaccaaactacgtctgagcaatagacctgccttcatgccatccgagggacggatggtgagtgatatcaataatgcctggggctgcctggagcaagtggaaaaaggttacgaggagtggctgctgaacgagattaggaggctggaacgcctagaccacctggccgaaaagtttcgccagaaggcctccatccacgaggcctggacagatggtaaggaggccatgttgcggcagaaggactacgagactgccactctgtcagagattaaggcgctcttaaaaaaacacgaggcttttgaaagtgacttagccgcgcatcaggacagagtggagcagatcgccgccatcgcgcaggaactcaatgaacttgattactacgactctccatccgttaacgcccggtgccagaaaatatgcgaccagtgggacaacttaggggctctcacacagaagcgaagagaggcactggaacgcaccgagaaactgctggagacaatcgatcaactctacttggagtacgccaagcgggcagcgccatttaataattggatggaaggggccatggaagacttgcaggacaccttcatcgtacacaccattgaagagatccagggcctgaccaccgctcatgagcagtttaaagccaccctccccgatgccgataaggagcgcctcgccatcctcggaatccacaacgaggtttctaaaatcgtgcagacatatcacgtcaatatggccgggacgaatccatatactacgataacaccacaggagatcaacggaaagtgggaccatgtcaggcagctcgttcccaggcgagatcaggcactgactgaagaacatgccaggcagcaacacaatgagcggctccggaagcagtttggcgcccaagcgaacgtaatcggaccatggatccaaactaagatggaggagattggccggataagcattgagatgcatggaaccctcgaggatcagctctctcatctgcgccagtacgagaaaagtatcgtcaactataagccaaaaattgaccaattggaaggagatcatcagttgatccaggaagccctgatcttcgacaacaaacataccaattatacaatggaacatatcagggtcggatgggagcagctgcttactacaatagcacgcacaattaatgaagttgaaaaccagatactgacacgagatgccaaggggatttcacaggagcagatgaacgaatttagggcctcttttaaccactttgacagggatcactccggtacactggggcctgaagagttcaaggcgtgtctcatcagtctgggttacgacatcggtaacgaccctcagggcgaggcggagtttgcacgaataatgtctattgtagacccaaatcgactgggtgttgttacattccaggcctttatagactttatgtccagggaaaccgctgataccgataccgcggaccaggtgatggcaagctttaagatcttggcgggagacaaaaactacattactatggacgagctgcggagagaactgcctccagatcaggctgaatactgcatcgctcggatggcaccctacactgggccagattctgtgcctggcgcactcgactatatgagcttttccaccgcattgtacggagaaagcgacctctag

SEQ ID NO: 13731 - DNA, 2745 bp, synthetic construct
  misc_feature 1..2745: note = Description of Artificial Sequence: Synthetic coding sequence
  source 1..2745: mol_type = other DNA
atggatcattacgattcacagcagaccaatgattatatgcagccagaggaagattgggatagggatctcctcctggaccctgcctgggagaagcagcagcgcaaaacatttacagcgtggtgtaattcacatctgcggaaggcgggtacccaaattgagaacatagaagaggattttagggatggccttaaattaatgctgctgcttgaagtcatcagcggcgagcgtttagcaaagccggagcgcggaaagatgagagtgcacaagatcagcaacgtcaacaaggctcttgactttattgcatctaaaggcgttaagcttgtttctatcggtgccgaggagattgtggatggaaatgtgaagatgactctgggcatgatctggacaatcatcctccgatttgctatacaggacatcagcgttgaagagaccagcgctaaagaagggctgttgctctggtgccagcggaaaactgccccctataaaaacgttaacatccaaaacttccacatctcttggaaagatggactgggtttttgtgcccttatacatcggcacagaccagaacttatcgattacggcaaactccggaaggatgacccgttgaccaatctgaacaccgcattcgacgtcgctgagaaatatctggatatacccaaaatgctggatgctgaggatatcgtcgggacagcgaggcccgacgagaaagcgatcatgacctatgtcagctccttctatcatgccttcagcggcgctcaaaaagctgagactgccgctaaccgaatatgtaaagttctggccgtgaaccaggaaaacgagcaacttatggaagattatgagaaactagcctcagatctgctggaatggatcagaagaacaatcccttggctagagaacagggtcccagaaaatacgatgcacgcaatgcagcaaaagttggaggattttcgcgattacagacgattgcacaagccaccaaaagttcaggaaaaatgtcagctggaaatcaactttaacaccttacagacgaaactgaggctgagcaatcgccccgcgttcatgccttccgagggcaggatggtctctgacatcaacaacgcttggggatgtttggagcaggtcgagaagggctatgaggagtggcttcttaacgagattcggcgcctggagagactggatcatctcgctgaaaagtttcgtcaaaaggcttccatccacgaggcatggacagacggtaaggaagccatgctacgccagaaggattatgagacagcgacattgagcgagataaaggctttactcaagaaacacgaggcgttcgaatcagatctggcagcccaccaagatagggtcgagcagattgcagcaattgctcaggagctaaatgagcttgattattatgactccccaagcgtgaacgcgagatgtcaaaaaatttgcgatcaatgggataatttgggcgctctgactcagaaacgtcgtgaggccttagagcgcaccgagaaactgctggagaccatcgatcagctctatttggagtatgccaaaagggcagccccctttaacaactggatggagggcgccatggaggatcttcaggacacctttattgtgcacacgatcgaggagatacaggggctgacaacagctcacgaacagtttaaggccacattgcctgacgctgataaggaacggttagccatcctcgggatccacaatgaggtgtcaaaaatcgtccaaacgtatcatgtgaatatggccggaaccaacccatacacaactatcactccccaagagattaatggcaagtgggatcacgtgcgccagctggtcccacgtagagaccaggccctgaccgaggaacacgccaggcaacagcacaacgagcggctcagaaagcagttcggcgcccaggcaaatgtcattggaccttggattcagaccaaaatggaggaaatcggacgcattagcatcgaaatgcatggcaccctggaggaccagctctcccacctgcgccaatacgagaaaagtatcgtcaattacaagcctaagattgatcagctcgagggggatcaccaactcatacaggaagcactgatcttcgataacaagcatacaaactacacgatggagcatatcagagtgggttgggaacagcttctcacaactatagcgcgcacaattaatgaagtcgagaatcaaatcctgacccgtgatgctaagggaatctcccaagaacaaatgaacgaatttagagcctcctttaaccactttgatagggaccactcgggcaccctggggcccgaagagttcaaagcctgcttgatcagccttggctatgacatcgggaacgacccgcaaaagaagaccggcatgatggataccgacgactttcgggcttgtttgatctccatgggttacaacatgggagaggccgaatttgctcgcatcatgtcaatcgtggatccgaatcgactgggcgtggtcaccttccaggcattcatcgactttatgagcagggaaaccgccgacacagataccgccgaccaggtcatggcctctttcaaaattctggcgggtgataagaactatatcacaatggatgaactgagaagggagctcccccctgaccaggcggagtactgcattgctagaatggctccatacacgggaccagattccgttccaggagccctcgattacatgagcttctcaactgctctgtatggtgagtcggatctatag

SEQ ID NO: 13732 - DNA, 2664 bp, synthetic construct
  misc_feature 1..2664: note = Description of Artificial Sequence: Synthetic coding sequence
  source 1..2664: mol_type = other DNA
atggaccattacgatagccaacaaacaaacgattacatgcagcctgaagaggactgggaccgcgatctgctgctcgatcctgcgtgggaaaagcagcagagaaaaacctttaccgcgtggtgcaatagccacttgaggaaagccggtactcaaattgaaaatatcgaagaggattttcgtgatggtctaaagctaatgcttctattggaagttatcagcggagaaaggttggcgaagcccgagaggggcaagatgcgagtgcataagatctcaaatgtaaacaaggccctcgattttatcgcatctaagggggttaagctggtcagcataggggccgaggagattgtggacgggaacgtgaaaatgaccctggggatgatctggaccattatacttcgctttgctatacaggacatctctgtggaagaaacatccgccaaagaaggccttctactgtggtgtcaacgcaagaccgctccttataagaacgtgaatatccagaatttccatatctcttggaaggacggactcggcttttgtgccttgattcacagacaccgccctgaactgattgattatgggaagctgcgaaaggacgaccccctcaccaatttgaataccgctttcgacgtggctgagaaatatttggacatcccaaagatgctggatgccgaagacattgtggggacagcgcgcccagacgagaaagcaattatgacctacgttagcagcttctatcacgcgttcagcggggcccagaaggcagaaacggctgccaatcggatttgcaaagtactggccgtcaaccaggaaaacgaacagctgatggaagattacgaaaagctggcttctgacctcctggagtggatccgtcggactatcccttggctggaaaaccgcgtcccagaaaatacaatgcacgccatgcaacagaagctggaagactttcgtgactaccgaaggcttcataagccacccaaggtccaggaaaaatgccagctcgaaataaacttcaacaccctgcagacaaagctccggctgtctaacagaccagccttcatgccctcagagggtcggatggtatccgatattaacaatgcctggggctgcctcgaacaggtggagaaaggatacgaagaatggctgcttaatgaaatccggcggctggagagactcgatcacttagccgaaaagttcaggcagaaagcctccatccacgaggcctggacggacggtaaggaggctatgctgaggcaaaaagattatgagacagccacactgagcgaaattaaggctctgttaaagaagcacgaggcctttgaaagcgacttggccgcccatcaagatagagtggagcagattgcggcaatcgcccaggaactgaacgaactcgactactacgattccccatcagtgaatgcccggtgtcaaaaaatctgtgatcagtgggataatctgggggccttgacacagaaaaggcgtgaggcgttggaaagaacggaaaaattattagagactatcgaccagctatacctggaatacgcaaagcgtgccgctccctttaacaattggatggagggcgccatggaagacttgcaggacactttcattgtccacaccattgaagagattcagggtctgaccactgcacacgaacagtttaaggccacactgccggatgccgataaagagcggctggctatcttgggcattcacaacgaggtctccaaaatcgtacagacttatcacgtaaacatggccgggaccaacccttacactacgatcacgccacaggagataaacggcaaatgggatcacgtcaggcagcttgtaccacgcagggaccaggcgttgacagaggagcacgcccgacagcagcacaatgaacggctgagaaaacagttcggagctcaggctaatgtcattgggccatggatacagaccaagatggaggagatcggccgcatctcgatcgagatgcatggtaccctggaagatcagttgtcccatctgagacagtatgagaagtcgattgtgaattacaagccaaagatcgaccagctggaaggcgaccatcaactgatccaggaggccctgatattcgacaataaacataccaattacacaatggaacacatcagggtgggatgggaacagctcttaaccaccatcgccaggaccatcaacgaagttgagaatcagattctcacacgggatgcaaagggtatctcgcaggagcaaatgaacgagtttagggccagcttcaatcattttgacagaaaaaagacaggcatgatggataccgacgattttcgcgcctgcctgattagcatgggatataatatgggggaagcggagtttgctcggatcatgtctattgtggacccaaatcggcttggcgttgtcacctttcaggccttcatagactttatgtctagggagaccgctgacactgatactgccgatcaggtgatggcctcttttaagatcctggcgggggacaagaactatatcaccatggatgaactgaggcgggagctgccccctgatcaggccgaatactgcatcgccagaatggcgccatatacagggccggatagcgtgcccggggccctggattacatgtctttcagcacagcattatatggagaaagtgacctgtag

SEQ ID NO: 13733 - DNA, 2736 bp, synthetic construct
  misc_feature 1..2736: note = Description of Artificial Sequence: Synthetic coding sequence
  source 1..2736: mol_type = other DNA
atggttgactaccacgcagctaatcagtcatatcagtacggaccctcttctgctggaaacggcgcaggcggggggggatccatgggcgattatatggcccaggaggacgactgggatcgcgatttattgctcgaccctgcctgggagaaacagcagcgcaaaacctttaccgcatggtgcaattcccacctgcggaaagccggcactcagattgaaaatattgacgaagactttcgggatggtttaaaactgatgttgctgctggaagtgatctccggggagcgtctcccgaaacccgaaagaggcaaaatgagagtgcacaaaatcaacaatgtgaacaaagccctggactttattgcgagcaaaggtgttaagctggtgagcataggtgccgaagagattgtagatggaaatgctaaaatgacccttgggatgatctggaccatcattttgcgatttgctatccaggatatttccgttgaagaaacctctgctaaggagggcctactgctctggtgccagaggaaaaccgccccttataaaaacgtgaacgtgcagaactttcatatctcttggaaagatggcctcgcattcaatgctttaatccatcgacaccggccagagctgattgaatatgacaaactcagaaaggatgacccagtgaccaatctgaacaacgctttcgaagtcgccgagaagtacctggacatcccgaagatgttagatgccgaggacatcgtcaatacagctagacctgacgagaaggccatcatgacgtacgtgtctagcttctaccacgccttctccggagcacagaaggccgagacagcagcaaaccgcatttgtaaagttctcgctgtgaatcaggagaatgagcatctgatggaagactacgagaaactcgcaagcgatttgcttgaatggattcggagaacaatcccctggctagaggatcgcgtccctcagaagactattcaagagatgcaacaaaagctggaagacttcagggattatcgccgcgtacataagcccccaaaggtccaggaaaagtgtcaattagaaataaacttcaatactctgcagacgaaactacgcctgtcaaaccgccccgctttcatgccaagcgagggcaagatggtatctgacataaacaatggttggcagcatctggagcaggccgaaaaaggctacgaagaatggctactcaatgaaatccggcgcttggagcgtctcgaccacctggccgagaaatttcggcagaaggctagcatccacgaagcttggacagatgggaaagaagccatgttaaagcaccgggactacgaaaccgcgactctcagtgacataaaggcccttattcgcaaacacgaggccttcgaaagtgacctggctgctcatcaggatcgagtggagcaaattgccgccatagcccaggagctcaacgaactcgattactacgatagccataatgtgaacacaagatgtcaaaaaatttgtgaccaatgggacgccttggggtctctcacgcactctaggcgggaggcgctggaaaagacagaaaaacagctcgaggccatcgatcaactccaccttgaatacgctaaacgcgcagcccccttcaacaactggatggagagtgctatggaggatctgcaggacatgttcatagtgcacacaatcgaggagatcgaaggtttgatctctgctcacgatcagttcaagtccacgctgccggatgccgatcgggagagggaggccattcttgctatccacaaggaagcccagcgcatcgcagaatcaaatcacattaaactgagcggcagcaacccttacaccaccgtaacccctcagatcatcaacagcaagtgggagaaagttcaacagctagtgcccaaacgcgaccacgcattgctggaagaacagtccaagcagcagtccaacgagcacctgcggcggcagtttgcaagccaggctaatgtggtagggccctggattcagactaagatggaggaaattggtagaattagcattgagatgaacgggaccttagaggaccagttgagtcacctaaaacagtatgagcggagcatcgtcgattataagccaaacctcgacctgctggagcagcagcatcagctgatacaggaggcgctgatctttgacaacaagcacacgaactatactatggagcatatccgggttggctgggagcagctgttgaccaccattgcacgcaccatcaacgaagtggagaatcagatcctgactcgagatgctaaaggcatcagccaagagcagatgcaagaattccgagcgtcgttcaaccacttcgataaggatcacggcggggcactgggacctgaagagttcaaggcttgcctgatatctctcgggtatgacgtcgaaaatgacaggcagggtgaggctgagttcaatcggatcatgagtctcgtggatcctaatcattctggactcgtgactttccaggccttcatcgactttatgagtagggagaccactgatacagatactgccgaccaggtcatcgcttctttcaaggtgctggccggcgataagaatttcattacagcagaggaactacggagggagctgccgcctgaccaggccgagtattgtatagcaaggatggctccttatcagggacccgacgccgtccccggcgccctcgattacaaatccttcagcaccgctctttatggagaatcggatctgtag

SEQ ID NO: 13734 - DNA, 2079 bp, synthetic construct
  misc_feature 1..2079: note = Description of Artificial Sequence: Synthetic coding sequence
  source 1..2079: mol_type = other DNA
atggttgactatcacgctgcaaaccagtcataccaatatggaccaagttctgccggaaacggagcagggggggggggatcaatgggcgactatatggctcaggaggacgactgggatcgcgatctcttgctggatcctgcctgggagaaacagcagcgcaaagccgaaaccgcggctaaccgaatttgtaaagtactcgcagtcaaccaggaaaatgaacatctgatggaggattatgagaagctcgcatccgatctccttgaatggatcagaaggacgattccatggcttgaagacagagtacctcagaagacgatccaggaaatgcaacagaaactggaggatttcagggactatcgtcgcgtccacaagccacctaaggtgcaagagaagtgtcagctggaaattaattttaatacgctgcagacaaagcttaggttgagtaatcggcccgcgttcatgccaagtgaggggaaaatggtgtccgatattaacaatggctggcagcacctggaacaggcggaaaagggctatgaagagtggctcctgaatgagatccggagattagagcggctggaccacctggctgaaaagttcaggcaaaaggcttccattcatgaagcctggacagacggaaaagaagccatgctgaagcatagggactacgaaacagcgacactaagcgacattaaagctttgattcgaaagcacgaggcatttgaaagcgatcttgctgctcatcaggatcgggtggaacaaatcgctgctatcgcccaagaactgaacgagcttgactactacgactcacataatgtgaatacgaggtgtcagaagatctgcgaccaatgggacgcccttgggagcttgacccattcaagacgggaggctcttgagaagacagagaagcagctggaagccatagaccagttgcacctggagtacgccaagcgcgccgccccattcaataactggatggagagtgcaatggaggacctgcaggacatgttcattgtgcacacaatcgaagagatcgagggcctgatatccgcccatgaccagtttaagtctactcttccagatgcagatcgggagagggaagcaatcctagcaatccataaagaagcccagaggatcgccgagtcgaatcacattaagctgagcggaagcaatccctacacaacagtgactccacagataattaattcaaaatgggagaaggttcagcagctcgtgcccaagcgcgatcatgccctgttggaagagcaatctaaacaacagagtaacgaacacctaaggcggcagtttgcatcacaggcaaacgttgtcggtccctggatacagaccaaaatggaggagatcggacgtattagtatcgagatgaacgggaccttggaggatcaactatcgcacctgaagcaatacgaaaggtcgatcgtagactataaacccaatttggatttgctggagcagcaacatcagctgatccaggaagctctgatcttcgacaataaacacactaactatactatggaacacatcagagtcgggtgggaacagctgttgaccacaatagctaggacgattaacgaggtagagaatcagatactcacccgtgacgcaaaagggattagccaggagcagatgcaggaattcagagcttcatttaaccacttcgataaggatcacggcggcgccctgggcccagaggagttcaaagcctgtttaatttcgctggggtatgacgtggagaatgaccggcagggtgaggcggaatttaaccggattatgtccctggtggacccaaaccacagtggactcgttacttttcaggccttcatcgattttatgtctcgggaaactactgataccgatacagcagatcaggtaatcgcctcatttaaggtgttggccggtgacaagaatttcatcactgccgaggaattgcgaagagaacttccacctgaccaggccgaatactgtattgccagaatggccccctaccagggaccggacgctgtgcctggtgcccttgattacaaaagcttcagtacagctctctatggtgagagcgacctgtag

SEQ ID NO: 13735 - DNA, 1566 bp, synthetic construct
  misc_feature 1..1566: note = Description of Artificial Sequence: Synthetic coding sequence
  source 1..1566: mol_type = other DNA
atggtcgactaccatgcggccaaccagtcgtaccagtacggcccaagctccgcagggaacggagccggcgggggcgggagcatgggagattatatggcgcaggaagacgattgggatcgagatctgctgcttgaccccgcttgggaaaaacagcagagaaagactttcacagcttggtgtaattcccacctgagaaaggccggcactcagatcgaaaacatagacgaagacttccgcgacggtctcaagctgatgctgctgttggaggtgcatgagcttgactattatgacagccataacgttaacacccgatgtcagaagatttgcgatcagtgggacgctctgggctctcttacgcattctcggagagaggcgctggaaaaaaccgaaaagcaactcgaagctatcgaccaacttcacctggagtacgctaaacgtgccgctcctttcaacaactggatggagagtgctatggaggatttgcaggatatgtttattgtgcacaccattgaagaaatcgagggactgatttccgcacacgaccagtttaagagcacgttgccggacgccgaccgagagcgagaggccattcttgccatccacaaagaagcccaacggatcgccgagtccaaccatatcaaactgagcgggtccaacccctataccaccgtcactcctcagataatcaactctaagtgggagaaagttcagcagcttgtccccaagcgggatcacgctctcctggaggaacagtcgaaacagcagagcaacgagcacctccgccggcaattcgcctcacaggctaacgtcgtcggtccgtggatccagactaagatggaggaaatcgggagaatatccatagagatgaatggcacactggaggatcagctgtctcatcttaaacagtacgagcgttctatcgtggactataaaccaaatcttgacctgctggaacaacaacaccaactcatacaagaggctctgatcttcgacaataagcacactaattacacgatggagcacattagagtggggtgggagcagctgcttaccactatcgctcggaccatcaatgaggtggaaaaccaaatactgacgagggacgcaaagggcatctcccaggagcagatgcaggaattccgcgccagcttcaaccatttcgacaaagaccatggcggagctctgggtccggaggaattcaaggcgtgccttatcagcctgggatatgacgtagagaacgaccgccaaggtgaggctgagtttaatagaataatgagtctcgtcgaccctaaccatagcggattagtcacctttcaggcctttattgattttatgagcagggagacaactgacacggataccgccgatcaggtgatcgcatccttcaaggtgctggcgggtgataagaattttatcacagctgaggaacttcggcgcgagctgcctcccgaccaggctgaatattgcatcgcaaggatggctccatatcaagggcccgatgctgtaccaggcgcccttgactacaagtcgtttagcactgctctttacggcgagtctgacctgtag

SEQ ID NO: 13736 - DNA, 1689 bp, synthetic construct
  misc_feature 1..1689: note = Description of Artificial Sequence: Synthetic coding sequence
  source 1..1689: mol_type = other DNA
atggtggattatcatgccgctaaccagagttaccagtacggaccgagctcagcagggaacggtgccggcggcggaggaagtatgggcgattatatggcccaggaggatgattgggaccgggacttattgttagatcccgcctgggagaagcagcagaggaagacttttacagcctggtgtaacagtcacttgcggaaggccggaacacagatcgaaaatattgatgaggattttcgcgatggcctgaagctgatgctattgcttgaagtgataagcggcgagcgactgccaaaacccgagaggggcaagatgagggttcataaaatcaataatgtgaacaaagccctggacttcatcgcaagcaaaggtgttaaactggtgagcatcggggctgaggaaatagtcgacggaaatgccaagatgacacttggtatgatctggacaattatccttcggtttgcgatacaggatatttcagtcgaggaaacaagcgccaaagaggggctgcttttatggtgccagagaaagaccgcaccctacaaaaatgtgaacgtgcagaatttccacatctcttggaaggacggcttagctttcaacgccctgatacaccggcacaggcccgagctgatcgagtatgataagcttaggaaagacgaccctgtcaccaacttgaataacgccttcgaagtagcagagaagtacctggatattccaaaaatgctggatgcggaggatattgttaacaccgcccgccccgatgagaaagctataatgacatacgtgtcctccttctatcatgcattctctggagcacagaaagcagagactgcagcaaatcgtatttgcaaggttttggccgtgaatcaggagaacgaacatctcatggaagattacgaaaaactggccagcgacctgttggaatggatccggcgtaccattccctggctcgaagatcgggtgcctcaaaagactatccaggagatgcagcagaagttagaagatttccgggactatcgcagggttcacaaaccgccgaaggtgcaggaaaaatgccagcttgagattaactttaatacgctccagacgaaattgaggctgagtaaccgccccgcgttcatgccatccgaagggaagatggtgtcagacataaacaatggttggcagcacctcgaacaagctgagaagggctacgaggagtggctcctaaacgagatccgacggttggaaagactcgatcatctcgctgagaaattccgccagaaagccagcatacatgaggcatggacggatgggaaggaagcaatgcttaagcacagagattacgagacggcgacgttaagcgacatcaaagcactgattaggaaacacgaagctttcgagtccgacctcgccgcacaccaggatcgagtggagcagattgctgcaattgcacaggagctcaatgagctcgattactacgactcgcataatgtgaatacgccagatggtttgcaggaaggcccagggcagccccatagtcccatcccgcccctctgtatttatgccaagcacagtctgcagtctagcggggtgggagggtgggccggtagggggtggggacgattgtccccactgtcactttgtgggcttgctaggcgctttccgcgccccggatggggagatctgggcccggctcttctagtatggtag

SEQ ID NO: 13737 - DNA, 1518 bp, synthetic construct
  misc_feature 1..1518: note = Description of Artificial Sequence: Synthetic coding sequence
  source 1..1518: mol_type = other DNA
atgaagtttaagctgcatgttaattccgccagacagtataaggatctctggaacatgtcagatgataagccattcctctgcaccgcgcccgggtgtggtcaaaggttcacaaatgaagatcatcttgcggtgcacaaacataagcacgaaatgactctgaaattcggacctgcgcgaaacgattcagtgatcgttgcggaccaaacacccacacctactcgattcctaaagaactgtgaggaagtgggactttttaacgagttggcctctccttttgagaatgagtttaagaaagcatcagaagacgatatcaagaaaatgcccctggacttgagcccacttgcaactcccataattcgcagcaagatcgaggagccgtctgtagtagaaacaacacatcaagattctcccctccctcacccagaatctacaacatctgatgaaaaggaagtgcccctggcccaaacagcccagcccacgtctgccatagtgcgaccggcatccttgcaggtgcctaacgtgctgctgaccagctctgactcctcagtgatcattcagcaggcagttccaagcccgacaagcagcacagttattacacaggcaccctcctccaaccgtcccatcgtacccgtccccggcccgttccctctgctcctgcatctgccgaacggtcaaactatgcccgttgctattccagcctctattaccagctctaatgtgcacgttcctgctgctgtgccgctggtgcgccccgtgacgatggtgccttcagtccccggaattcctgggccaagctcaccacagcccgtgcaaagcgaggccaagatgcgcctgaaagcagctttgacgcagcagcatccccccgtcaccaatggcgacacagtgaagggtcacggaagcggtcttgtcagaacccagtccgaggaaagcaggccgcagagcctgcagcagccagccacctctactactgaaacacccgcctcgcctgctcataccaccccacagacgcagagtacgtccggccgcagacgcagggccgctaacgaagatcctgatgaaaagcggcgcaagttccttgagagaaacagagctgctgcctctcgttgcagacagaaaaggaaggtctgggtgcagtccctggaaaagaaagccgaagacctctctagtctgaatggtcagctgcaatccgaagtgacgcttctgcgcaatgaagtggcccagctcaaacagttgcttttggcacataaggattgtccggttaccgctatgcagaagaaatcggggtaccacacagccgataaggacgattcttcagaggatatttccgtcccttccagtcctcataccgaagccattcaacacagctcggtcagcaccagtaacggagtgtccagcacaagcaaggcggaagctgtggctacctctgtcttaactcagatggctgaccagagcaccgagcctgccttgtctcaaattgttatggcacccagctcccagagccagccttccggctcttag

SEQ ID NO: 13738 - DNA, 1344 bp, synthetic construct
  misc_feature 1..1344: note = Description of Artificial Sequence: Synthetic coding sequence
  source 1..1344: mol_type = other DNA
atgtactgcgcctggatgtggccagatcagacacccacacccacacggtttttaaaaaactgcgaagaggtggggctgttcaatgagctcgcctccccatttgagaatgagttcaaaaaggcttcggaagacgacattaagaaaatgcccctggatttaagccccttggccaccccgatcatccgcagcaaaatcgaggagccttcagtggtggagaccacccaccaggatagccccctgccacatccggagtcaacgacctcggatgaaaaggaagtccctttagctcagaccgctcagccaacaagcgcaattgtgagaccagccagcctgcaggtaccaaatgtgctgctaacgtctagtgactcttcagtaatcattcagcaggctgtgccttctcctacttctagtacagtgattacgcaagcaccttcatccaatcgccctatagtccctgtgccaggtccgttcccacttctgcttcacttgccaaacggtcagacaatgcccgtcgccatccctgcttctatcaccagctccaacgtccatgtgcccgctgctgtccctcttgtccgacctgtgactatggtgccttcagtcccagggatccctggtcccagtagcccccaacctgtgcaaagcgaggctaagatgcggcttaaagccgccctcacacagcaacatccaccggtaacaaacggggacactgtcaaaggccatgggagcggactcgttaggactcagtccgaggagtctcgacctcaatcactgcagcagcccgccacatccacaaccgagacgccagcctctccagcacataccaccccacaaacccagtctacctcaggtcgccggcggagggccgccaacgaagatccagatgagaaacgccggaagttcttggaacggaatagggcagccgcttctagatgtagacagaaacgaaaagtgtgggtgcaatcacttgagaaaaaagcagaggacctgtcgtccctcaatgggcagctgcagtccgaggtcacgcttctccgtaatgaagtggctcagcttaaacaattattgctggctcataaggattgtcccgtgaccgcaatgcagaagaaaagtggctatcatacagccgacaaagacgatagctccgaggatatttcagtgcctagctctccccacacggaagccatacagcactcatctgtatctacgtccaatggcgtttccagtaccagtaaggccgaggccgtcgctacctccgtgttaacccagatggcagaccagtctaccgagcccgccctatctcagatcgtgatggcccccagttcccaaagccagccgtccggttcctag

SEQ ID NO: 13739 - DNA, 381 bp, synthetic construct
  misc_feature 1..381: note = Description of Artificial Sequence: Synthetic coding sequence
  source 1..381: mol_type = other DNA
atgtccgacgataaaccatttttgtgcacggcaccaggatgtggccagtcagaggtcacactgctgcgcaatgaggtcgctcagctcaagcagctgctattagcccataaagattgccccgttaccgccatgcagaagaaaagcggttatcacaccgccgataaggacgactccagcgaagatatttccgtaccctcgtcaccacacaccgaggccatccaacactcttcggtgagtacctccaacggggtgagtagcaccagtaaggccgaggcagtggctacctctgtgctgacccagatggccgaccagtcgaccgagcccgctctgtcccaaattgtcatggcccctagttcacagtctcagccatctgggtcttag

SEQ ID NO: 13740 - DNA, 1518 bp, synthetic construct
  misc_feature 1..1518: note = Description of Artificial Sequence: Synthetic coding sequence
  source 1..1518: mol_type = other DNA
atgaagttcaagctgcatgttaactctgcaaggcaatacaaagacctctggaatatgagcgatgacaagccttttctttgtacggcgccaggctgcggacagcggtttacaaacgaggaccatcttgccgttcacaaacacaagcacgagatgacccttaagttcggaccagctcgcaatgacagcgtgatcgtcgcagaccagacacctacccctacaaggttcctgaaaaactgcgaagaggttgggctctttaacgagctcgccagtccattcgagaatgagtttaaaaaagcttcagaggacgatatcaagaagatgccgcttgatctgtcccctctcgccaccccaattatacgaagcaagattgaggagccatctgttgtggaaacgactcaccaggactccccattaccccaccccgagagcaccacctctgatgaaaaggaagttcccctagcccagaccgcgcagcccacctctgccattgtgagaccagcaagtcttcaggtgcccaatgtcctgttgacaagtagtgacagttccgtgattatccaacaggcagtgccttcccccacaagttccacagtgatcacccaggccccctcctccaaccgcccgattgtgcccgtgcctggacccttcccactactcctgcatctgcctaatggccaaactatgccagtcgccatccccgcctctatcacatcctcaaatgtccacgtccctgctgccgtgcctttggtaagaccggtgaccatggtgccatcggttcctggcattccgggaccaagcagtccccagccggttcagtccgaggctaaaatgcgcctgaaagcagcattgacacagcagcaccctcctgttaccaacggagatacggtcaaaggccacggttccggacttgtgcggacacagtctgaggaaagtcggccccagtcacttcagcaacccgccacttcaactactgagactccagcatcacctgcccatactaccccccaaacccagtctactagcgggaggaggcggcgcgccgccaatgaggacccggatgagaaaagaaggaagtttctggagcgcaaccgtgcagcagcgtcccgatgtcggcagaagcggaaagtctgggttcaatccctggaaaagaaagcagaggacctgtcttcattaaacggacagctgcagagcgaggtgacgttactgaggaatgaggttgctcagctcaagcagctgctgttagcgcacaaggactgtcccgtgacagcaatgcagaaaaagtccggataccacacggccgataaggatgatagttctgaagatatctcggtcccaagcagccctcacactgaagccatccaacacagtagcgtgtccacgtcaaacggagtgagcagcacttccaaagccgaggctgttgcaactagcgtcctgacgcagatggctgaccagtccaccgaaccagcgctgagtcagattgttatggccccatcctcccagtcgcagccttcagggagttag

SEQ ID NO: 13741 - DNA, 1344 bp, synthetic construct
  misc_feature 1..1344: note = Description of Artificial Sequence: Synthetic coding sequence
  source 1..1344: mol_type = other DNA
atgtactgcgcatggatgtggcctgaccaaacaccgacgcccacgaggtttctgaagaattgcgaagaagtgggcctgtttaacgaattagcaagccctttcgaaaacgagtttaagaaagcttcggaagacgatatcaagaagatgcccttggaccttagtccacttgctacaccgatcataagaagcaagatagaggaaccatccgtcgtagaaaccacgcatcaggactcacccctacctcatcctgaaagtactacatccgacgagaaggaagtgcctctcgcacagaccgcccagccaacctccgctatcgtgagacccgcctcactgcaggtacctaacgtgctcctcactagttctgactcctctgtgataattcaacaggcagtgccgagccctacgtcctccacagtcatcactcaggcgccgagctctaacagaccgatcgtccctgtgcctggaccattccctctgctgctgcatctaccaaatggccagacaatgcccgtggctattcctgcttccattactagctccaacgtgcacgttcctgcagcagtgcctcttgtgaggcctgtaacaatggtcccctctgtgccggggattcctgggcctagcagtccgcagccagtacaatccgaagccaaaatgcggttaaaagctgcgctcacccagcagcaccccccggtgaccaacggcgatacagtcaagggacacggcagcggcctggtccgcactcaatcggaggaaagtcgcccccaaagcctacaacagccggcaacttcaaccacagaaactccagcatcccctgcccacaccacccctcaaacgcagagcaccagtgggcgacgcaggcgcgccgccaatgaagatccagatgagaaacgcagaaagtttctggagagaaaccgagcggctgctagtcggtgtaggcagaaacgcaaggtgtgggtgcagtcactggaaaagaaggccgaggatcttagctccctgaacggccagctgcagagtgaagttacgctgcttaggaacgaggtggctcagctaaagcagttgctgctcgcacataaggattgccccgtgaccgcaatgcagaagaaaagcggctaccataccgcggataaggatgatagcagcgaagacatatcagtgccctcttctcctcataccgaggccatccagcattcatccgtgagcacctcaaatggagtgagttcgacttctaaagcagaggctgtggccacatcagttctaacacagatggccgaccagagtacagaacccgctctgtcccaaattgtgatggcccctagcagccaatctcaacccagtggaagctag

SEQ ID NO: 13742 - DNA, 630 bp, synthetic construct
  misc_feature 1..630: note = Description of Artificial Sequence: Synthetic coding sequence
  source 1..630: mol_type = other DNA
atgaaatttaaactccatgtaaatagcgcccggcagtataaagacctctggaacatgtcagatgataaacccttcctctgtacggcccctggatgcggtcagcggtttaccaatgaggaccacctggcagttcacaaacacaaacatgagatgaccctgaagtttgggccagctagaaatgactcagtgatagtcgctgatcagacccccacccctactaggttcctgaagaactgcgaagaggtaggactgtttaatgaactggcttcaccattcgagaacgaattcaaaaaagcttctgaggacgacatcaagaagatgcctctcgacttgagtcccctcgccaccccgatcatccgttccaaaatcgaggaacccagcgtggtcgaaacaacccaccaggatagccccctccctcatccggagtctacaacgtcagatgagaaggaagtgcctctagctcagactgctcaacctacgtccgccatagttcggcccgcttccctgcaggtccccaatgtgctgctcacctctagcgacagcagtgtcattatccaacaggctgtaccctcacccacgtcatctacggtgattactcaagccccttcatccaacagacccatcgtctag

SEQ ID NO: 13743 - DNA, 1188 bp, synthetic construct
  misc_feature 1..1188: note = Description of Artificial Sequence: Synthetic coding sequence
  source 1..1188: mol_type = other DNA
atgaagttcaagttacacgtgaattcagcacggcagtacaaggacctgtggaacatgtctgacgacaagccatttctctgtactgccccaggctgcggccagaggttcaccaacgaggaccatttagctgtccataagcacaagcacgaaatgactctgaaatttggcccggctagaaacgattctgtgatcgtggccgaccagactcccacacccaccaggtttctgaaaaattgcgaagaagtcgggctgttcaacgaattggcatcaccttttgagaacgagttcaagaaggccagtgaggatgacatcaagaagatgccactcgacttgagtccactcgccactcctatcattcgcagtaaaatcgaagaacctagtgtggtcgaaaccacccatcaggacagccccctgccccaccccgaaagcactacctccgatgaaaaagaggtgcctcttgcacaaacggcccagcctacctctgcaatagtgcggcctgccagtctgcaggtgcctaacgttctacttacatccagcgactctagtgtcattattcagcaggcagtgccgagccctacgagttccaccgtgattacacaggcaccctcctctaacagaccaattgtcccagtaccagggccatttccgctcctgctccatcttcccaacggacaaactatgcctgtggccattccagcgagcatcacctccagtaacgtccacgtcccggcggccgtacctctcgtccgacccgttacaatggtcccctccgtccccggcattccaggcccttcgagccctcagccagtccagagcgaagccaagatgcggcttaaggcagcattgactcaacagcatccccctgtcactaatggggacaccgttaaagggcatgggagcggcctggtaagaacccaatccgaggaaagtcggccccagtcactgcagcaacccgccacatcaacaaccgagacgccagcgagtcctgcccatacaaccccgcagacacagagcacgagtggccgtcgccgcagagctgcaaatgaagatccagacgagaagcgaaggaaattcttagaaagaaatagggctgccgccagccgatgtaggcagaagcggaaagtgtgggttcaatccctcgaaaaaaaagctgaggatttgagctctttaaacggacaattgcagtag

SEQ ID NO: 13744 - DNA, 714 bp, synthetic construct
  misc_feature 1..714: note = Description of Artificial Sequence: Synthetic coding sequence
  source 1..714: mol_type = other DNA
atgaagtttaagttacatgtcaactcagcgcggcaatataaagatttgtggaatatgtcggatgataagccattcctgtgcacagcccccggctgtgggcagaggtttaccaacgaagaccatctcgctgttcacaaacataagcacgagatgacactcaaatttggaccagcacgtaacgactcagtgatcgttgctgatcagactcccactccaacgagatttctcaaaaattgcgaagaagtggggctcttcaacgaactggcctcacccttcgaaaacgaatttaaaaaggcttcagaggatgacattaagaaaatgccactggacttgtcacctcttgctacacctatcatcaggagtaaaatcgaagagccctccgtcgtggaaactacacaccaggactcaccccttccgcatcctgagagtaccaccagtgacgaaaaggaggtgcccctggctcagaccgcacagcctacgtccgccattgtgcgccctgcaagcctccaggtccccaatgtactcttaacaagctctgactcttctgtaattattcaacaggccgttcccagccccacaagctcgacggtgatcacacaggcaccatcttccaatcggccgatcgtctccttcgatcagagcccatggtgcctggtttttcaggagagtcaggtgctccccttgccgaatcaatattcccagaaacagaagtag

SEQ ID NO: 13745 - DNA, 1464 bp, synthetic construct
  misc_feature 1..1464: note = Description of Artificial Sequence: Synthetic coding sequence
  source 1..1464: mol_type = other DNA
atgagcgacgataagccttttttgtgcacagcgccaggttgcggccaaagatttacaaatgaagatcatctggccgtacataagcacaagcatgagatgacgttaaagttcggtccagctcggaacgattctgttattgtggccgatcagacccccacacccacacggtttttaaaaaactgcgaagaagtcggcttattcaacgaattagccagtcccttcgagaatgaattcaaaaaggcgtctgaagatgacatcaagaaaatgccactcgacctgagcccactggcgacaccaataatcagaagtaagatagaagagcctagtgtggtggagacaactcaccaggacagtcccctgccccaccctgagtcaacaactagtgatgagaaggaggtgcctctggcccagacggcccagccaaccagcgcaattgtccgccccgcctctctacaagtacctaacgtgcttcttacctcctccgactcctccgtgatcattcaacaggccgtcccgagccctacctctagtaccgtgataacacaggcacctagctcgaacaggcccatcgtcccagtgcccggtcccttccccctgctcttgcaccttcccaatgggcagacgatgccggtggctatacctgcatctatcacgtcttcaaacgtacacgtgcccgccgcagttcccctggtgaggcccgttacaatggttcccagcgtacccggaattcctggcccatcctctccccaacccgtgcagagtgaggcaaaaatgcggctcaaagccgccttaacgcaacagcatcctccagttaccaacggagatacggtgaagggtcatggtagcggcttagtgcgtacacagagcgaggaatcaagaccgcagagtctgcagcagcccgccacttctacgactgaaacccctgccagtcccgcacacactactccccagacgcagagcacgtccgggcgtcgccggcgggcagccaacgaggatccggacgagaagcgcaggaaattcctcgaacgaaatagggcggctgccagcagatgtcgccaaaaacgcaaagtgtgggtgcagagcctggagaaaaaagctgaagaccttagctctctaaatggacaacttcagagcgaagttaccctgctgcgcaatgaggtcgcccagctcaagcaactgctattggcccacaaagattgtccagtcactgctatgcagaagaagtccggctaccataccgcagacaaagatgattcttcagaggatatcagcgtcccatcctcacctcacactgaggcaatccagcactcctcagtcagtacttcaaacggcgtgtcttctacgtcgaaagctgaggccgtcgccacctcagtgcttacgcagatggcagaccagagtacagaaccagccctgagccagatcgtcatggctccttcaagccagtcacagccctcgggtagctag

SEQ ID NO: 13746 - DNA, 1188 bp, synthetic construct
  misc_feature 1..1188: note = Description of Artificial Sequence: Synthetic coding sequence
  source 1..1188: mol_type = other DNA
atgaagtttaagctgcatgtgaacagcgcaaggcagtataaggacctctggaatatgtcagatgacaaacccttcttgtgcaccgcccccggctgcggacagagatttacaaacgaagatcatctcgccgttcacaaacataagcatgaaatgaccctgaagtttgggcctgcaagaaacgatagtgttatcgttgcagaccagactccaacaccaactagatttcttaagaactgtgaggaagttggcctgtttaatgagctggcctcgcctttcgagaatgaattcaagaaggccagcgaagacgatatcaagaagatgcctctggatctttcaccgcttgcaacccctattatccggagcaaaatcgaggagccaagcgttgtagaaactactcatcaagatagcccgctgccgcacccagagtccactaccagtgatgagaaagaggtgcccctcgctcagacggctcaacccacctctgccatagtacgaccagcaagcctgcaggtgcccaacgttttactcaccagctctgattcctccgttattatccaacaggccgtgccatcacccacctcaagtaccgtgatcacccaggcgcccagcagcaaccgccctatcgtgccggtgccgggaccattccccctcctgctccacttgcccaacgggcagacaatgcccgttgccatcccagcctctattacaagcagcaacgtgcacgtcccagccgcagtaccgctcgtcaggccggtgacaatggtgccctcagtcccaggcatccccggcccatcatctccacaaccggtccaaagcgaagccaaaatgcgactgaaggccgcactcacacagcagcatccgccagtgaccaatggtgacactgtgaaagggcatggcagcggcctagttaggactcagagtgaggagtcgcgcccacagtccctccagcagcccgccactagcacgaccgaaactcccgcctcccccgcgcatactactccccagacacagagtaccagcggcagacggcgtcgggcagccaacgaagaccctgatgaaaaaagaagaaagttcctcgagcgtaatcgggctgcagcctctcgctgcaggcaaaagaggaaggtttgggtgcaatcgctggagaaaaaagctgaagacctgtctagcctgaacgggcagctgcagtag

SEQ ID NO: 13747 - DNA, 1188 bp, synthetic construct
  misc_feature 1..1188: note = Description of Artificial Sequence: Synthetic coding sequence
  source 1..1188: mol_type = other DNA
atgaaattcaagctgcacgtaaatagtgcacggcagtacaaagacctatggaatatgtcggacgataagcccttcctgtgtacagcccctgggtgtggacagagatttactaacgaggatcacctggcagtccacaaacataagcacgagatgacactcaagtttggaccagctagaaacgattccgtgatagtggccgatcagacccccactcccacccggttcctgaaaaattgcgaggaagttggcctgttcaacgagctcgcttctcccttcgagaatgaattcaagaaggcaagcgaagacgatatcaagaaaatgccccttgacctgtcaccactagcaacaccaataatccgctcgaagattgaagaaccatcagtggtggagaccacccatcaggactccccgcttcctcaccctgagagtaccacgtctgacgagaaagaggtcccgctagcccaaaccgcgcagccaacgtcagctatcgtgaggcctgcttcacttcaggtgccaaatgtgttactgacctcaagtgactctagcgtcataatccagcaggcagtgccatcacctacttcttcaacagttataacacaggccccctcctcgaacagaccaatagtgccagttccgggtccttttcctctgctactgcatttgccaaatgggcagaccatgcctgtggccattcccgcctccattacttcttcgaatgtgcatgtgccggctgccgtgccattggtcaggcccgtgacaatggtcccatcagtaccaggaatcccagggccgagctcaccccagcccgtacagtcagaggcgaaaatgcgactcaaggcagctctgactcaacaacatcccccagtgacaaatggtgacacagttaaagggcacggttctgggctcgtgagaactcagtctgaagagagtcgccctcagagtttgcagcaacctgccacatctaccaccgaaacaccagcatcgcccgcccataccacgcctcagacacagagcaccagcggcagaagacgcagagctgccaacgaggacccagacgagaagagacgaaagttcctcgaacgcaacagggcagccgccagcaggtgtcgacagaaaaggaaggtctgggtccaatccctcgagaagaaggctgaggacctctcttccctgaacggacagctgcagtag

SEQ ID NO: 13748 - DNA, 660 bp, synthetic construct
  misc_feature 1..660: note = Description of Artificial Sequence: Synthetic coding sequence
  source 1..660: mol_type = other DNA
atgagtgatgataagccatttctgtgtactgcaccaggttgtggacagagattcacaaatgaagaccacctcgctgtacacaagcataagcatgagatgacactcaaattcgggcctgctaggaatgattctgtaatagtggcagaccagacacctacccctaccagatttttaaagaattgtgaggaggtcggattatttaatgagctggcttcaccctttgaaaacgagtttaagaaagcaagcgaggacgacattaaaaaaatgcccttagatctgtctcccttggccacacccatcattagatccaagattgaagagcctagcgtggtggagaccacacatcaggattccccattgcctcaccctgaatccaccacttccgacgagaaggaggtcccgttagctcaaacagcgcagcccacaagcgcaatcgtgcggcccgcttccctgcaggtaccgaacgttctgctaacaagctcggattctagcgttatcattcagcaagctgtcccctcccctacttcttctaccgtgattactcaggctcccagctcaaacaggcccattgtctcgttcgatcagtccccttggtgtctggtctttcaggagagccaggtgcttccgctcccgaaccaatactctcagaaacagaagtag

SEQ ID NO: 13749 - DNA, 1134 bp, synthetic construct
  misc_feature 1..1134: note = Description of Artificial Sequence: Synthetic coding sequence
  source 1..1134: mol_type = other DNA
atgtccgacgataaacccttcctctgtaccgcccccggctgtgggcagcggtttaccaatgaggatcacttggcagtccacaaacacaagcacgaaatgaccctgaagttcggtcctgctagaaacgatagtgttatcgtagcggaccagacaccaacccctaccagatttctcaaaaactgtgaagaggtgggcctgtttaatgagcttgcatcccccttcgaaaatgagtttaaaaaggcttccgaagacgacatcaagaagatgcccctggacctcagccctttggctacacccattatccgttcaaagatagaggaaccgtcagtggtggagacaactcatcaggatagccctcttccgcacccagagtccacaacgagtgatgagaaagaggtgccactcgcccaaacagctcaacctacaagtgccatcgtcaggcccgccagcttacaagtcccaaacgttctacttaccagctcagactccagcgtgatcattcagcaggctgtgccgtcccccacatcttcaacagtgataacgcaagccccgagctctaatcgacccatagtgcctgtgccaggtcccttcccattgctgctgcacctgccaaacggccaaactatgcctgttgccattcctgccagcattacatcgtcaaatgtgcatgtgccagccgctgtgccactagttcgccccgttaccatggtcccatcagtgcccggaataccagggcccagttccccgcagcctgtgcagagtgaggccaaaatgcggttaaaggctgcccttacccagcagcacccccccgtgactaatggggatactgttaagggtcacggttccggtctggtgaggacccaatcggaagagtcacggccgcagtcactgcaacagcccgccacatctaccactgagactccagcttcacctgcccacaccactcctcagacccagtcgactagcggccggcgtcggcgggcagccaatgaagaccccgatgaaaaacgtaggaagtttctggaaaggaatcgggctgctgcaagtaggtgtcgccagaaacgaaaagtctgggtgcagtctctggaaaagaaagccgaagacctgtccagtcttaacggacaacttcagtag

SEQ ID NO: 13750 - DNA, 1449 bp, synthetic construct
  misc_feature 1..1449: note = Description of Artificial Sequence: Synthetic coding sequence
  source 1..1449: mol_type = other DNA
atgaaattcaaattacacgtgaactccgctcgccagtacaaggacctgtggaatatgagtgatgacaaaccatttttatgtaccgcccccggctgcggccagaggttcacaaacgaggaccatctggccgatcagactccaaccccgactaggtttttgaagaattgcgaggaggtcgggctctttaatgagctcgcctctccgttcgagaatgaattcaagaaagcctctgaggatgacatcaaaaagatgccactggatctgtctcctctggcaacccctatcatacgttcaaagattgaggaacctagcgtcgtggaaacaacgcatcaggactcgcccctgccacaccccgagtcaactacttctgatgagaaagaagtaccactagcccagacggcgcaacctacttcagccatagtgcgtccagctagcctgcaggttccaaatgtcctcctcacaagttctgacagctctgtgatcatccagcaggccgtgccttcgcctaccagttcaacagttatcacacaggcccccagcagtaaccggcctatagtgcctgtgccaggacccttcccactccttctgcatctaccgaatggccagaccatgcctgtagccattcctgcatcaattacgagttcaaacgtccatgtgccagcagccgtccccctcgtaagacctgtgaccatggtgccttcggtgcccggaatcccgggtccttcaagcccacaaccagtgcagtccgaagccaagatgagactgaaggcagcccttacccagcaacacccacccgtaacaaacggcgatacagtgaaaggccacggcagcggcttagtgcgtacccagtcagaggagagccggccacagtccctccagcagcccgcgacatccacgacagagactcccgcaagcccagctcacacaacaccccagacacagtccacctctgggaggcggcgacgggccgcaaacgaagacccagatgaaaaacgaagaaaattcctggaaagaaaccgggcagccgcctcacgctgccggcagaaacggaaggtatgggtacaatcactcgagaagaaggcggaggacttgtcctccttaaatggacagctgcaatccgaggtcaccctgcttcgaaacgaggttgcccagttaaaacagcttctgttggcacataaggattgccctgttactgccatgcagaagaagagtggataccataccgctgataaagacgacagcagcgaagacatctccgtcccatcgagtcctcacacagaggcaattcagcatagctccgtaagtaccagcaatggggtgagcagcacctctaaggccgaagcagtggcaacaagtgtattgactcaaatggccgaccagtctaccgaacccgcactgtcacagattgttatggcccctagctctcagtcccagccgtcaggttcgtag

SEQ ID NO: 13751 - DNA, 2136 bp, synthetic construct
  misc_feature 1..2136: note = Description of Artificial Sequence: Synthetic coding sequence
  source 1..2136: mol_type = other DNA
atgaaactgaaactgaacgtgcttaccatcatattgctgccagtgcatctactgatcaccatttacagtgctctcatctttataccctggtattttcttaccaatgccaaaaaaaaaaacgctatggccaagcgaatcaaggcaaagccaacctccgacaaaccaggatccccctatagatccgttactcacttcgatagcctggctgtgatcgacattccaggggcggatacactggacaagttgtttgatcacgccgtgtccaaattcggcaagaaagattccctggggacccgtgaaatcctcagtgaggaaaatgaaatgcagcctaacggcaaagtgtttaaaaaactcatcctgggaaactataagtggatgaattatctggaggttaacagaagagtgaacaatttcggttccggattaacagccctgggtctcaaaccaaagaacactatcgctatcttttgcgaaacgcgtgccgaatggatgatcgctgcccagacctgctttaagtataattttccactggtgactctgtacgccaccctggggaaagaggcggtcgtccatggactgaatgaatccgaagcgtcctatcttataactagtgtggaactgttggaaagtaaattaaagaccgccctcctagatatcagttgtgtgaaacatattatctatgtggataataaagctatcaacaaggcagagtacccagagggcttcgagatccattctatgcagtctgtggaagagctggggtcaaaccccgagaatctcgggattccaccctcaagaccaaccccatcagatatggcgatagttatgtacacatcaggaagcactggtcgtcccaaaggcgtgatgatgcaccatagcaacctgatcgccggcatgaccggtcaatgcgagagaatacccggactgggtccgaaagatacatatatcgggtacctgcccctggcccatgttctggaattgactgccgaaataagctgtttcacctatggatgtcgcattgggtattcttccccgctgaccctcagtgaccagtctagtaagatcaagaaagggagtaagggggactgcactgtattaaaacccaccctgatggccgctgttcctgaaatcatggatcgaatatataaaaacgtaatgagcaaggtacaagagatgaactatattcagaagacgttatttaagattggttatgattacaagctggagcagataaagaaagggtacgatgcacctctctgcaatctgctactcttcaagaaagttaaagcactgctggggggcaatgtgaggatgatgctgagtgggggagctcccctgagcccacagacacaccggttcatgaacgtgtgcttctgttgtccgataggacaagggtacgggctcacggagtcctgtggcgcaggaacagtaaccgaggtgaccgactacaccaccggccgtgtcggggcaccacttatttgctgcgagatcaaactaaaggactggcaagagggcggctatactattaatgacaagcctaatccgagaggtgaaattgtgattggaggccagaacatctccatgggttacttcaagaacgaggaaaagacggccgaagactacagtgtggatgaaaacggtcagaggtggttctgcactggcgatatcggcgagtttcacccggatggctgcctgcagatcatagataggaagaaagacctggttaagctgcaagcgggagagtatgtcagcctgggtaaggtggaggccgctctcaagaattgcccactgatcgacaatatctgtgcatttgccaaatccgatcagtcgtacgtcatctcattcgtggtgcccaaccagaagcgccttactctgttggcccagcaaaagggggtggaaggcacctgggtggacatatgcaacaatcccgcgatggaagccgaaattctcaaagaaattagagaagcagctaacgccatgaagcttgagcggtttgagattccgattaaggtacgactttcccctgaaccttggactcctgagacagggttagttacggacgcgtttaagcttaagaggaaagaattgagaaaccactacctcaaagacatcgaaaggatgtacgggggtaagtag

SEQ ID NO: 13752 - DNA, 2013 bp, synthetic construct
  misc_feature 1..2013: note = Description of Artificial Sequence: Synthetic coding sequence
  source 1..2013: mol_type = other DNA
atggcaaagcgtataaaagccaaaccgacaagcgataagcccggcagtccgtatagatcagtgacacatttcgactcccttgccgtgattgatattcccggagctgatactctggacaaactgttcgatcatgccgtgtctaaatttggcaagaaggactcactgggcaccagggaaatactctcagaagagaatgagatgcagccgaatggaaaggtgtttaagaagctaatcttggggaactacaagtggatgaattacctagaggtcaatagaagagttaataatttcggctcaggcctgaccgcactaggactcaagcctaaaaatacaattgccatattttgcgaaactcgcgctgagtggatgattgcagcacaaacctgcttcaagtacaattttcccctggttaccctttacgctacccttggtaaagaagcggtggtgcatggactcaacgagtctgaggcatcttatctcattacctccgtggagcttcttgagagcaagctgaagactgcactgcttgacatatcgtgtgtgaagcatatcatctatgtggataacaaagctattaacaaggcagagtaccccgaggggttcgagattcactccatgcagagcgtcgaggaactcggatctaatccagagaacttaggcattcctcccagcagaccgaccccgagcgatatggctattgtcatgtacacctctggcagcacagggcggcctaaaggagtgatgatgcatcattccaatctcattgcaggcatgactggccagtgtgaacgcatccccggacttggcccaaaagatacgtatattggttacctgccgttggcgcacgtgttggagctaaccgcagagatcagctgcttcacctatggctgtagaatcggctactctagccctctcactctgtctgaccagtcttccaagattaaaaagggatccaaaggagactgcaccgtacttaaacctaccttaatggctgccgtgccagagatcatggatagaatttacaaaaacgttatgtctaaggtgcaggaaatgaactacatacaaaagaccctgttcaagattggttacgactataagctggagcagattaagaagggttacgatgcaccgctctgcaatctccttttatttaaaaaggttaaagctctcctgggggggaatgtccgcatgatgctttctgggggcgcacctttaagtccacaaactcacaggttcatgaacgtctgcttttgttgtcccattgggcaggggtacgggcttacagagagctgcggcgctggcactgtaacagaggtcacggactacacaaccggcagggttggggcgcctcttatttgttgtgagataaagctgaaagattggcaggaagggggttatacaatcaacgacaagccaaatcctaggggtgagattgtgattgggggtcagaatatttccatggggtactttaagaatgaagaaaaaactgccgaagattactctgtagatgagaacggccagaggtggttttgcaccggggatatcggtgaattccatcccgacggctgtcttcagatcatagatcggaaaaaggacttggttaagctgcaggctggcgagtacgtttccctcgggaaggttgaagctgcccttaagaattgccccctcatcgacaatatctgcgcctttgccaagtctgaccagagctatgttatatcatttgtcgtcccaaatcagaagagactgactctgctcgcccagcagaagggagttgaggggacgtgggttgatatctgcaataatcctgcgatggaagcagagatcctgaaagaaatcagggaagcagcgaatgctatgaagttggagaggtttgagatcccaatcaaagtgcgcctgtcacccgagccgtggacaccagaaacgggattggtgactgacgcttttaaactgaaacgaaaagagcttaggaatcattacctgaaagatatcgaacgcatgtacggaggtaaatag

SEQ ID NO: 13753 - DNA, 2136 bp, synthetic construct
  misc_feature 1..2136: note = Description of Artificial Sequence: Synthetic coding sequence
  source 1..2136: mol_type = other DNA
atgaagctgaagttaaatgtcctcacgatcattctccttccagtgcatctgttgattactatatattctgctcttatttttattccttggtatttcctgaccaatgccaagaagaagaatgcaatggcgaagcggattaaagcaaaaccgacatcagataagcctgggtcgccttatcggtccgtcacgcacttcgacagtctggcagttatcgacattcctggtgccgacaccctggataaactcttcgaccatgcagtcagcaaattcggcaagaaggacagtctgggtacacgtgaaatcctgtcggaagagaacgagatgcaacctaacgggaaggtgttcaaaaaactgattcttggtaattataaatggatgaactacctcgaggtaaaccgccgagtgaacaactttggttccggcctcacggctctcgggttaaagccgaaaaatacaattgcaattttttgcgagactagagccgagtggatgatcgcagcccagacctgcttcaagtataattttcctctggtcacgctgtatgcaacgctggggaaagaggcagtggtgcatggcttgaacgagtccgaagcttcttatttaattacatcagttgagctcttggagagcaagctgaagacagccttactggatattagctgcgtgaaacacattatttatgtcgacaataaagccatcaataaggccgaatatccagaggggttcgagatacattcgatgcagtctgtggaggaactgggctccaaccctgaaaacctcgggattcctccatccaggccaaccccctcagacatggcaatcgtcatgtatacaagcggtagtacaggcagaccaaagggcgttatgatgcaccatagtaatctgatcgcgggcatgaccggccagtgcgaacgtatccccggtctcggtccgaaggacacatacatcggctatttgcccttggcacacgtgctggaactcaccgccgagatctcttgtttcacttacggatgtcgaattggctattcctcgccattaaccctgtccgaccagagtagtaagattaaaaagggtagcaagggggactgcacggtgctcaagccaaccttgatggccgccgtcccggagataatggaccggatttataagaacgtcatgtccaaagtccaggagatgaattatatccaaaagactcttttcaaaattggctatgattacaagttggaacaaattaagaagggctacgacgcacccctctgtaacctactgctttttaagaaagtgaaggcactcctgggtggcaatgtgaggatgatgctatctggtggtgcgcctcttagccctcagacacataggtttatgaatgtgtgcttctgctgcccaataggccaggggtacggtctgacagagagctgcggagctggcaccgtgactgaagtgacagattatactacggggcgggtgggcgcgcctcttatttgctgcgagataaagcttaaggattggcaagagggcggctatacgatcaacgacaagccaaatcctcgcggcgaaatagttattgggggccagaatatctccatgggctattttaaaaatgaggagaagactgccgaggactattccgttgatgaaaacggccaaaggtggttctgcactggcgatatcggcgaattccatccggacggttgcctccagatcatcgaccgcaaaaaagatctggtcaaattgcaggctggagagtatgtgtccttgggtaaggtggaggcggccctcaaaaattgcccgctgattgacaatatctgcgcctttgccaagagcgatcagtcatacgtcatcagtttcgtggttcccaatcagaagcgtctcaccctgctggctcagcagaagggggtcgaggggacatgggtggacatctgcaacaacccagccatggaagcagagattctgaaagagattcgagaggctgcaaacgcgatgaaactggagcgttttgagattccgatcaaggtgcggctttctcctgagccatggacacccgaaactggcctagtgactgacgcttttaagctgaagcgcaaagaactccgaaatcattacctcaaggatattgagaggatgtacggtggcaagtag

SEQ ID NO: 13754 - DNA, 165 bp, synthetic construct
  misc_feature 1..165: note = Description of Artificial Sequence: Synthetic coding sequence
  source 1..165: mol_type = other DNA
atgaagctgaagctaaacgtcctgacaattatactgctgcccgtacacctgctgatcacaatatacagcgcacttattttcattccatggtattttctaactaacgctaagaaaaaaaatgccatggcgaagagaattaaggctaagccgacctccgacaaatag

SEQ ID NO: 13755 - DNA, 438 bp, synthetic construct
  misc_feature 1..438: note = Description of Artificial Sequence: Synthetic coding sequence
  source 1..438: mol_type = other DNA
atgaaactcaagctgaatgtgctcactatcatactgctgcctgtccacctgctcattacaatatacagcgccttaatcttcatcccgtggtactttctgacaaatgccaagaagaaaaacgctatggccaaacgtattaaagccaaacctacgagcgacaaaccaggcagcccctaccgcagtgttacgcattttgatagtctggcagtcatagatataccaggagccgacacgctggacaagctgttcgatcatgctgtctccaagtttggcaagaaggatagcctcggcactcgggagattctaagtgaggagaatgaaatgcagcccaacggtaaagttttcaaaaaactgatccttggaaattacaagtggatgaactatctcgaagtcaatagacgagtaaacaatttcggcagcggcctgactgctctttag

SEQ ID NO: 13756 - DNA, 381 bp, synthetic construct
  misc_feature 1..381: note = Description of Artificial Sequence: Synthetic coding sequence
  source 1..381: mol_type = other DNA
atgaagcttaaactcaacgtgttaacgattatcctgctgccagttcatctgcttattacaatctacagcgccctaatcttcattccatggtactttcttaccaatgccaaaaagaaaaatgccatggcaaaacgaatcaaagctaagcctacttctgataagcccggttccccttatcggagtgtaactcacttcgactcacttgctgttatcgacattcctggcgccgacaccttggacaagttgtttgatcacgcagtcagcaagttcggtaagaaggattcactgggaacaagggagatactgagcgaagaaaatgaaatgcaacctaatggtaaggtgttcaagaagctcattctgggcaattacaaatggatgtag

SEQ ID NO: 13757 - DNA, 465 bp, synthetic construct
  misc_feature 1..465: note = Description of Artificial Sequence: Synthetic coding sequence
  source 1..465: mol_type = other DNA
atggcgaagcggattaaggccaagccaacatcagacaagcctggctccccctaccggtccgtgacccacttcgactcgcttgccgtcatcgacatccctggtgccgatacgctcgacaaactcttcgaccatgccgtctcgaagttcggaaaaaaggattctctcgggacgagggagatcctatccgaagaaaacgagatgcagcctaacgggaaggtgttcaagaagctaattctaggaaattataaatggatgaactatctggaagtgaacaggcgcgtaaacaactttggctccggcctaactgctctgggactcaagcccaagaataccattgcgatcttctgcgagactagggctgagtggatgatagcagcccagacttgttttaaatataactttcctttggtcacactctatgctacgctgggaaaagaagcagtggtgcacgggctgaatgaatag

SEQ ID NO: 13758 - DNA, 387 bp, synthetic construct
  misc_feature 1..387: note = Description of Artificial Sequence: Synthetic coding sequence
  source 1..387: mol_type = other DNA
atgaagctgaagctgaatgttctcacaatcatattgctgccagttcatctcctgattacgatctattcagcgctcattttcatcccttggtactttcttacgaatgccaaaaaaaagaatgccatggccaagcgcattaaggctaagccgacgagcgacaaaccgggatctccttatcggtcggtgacacacttcgactccttggcagttattgatattcccggagccgacactctggataagctgttcgatcatgccgtttccaagtttggaaagaaggactccttgggcacccgagagattttgtccgaggagaatgagatgcaaccaaacggtaaagtttttaagaagttgattttgggcaactacaagtggatgaactattag

SEQ ID NO: 13759 - DNA, 2475 bp, synthetic construct
  misc_feature 1..2475: note = Description of Artificial Sequence: Synthetic coding sequence
  source 1..2475: mol_type = other DNA
atgcgccagtcactgctgtttctgaccagcgttgtgccattcgtgctggctccccgaccgcccgacgaccctggcttcggacctcatcagcggctcgagaaattggattcactgcttagcgattatgatatactgtctctctctaacatccaacagcactctgtccgcaagcgggatctgcagacgtcaacacacgtggagaccctcttgacgtttagcgcactgaagcgtcattttaagttgtatctgacttctagcaccgagcgcttttcccagaacttcaaggttgtggtcgttgatggcaaaaacgaatcagaatataccgtcaaatggcaagatttctttacagggcacgttgtaggagaaccggattctcgggtgctggcccacattcgggacgatgatgtgatcattagaatcaacaccgatggtgctgagtacaacatcgagcccctatggcgttttgtcaatgacaccaaagacaagcgcatgctggtatataaatccgaggacattaaaaatgttagccggcttcagtcccccaaagtgtgcggatacctgaaagtcgacaacgaggaactactgcctaaagggctggttgatagagagcccccagaagaattagtacatcgtgtgaagcggagggcagatcccgatcctatgaagaacacttgcaagctgctcgtagtggccgaccaccgcttctatcggtatatgggcaggggggaggagagcactacaacaaactatctgatagaactgatcgatcgagtggacgatatttaccgcaatacaagttgggacaacgccgggttcaagggatatgggatccagattgaacaaatccggatccttaagtcaccacaggaagtgaagcccggtgaaaagcattacaatatggccaagtcctatccaaatgaagagaaagatgcttgggatgtgaagatgttgcttgagcaattctcattcgatattgcagaagaggcaagcaaagtttgtttggctcatttattcacataccaggactttgacatgggtactcttgggctggcttacgtcgggtccccaagagcgaattcccacggcggtgtgtgtccgaaggcctattacagccctgttggcaagaaaaacatctacttaaattctggattaacgtcaacaaaaaactacgggaaaactatattaactaaggaagcggacttagtcacaactcatgagctggggcacaatttcggcgcagagcatgacccagatggccttgccgagtgcgcaccgaacgaggaccagggaggcaaatacgtgatgtacccaatagctgtgtcaggtgatcatgaaaataataagatgttttcaaactgtagcaagcagagcatctacaaaaccatcgagtccaaggcccaggaatgctttcaggaacggtccaacaaagtctgcgggaacagtcgcgtagacgaaggcgaagagtgtgaccctggaatcatgtacctgaacaacgatacttgctgtaattcagattgcaccttaaaggagggggtacagtgcagcgacagaaattccccatgttgtaaaaactgccaattcgaaaccgcacaaaagaagtgccaggaggccatcaacgccacttgtaagggagtatcctactgcacaggcaatagctctgagtgtcccccccccggcaatgccgaagatgataccgtctgcctcgatctcggaaaatgcaaagacggaaagtgtataccattctgcgagcgggaacagcagctggagagttgcgcatgtaatgaaacagataattcttgcaaagtgtgctgccgagacctctccggcagatgcgtgccctacgtcgacgctgagcagaaaaacctgttcctgagaaaaggcaaaccatgtactgtgggattctgtgatatgaatggaaaatgcgaaaagcgcgtgcaggatgtcatcgaacgattctgggactttatcgatcagctctcaatcaatacctttggaaagttcctcgcggataacatcgttgggtcggtactggtcttcagcctgatcttctggattccgttcagcatcttagttcactgcgtcgacaaaaaattggataaacagtacgagtcactgtccttgtttcatcctagcaacgttgaaatgctcagctcaatggattccgccagtgtgcggattatcaagccctttcccgccccgcagacccctggtcgcttacaaccagccccagtgatacctagcgcccccgccgcgcctaaattggaccaccagagaatggacacgatacaggaagatccgtctactgacagccatatggatgaagacggctttgagaaggatccttttccaaattcctccaccgccgctaagagctttgaggatctgaccgaccacccagtcactcgtagcgagaaagcggccagctttaagctacagaggcagaatcgcgtagactcaaaggagaccgagtgttag

SEQ ID NO: 13760 - DNA, 777 bp, synthetic construct
  misc_feature 1..777: note = Description of Artificial Sequence: Synthetic coding sequence
  source 1..777: mol_type = other DNA
atgcggcagtcacttctgttcttgacatccgttgtgccctttgtgttggcccctcggccaccagacgatcctggctttggaccacaccagaggctcgagaagctggattctctcctgagcgattatgatattttgagtctatctaacattcaacagcatagtgtacggaaacgggatctccaaaccagcacacatgttgagaccctgttaacattcagcgccttgaagcgccatttcaagttatatttgacttcctccacggagaggttcagtcagaacttcaaagtagtggtcgtcgacggcaaaaacgagtccgaatacacagtgaagtggcaggacttctttactgggcatgtggtcggcgagcccgattcacgagtcctggcacacatccgagatgacgacgtgataatccgcatcaacactgacggggccgagtataacattgaaccattatggcgctttgtcaacgatacaaaagacaagcggatgctcgtctataaatcagaagacatcaagaatgtgagccgactccagagtcccaaggtgtgtggctacttaaaggtggataacgaggagctgctacccaaagggctggtggatagggaaccccccgaggaacttgtgcatcgtgtgaaacggagggccgacccagatcctatgaaaaatacctgcaaattattggtggtggccgatcacagattttaccgatacatgggacgcggcgaggaatctacaacgaccaactatctcatccataccgacagggctaactag

SEQ ID NO: 13761 - DNA, 2499 bp, synthetic construct
  misc_feature 1..2499: note = Description of Artificial Sequence: Synthetic coding sequence
  source 1..2499: mol_type = other DNA
atgaagccccctggttccagcagccggcagccaccgttagcaggatgtagtctggccggtgcatcctgcggcccgcagcgagggccagcgggatccgttccagcctcagcccccgccagaacccccccgtgtagattgctcttggtcctgttactcttaccacctttagccgcaagttccagaccaagagcttggggggccgctgcccctagcgctccacactggaatgagaccgccgaaaaaaacctgggggtcttggccgacgaagacaacacactgcagcagaatagctcatccaacattagctactccaatgccatgcagaaggaaatcacactgccatcgcggctgatatactacatcaaccaagattctgaaagcccataccatgtgctggatacaaaagcacgtcaccagcagaaacataacaaggccgtgcatctcgcacaggccagcttccaaatcgaggcctttgggtccaaattcatacttgacctcatattaaacaatggcctgctgagctccgattacgtggaaatccactacgagaacggtaagcctcagtatagcaaggggggtgaacactgctattatcatggatccattcgcggagtcaaggattctaaggtggctctgtcaacgtgtaacggcttgcacggtatgtttgaggacgacactttcgtctacatgatagagcctctggaattagtgcatgacgagaagagtactgggaggccgcacattattcagaagacgctggccgggcagtatagcaaacagatgaagaacctaacgatggaacgaggagaccagtggccgttcctgagcgagttgcaatggctgaagcgacgtaagcgcgctgttaacccaagcaggggtatcttcgaggagatgaaatacttggagctgatgatcgtcaacgaccataaaacatataagaagcacaggagttcacatgctcataccaataatttcgccaaaagcgtggtgaaccttgtggactctatttacaaggagcagctgaacacacgcgtggtgcttgtagccgtcgaaacatggaccgagaaggatcagattgatatcactactaacccagttcagatgctgcatgagttcagcaagtatcgccaaagaattaagcagcacgccgatgccgtgcacttaatcagcagggtgacatttcattacaaacgaagctcacttagttactttggaggcgtctgcagtcgtacacggggggttggtgtgaatgagtatggccttccgatggccgtcgcgcaggtactgtcccagtctctggctcagaacttggggatacaatgggaaccttcttcacgaaaaccaaaatgcgactgcactgaatcctggggagggtgtattatggaggagaccggcgtgtctcattccaggaagttttcaaaatgcagtatcctcgagtacagagactttcttcaaaggggcggtggcgcatgtctcttcaacagacctacaaagttgttcgagccgacagagtgcggcaatgggtacgttgaagccggagaggagtgcgactgcggctttcacgtggagtgttatgggctctgttgcaagaagtgttctttgagcaatggagcccactgcagcgacggcccctgctgcaataatacatcttgtctcttccagccccggggttacgagtgccgcgatgctgtaaatgagtgtgacataacagagtactgcactggtgattcaggtcagtgtcccccaaaccttcataaacaggatgggtatgcttgtaaccagaaccagggtagatgctacaatggcgagtgtaagaccagggataaccagtgtcagtacatttggggcacgaaggccgcagggtccgacaagttttgctacgagaagctgaacacagagggaaccgagaagggaaactgtggtaaggatggcgacaggtggatacagtgtagcaagcacgacgtgttttgtggatttctgctgtgcacgaatcttaccagggccccccggattgggcagctgcagggagaaataattcctacctccttttatcaccaggggagggtgattgattgcagcggagcccacgtcgttctggacgacgacacagatgtcggctatgtggaggatgggacaccttgcggaccttcaatgatgtgtctggatcggaagtgccttcagatccaggccctcaacatgtcttcctgcccacttgattctaaaggaaaggtctgcagtggccatggcgtctgttctaatgaggctacatgtatctgtgactttacatgggccggaacagactgcagtatcagagacccagtgcgcaacctgcaccctcctaaggacgaggggccaaagggccctagcgctaccaacctcatcattgggtccatagcaggggcaatccttgtggccgccatagtgctgggcggaacgggctggggcttcaaaaacgtgaagaagcgacgattcgaccctacgcaacaggggccgatctag

SEQ ID NO: 13762 - DNA, 2499 bp, synthetic construct
  misc_feature 1..2499: note = Description of Artificial Sequence: Synthetic coding sequence
  source 1..2499: mol_type = other DNA
atgaagcctccagggagctcttcacggcagcctcccctggccgggtgctccctggctggagcatcttgtggaccacagcgcggtcccgctgggtctgtgccagcaagtgcccccgccaggactcccccatgccgcctgctgcttgtgctccttctattgccaccactggcggcgtctagtagaccacgggcctggggcgccgccgccccttctgctccacattggaatgaaacagccgaaaagaacctgggggtgttggcagacgaagacaacacccttcaacagaacagctcctctaatattagctactccaacgccatgcagaaggagatcaccctcccaagccgattaatctattacataaatcaggattcggaaagcccttatcacgtcctagacaccaaggctcggcaccagcagaaacataacaaggccgtgcatctggcacaggccagtttccagattgaggcattcggatctaagtttatcctggatctaatcctgaacaacgggttgctgtccagcgattatgtggagattcactatgagaacggtaagccgcagtactctaaaggtggagaacactgctactatcacggctccattcgtggggtcaaggattcaaaggtagccttgtccacctgcaatggtctgcatgggatgtttgaagacgatactttcgtgtatatgatcgagccactcgaactcgtgcacgatgagaagtcgaccggaagaccacatattatccagaagacccttgcgggacaatacagcaagcagatgaagaatttaaccatggaaaggggagaccagtggccctttctgtcagagctgcagtggctcaagagaagaaaacgtgccgtgaacccatccagaggcattttcgaagagatgaagtatttggagctcatgatcgttaatgatcacaagacatataaaaagcacagatcgtctcatgctcacaccaataacttcgcgaagtccgtggttaatttagtggactccatatacaaggagcagttaaacacacgagtcgttctggtggctgtggaaacatggactgaaaaagatcaaatcgatattaccactaatcccgtgcagatgctgcacgaattcagcaaatacaggcagaggattaagcagcacgccgacgcagtgcatctgattagtagggtgacgttccattacaaacgtagctccctgagttatttcgggggagtctgctctaggacaaggggcgttggtgtaaatgaatacggacttccaatggctgttgcccaggtactgtcacagtctttggctcagaatctcggaatccaatgggaacctagctccagaaaacctaagtgtgactgcaccgaatcctggggcgggtgcattatggaggagacaggtgtatcccacagcaggaagtttagcaagtgtagcattctggagtatcgtgactttttacagcgcggaggcggcgcttgcctgtttaatcgccccacaaaactattcgagccaactgagtgtggtaatggctacgtggaggctggcgaggagtgcgattgcgggtttcacgtcgagtgctatggcctgtgctgtaagaagtgcagcctgtcaaacggagcgcactgcagcgatgggccatgttgcaataatacatcttgcctgtttcagccacggggatatgaatgccgcgacgccgtgaatgagtgcgatattaccgagtattgtactggggattctggacagtgtcctcctaatctgcacaagcaagacgggtacgcctgcaatcagaaccaggggagatgttataacggtgaatgtaagaccagagacaatcagtgccagtacatatggggcaccaaggcagccggaagtgataaattttgttacgaaaagcttaacactgagggcacggaaaagggaaactgcgggaaggacggcgatcgctggatccagtgcagtaagcacgacgtgttctgcggcttcctgctgtgtaccaatctcacaagggctccacgaatcggccagctgcagggcgaaataattcctacctccttttaccaccaaggccgcgtcatcgattgctctggagcacacgtagtactggacgatgacaccgatgtgggctacgtagaggacggcactccttgtggaccctctatgatgtgcctggatcgcaagtgtttgcagatccaggctttaaacatgtcctcgtgccccctagacagcaagggcaaggtgtgtagcgggcatggagtctgtagcaacgaagcaacgtgtatttgcgacttcacctgggctgggacagattgctcaattagggaccccgtgagaaatctccatcctccaaaggacgagggccctaaggtgaatatggctactagccgcttgatcggagcagtggccggaacgatcttggccctgggggtgatattcggaggcacaggttggggcattgaaaatgtgaagaaacggaggttcgaccctacgcaacagggtccaatctag

SEQ ID NO: 13763 - DNA, 2499 bp, synthetic construct
  misc_feature 1..2499: note = Description of Artificial Sequence: Synthetic coding sequence
  source 1..2499: mol_type = other DNA
atgaagcccccagggtcctcctcacgccagccccctctagctgggtgttctttagccggcgcttcctgcggcccacaaaggggccccgccggcagtgtcccagcgagtgcaccggccagaacacctccctgcaggctgctcctggtcctcctcctcctgcccccgctggccgccagcagccgtccaagagcatggggggccgctgctcctagcgcgccacactggaatgaaaccgcagagaagaacctgggggtgctggcagacgaggacaataccctgcagcagaatagctcctccaacatatcatacagcaatgccatgcagaaggagatcactctccccagccggctgatttattacataaaccaggattcagaatcaccttaccatgtgctggacactaaggcaaggcaccagcaaaaacacaacaaagctgtgcacttggcccaggcgagttttcagattgaagcctttggatccaaatttatccttgatctcattctgaacaacggcctgctcagcagcgactatgtcgaaattcactatgaaaatggcaagccacagtactcaaagggcggagaacattgttattaccatggctcaatccgcggagttaaggattctaaggtggctctgtcaacgtgcaacggcctgcacggtatgtttgaagacgacacattcgtttatatgatcgagccgcttgaactagtgcatgatgagaagagtacaggacgtccccatattatacaaaagactcttgcgggacagtactcaaaacagatgaagaacctcaccatggagagaggtgaccaatggccgttcctgtcggagctgcagtggctgaagcggcgaaagcgggcagtgaacccctcccgcgggattttcgaggaaatgaaatatctggagttgatgatagtgaacgaccataaaacatataaaaaacataggtctagccacgcacacaccaataactttgcgaaatcagttgtgaacctcgtagatagcatatataaggaacaactgaacactagagtggttttggtagcagttgaaacttggaccgagaaagatcagatcgacataaccactaaccctgtgcagatgctccacgagttctccaaatataggcaaaggatcaagcagcatgccgatgctgtccatttgatctctcgggtcactttccactataaaagatcctctttatcctatttcggcggcgtgtgtagcagaacacggggcgtgggggtaaacgagtatggtttacccatggccgtggctcaggtcctgagccagagccttgcgcagaacctggggatccagtgggagccgtccagtcgcaagcccaagtgcgactgcactgagtcctggggaggatgcatcatggaggagacgggcgtttcacactcacgcaaattcagtaagtgtagcatcctggagtacagggactttttacagcgggggggaggcgcctgcctgtttaaccgcccaaccaagctgtttgaacctactgagtgcggcaatggatacgtggaggctggagaagagtgtgactgtggctttcacgtggagtgttacggcctctgctgtaagaagtgtagtctgtccaatggcgcccactgttcagacgggccctgttgcaacaacacttcttgcctgttccagcctagaggctacgagtgtagagatgcggtgaatgagtgtgacattactgagtattgcaccggggattcaggtcagtgtcctcccaatctgcataagcaagacggatacgcctgtaatcagaatcagggcaggtgttacaatggcgaatgcaagacccgtgataaccagtgtcagtacatttggggtaccaaagccgccgggtccgacaaattctgctacgagaagctgaacacagaaggtacagagaaggggaactgcggtaaggatggcgatcggtggatccagtgttcgaagcacgatgtgttttgcgggttcctactgtgcaccaacttaacccgcgctccacggataggtcagctccagggcgaaattatacccacaagcttctatcatcagggtagggtgattgactgcagcggcgcgcatgttgtgttggacgacgataccgacgtgggatacgtagaagacggaactccatgcggcccttccatgatgtgcttagatcgtaaatgcttgcagatccaagcccttaatatgtcctcatgccctctggacagcaaaggcaaagtgtgttccggacatggggtgtgttcgaacgaagcaacttgtatttgcgatttcacctgggctggcaccgactgcagtatccgagacccagtacgcaatctgcaccctccaaaggatgagggacctaaggaaatgtccaggagagagggctccatcctactgagtaaggctcccagtgagtccgccgccttagacggccaccgcctcgcactcctcgattcagggtatgatatcctagctgcagtactcctggagctgctgtccctgtag

SEQ ID NO: 13764 - DNA, 2100 bp, synthetic construct
  misc_feature 1..2100: note = Description of Artificial Sequence: Synthetic coding sequence
  source 1..2100: mol_type = other DNA
atgcaaaaggagattacccttccttcgcggttgatttactacataaaccaggactctgaatccccatatcacgttctcgacactaaggctaggcaccagcagaaacacaataaggcagtccatctcgcccaggcgagtttccagattgaggcctttgggagcaaatttattctggatctgattttaaacaacggtctgctatcatctgactacgtggaaatacactatgagaatggcaaaccacagtattctaaaggcggtgagcactgctattatcacggatcgattaggggcgtaaaggatagtaaagtggccctgtctacatgcaatggcctccatggaatgttcgaggacgataccttcgtgtatatgatcgagcccctggaattggtacatgacgagaagagcactggccggcctcacattattcaaaaaaccctggccgggcagtactccaagcagatgaagaatctcacaatggagagaggggaccagtggccttttctgagcgagctacaatggctgaaaaggagaaagagggctgtgaaccctagtcgtgggatttttgaggagatgaaatacctagagctcatgattgtgaacgaccacaagacctacaagaagcaccgctcatcccacgcccatacaaataatttcgccaaaagcgtcgtgaatctggtcgacagtatctacaaggagcagctgaacacacgtgtggtgctggtcgccgtagagacttggaccgagaaagaccagatagacattacgaccaatcccgttcagatgcttcacgagttctcaaaatataggcaacgaattaagcagcacgccgacgcggtgcatctcatttcgagagtgacctttcactataagaggagctccctcagctattttggaggagtgtgcagcaggacacgcggagtgggcgtcaatgagtatgggctgccgatggcggtggcacaggtgctctcccagagtctggcacagaatcttggcatccagtgggaaccaagttcacggaagcccaagtgcgactgtacagagtcatggggaggctgcatcatggaagaaaccggggtttcccattcccgcaaatttagcaagtgctcaattctcgaatacagggactttctccagcgaggcggaggagcctgcctgttcaacagacctactaaactgtttgaacccaccgagtgtgggaatgggtatgtagaagccggcgaggaatgtgattgcggctttcatgtggaatgttacggtctatgctgtaagaaatgcagtctgagcaacggtgctcattgctcagatgggccgtgctgtaataacacgtcttgcttgtttcagccccggggctacgaatgtcgcgatgccgtaaacgaatgcgatatcacagagtactgtacaggagattccggacagtgcccacctaatctccataagcaggacggctacgcttgcaaccaaaaccagggtcgctgctacaacggcgagtgtaagacccgggacaatcaatgccagtacatctgggggaccaaggcagctggctctgacaaattttgttacgagaaattaaacaccgagggcactgagaaagggaattgtggaaaagatggagatcgctggatccagtgtagtaagcatgatgtgttctgcggctttttgctgtgtaccaatctaacacgcgctcctcggattggtcagcttcaaggggaaatcattccaactagtttctaccatcaaggccgagtgatcgattgttccggcgctcacgtggtgctggatgacgatactgacgtggggtacgtggaagatgggactccatgtgggccatcaatgatgtgtctggaccggaagtgcctccaaatacaagctcttaacatgagtagctgtcccctggactccaaagacgaaggccctaaggcttgttttttgaaacgcaccaaatgtaagtcctaccccaagcaccggaagtgccaggaggagaaggtacgctcatacagcgcccggccccacctcaatcagttgcgctggatggacacagcgttacattgttggatattgggaatgacttattctcagcagtgctattggaattactag

SEQ ID NO: 13765 - DNA, 324 bp, synthetic construct
  misc_feature 1..324: note = Description of Artificial Sequence: Synthetic coding sequence
  source 1..324: mol_type = other DNA
taacagatccaggcccttaatatgtcatcttgccccctggattctaaaggtaaggtgtgcagcggccatggagtgtgctctaacgaagccacgtgtatctgtgacttcacatgggcgggaacagactgcagcattagagatcccgttcgcaatcttcatccaccaaaggatgaaggtcctaaggaaatgagccggcgcgaggggagcattttgctatcaaaggctccctcggagagtgcagctctggatggccaccgccttgcactactcgacagcggctacgacatcctggccgctgttctactggaacttttgtccctgtag

SEQ ID NO: 13766 - DNA, 8532 bp, synthetic construct
  misc_feature 1..8532: note = Description of Artificial Sequence: Synthetic coding sequence
  source 1..8532: mol_type = other DNA
atggccgccgcttcttacgatcagttgctgaaacaggtagaggcattgaagatggaaaattctaacttgcgccaagaactggaggataatagtaaccacctcacaaaattagagaccgaggctagcaacatgaaagaggtgcttaagcaactacagggatccattgaagatgaggctatggcgagtagtgggcagatagatctgctggagcgcctcaaagagttaaacctggactcttccaacttcccaggtgtgaaactccgcagtaaaatgtctttacgctcctatggctccagagaaggatccgtctcatctcggtctggcgagtgcagtcccgtgccaatgggcagcttccccagaagggggttcgtcaacggatctcgggagtcgaccggctacttagaggagttggaaaaggagaggtctttgttgttagcagacctcgacaaagaggagaaggagaaggactggtactatgcgcagctgcaaaacctcaccaagaggatagatagcctgcctctcacagagaatttctcactccagaccgacatgaccagaaggcagttggagtatgaggcccgtcaaatcagagtggctatggaggagcaattagggacctgtcaggacatggagaaacgcgctcagcgtcgtatcgcccggatccaacaaatcgaaaaagacattctgaggatccggcagctgctgcagtctcaagctaccgaagcagagcgttccagccaaaataaacacgagacagggagccacgacgcagagagacagaacgaaggccagggtgtgggggaaattaatatggccacttctgggaacggtcagggatccacgacaagaatggatcatgagacagccagcgtcttatcatcctcctccacccatagcgctccaaggagactcacctcgcatctcgggacaaaagtggaaatggtctacagcctgctgagcatgctgggaacccacgataaggatgacatgagccggaccctcctggcgatgagtagctcacaggactcgtgcatttccatgcgacagtctggctgtctgccactgctgatacagttgctgcatggcaacgacaaggattccgtgctgctgggtaactccagggggtctaaggaagcacgtgcgcgagcctcagcagcccttcataatattattcactcccagccagacgataaacggggacggagggagattcgagtcctgcatctgctcgaacagattagggcttactgcgagacctgctgggagtggcaggaagcccacgaacccggcatggaccaggataaaaatccgatgcctgcaccagtcgaacaccaaatatgtcccgccgtgtgcgtactcatgaagctgagtttcgacgaagaacaccgccacgcaatgaacgaattgggagggctacaagcgatcgcggagttactgcaggttgactgcgagatgtacggtctgaccaacgaccattactcaattacattaagaagatacgccggtatggcgctgaccaacctgacttttggtgacgtcgctaacaaagcaacgttgtgctctatgaaggggtgtatgcgcgcactggtagctcagctgaaatcggaaagtgaagacttacaacaggtgattgctagtgtgctgcgtaatctttcctggcgggcagatgtgaacagcaaaaagactttacgggaggtaggatcggtcaaggcacttatggaatgtgccctcgaggtgaagaaggagtccaccctgaaaagtgtgcttagcgctttgtggaacctgagcgcccattgcaccgaaaacaaggccgatatctgtgctgtggatggggcgcttgctttcctcgtcggcacgctcacttaccgaagccaaactaacaccctggcaattattgaatctggcggggggatactcagaaacgtttcaagtcttattgccaccaatgaagatcaccggcagatcttacgggaaaacaattgcctgcagactttactgcaacatctgaaaagccactcccttactatcgttagtaatgcatgcggaacactttggaacctctccgctcgcaaccccaaggatcaggaggccctgtgggacatgggcgcagtgtctatgttgaaaaatctgatccacagtaagcataagatgatcgccatgggatcagcggccgctctcagaaatctgatggccaatagaccggccaaatacaaggatgcaaacattatgtctcccggctcatctctgccctcgctgcatgtgcgcaagcagaaggccctggaggccgagctcgatgcccagcatctgagtgagacctttgataacatcgacaacctctcacccaaggccagtcacaggagtaagcagaggcacaagcagtctctgtacggggattatgtgtttgatactaatcggcatgatgacaaccgctcagacaattttaacaccggaaatatgactgtgttatcgccttacctcaacaccacagtgctccctagcagttccagtagccgcggatctctggacagctcccggagcgagaaggaccgttcattggaacgagagcgagggattggcttgggcaattatcacccagcaacagagaatcctgggacctccagtaaaaggggccttcagatcagtaccacagcagctcagatcgcaaaagtgatggaggaggtgagtgctatccacaccagccaagaagaccgcagctcagggagtaccactgagttgcattgcgtgactgacgaacgaaatgcactgcggcgcagctcggctgcgcacactcattccaatacgtacaactttactaagtccgaaaactcaaacaggacatgctccatgccatacgcaaagctagagtataagcgatccagcaacgatagcctgaactccgttagttccagcgatggctacgggaaacggggccagatgaagccatccatagaaagttattctgaggatgatgagtccaagttctgttcttatggccaatacccggcggaccttgctcataaaattcatagcgctaaccacatggatgataacgacggcgaattggatacccccatcaattattctttgaagtactctgatgaacagctcaactccggccggcagagccccagtcagaacgaacgttgggcaagacccaagcatatcattgaggatgaaatcaaacagtctgaacagagacaatccaggaatcagtctacaacttatcccgtctacacagagagtacagatgacaagcacctcaagtttcagcctcactttggtcagcaggaatgcgtgtctccctacagaagtagaggggctaacggaagcgaaacgaaccgcgtaggttcaaaccatggaattaatcagaatgtgagtcagtcactctgccaagaagatgactatgaggacgacaagcccacgaactactctgagagatacagcgaggaagagcagcatgaagaagaggagcgaccaacgaactatagcattaaatacaatgaggaaaagcgtcatgtggatcagccgattgattacagcctcaaatacgctaccgacattccctcttcccagaagcagtcattcagtttttctaaaagtagctctgggcagtcctctaaaacagaacacatgtcctcttcttcagagaacacatcaaccccaagctctaacgccaaacgccaaaatcagctgcatccatcgagtgcccagtccaggagcggacaaccccaaaaggcagcaacatgtaaagtttcaagtatcaaccaggagactatccagacttactgtgtggaagacacaccgatttgtttctcaagatgtagttctctgtcatcactttcaagcgctgaggatgagattggatgtaaccagacaacgcaagaggcagactcagctaatacacttcaaattgccgagattaaagaaaagattgggacccgctccgctgaagaccctgtaagcgaggtgcctgcagtgagccagcaccctcggactaagtccagcagactgcagggcagttccctgtcaagcgaaagcgcacgacacaaagcggtggagttttcgagcggcgccaaaagtcctagcaagtcgggtgcccagacgcccaagtcaccaccagaacactatgtccaggagacacctctgatgttctctcgttgcacatccgtgagttctttggatagcttcgagtctcggagcatcgcgtcatccgtgcaaagcgagccctgctccggtatggtctcgggtatcatcagcccctcagatctgccagattcaccaggccagaccatgcctcccagccgctcgaaaacccctcccccaccgcctcagaccgcccagactaagagggaagtccctaagaataaggccccaactgcggaaaagagggagtctggccccaagcaggcggcggttaacgctgccgtccagcgggtgcaggtcctcccggatgccgatacactgcttcactttgccactgaatccacccccgacgggtttagctgtagctcttcactatcagccctctcactcgatgaacctttcattcagaaggacgtggaattacgaattatgcctcctgtacaagagaacgacaacggtaacgagacagaatcggagcagcctaaggagagtaacgagaatcaggagaaggaggcagagaagaccattgactcagaaaaggacctactggacgacagcgacgacgacgacatcgagatcctggaggagtgtatcatcagtgctatgccgactaaaagcagcaggaaggcaaagaagcctgctcaaacagcctcaaagctgcctccccccgtggcccgaaaacccagccagctgcccgtgtacaaactcctcccttcccagaacagattacagccacagaaacacgtgtcttttaccccaggcgatgacatgccacgagtatattgtgtggaaggtacaccaattaactttagtactgctacctccctaagcgatctgactatcgagtcgccacctaacgaattggcagcaggggaaggggtgaggggtggcgctcagtcgggagagttcgagaagcgggacactatcccgaccgagggacggagcaccgacgaggctcagggcggcaaaacttccagcgtcacaattccagagctagacgataacaaagctgaagagggagacatcttagcagaatgtattaattccgccatgccgaagggaaagagccataagccctttcgggtgaagaaaatcatggaccaggtccaacaggcttctgcgtcaagtagcgctccaaataagaatcagctggatgggaaaaaaaagaagcccacttctcctgtcaaacccatccctcaaaatactgagtatcggacccgagtacgaaagaacgcagacagtaagaataatctaaacgccgagagagtcttcagcgacaataaagacagcaagaaacagaatctcaagaacaattccaaagtctttaacgacaaactgcccaacaacgaagatcgcgtacggggcagttttgcctttgattctccgcaccactacacccctattgagggcaccccctattgcttttcacgtaacgacagcctaagctctctagacttcgatgatgatgatgtcgacctgtcccgggaaaaagcagagctgcggaaagcaaaggaaaataaggaatcagaagcgaaggtcaccagccacactgagctcacatcgaatcagcagagcgccaataagacacaggccatcgccaagcagcccataaatcgaggccaaccaaagccgatcctacagaagcaaagcaccttccctcagagtagcaaggacatacccgaccggggggccgctactgatgagaagctgcagaatttcgcaatagagaatactcccgtctgcttctcccacaattcatctttgtcttcgctgtccgatatcgaccaggaaaacaacaacaaagagaacgaaccaataaaagagactgagcccccagacagccagggagaaccaagtaagcctcaggcatctggatatgcacccaaatctttccacgtggaggatacgccagtgtgtttttctcgaaattctagcctttcatccctgtcgatcgattctgaggacgatcttctccaggaatgtatcagttcggccatgcccaagaagaaaaaaccctctcgcctgaaaggcgacaatgaaaagcattcccctaggaacatgggtgggattctgggcgaggacttgaccctggacctgaaggatatccagcgaccagacagcgaacacggcctctctccagactccgaaaattttgattggaaggcaatccaggagggggcaaactccatagtgagtagtctgcaccaggcagctgccgctgcgtgcttgagtcggcaggcttccagtgattccgactctatcctgtccttgaaaagtggtatcagcttaggaagtcccttccacttgactcctgaccaggaagagaaacctttcactagcaataagggccctcgcatcctgaagcctggcgaaaagtcaacccttgagactaaaaagatcgaaagtgaatctaaaggaatcaagggagggaaaaaggtctataagagcctcatcacaggcaaagtgcgtagcaacagtgagattagcggccagatgaaacaaccactccaggcgaacatgccgtctatttcccgaggccgcactatgatacacatcccaggagtgaggaactccagcagtagtaccagccctgtcagcaaaaagggcccccccttaaaaacaccagcctctaaaagtcctagtgaggggcaaacggctaccacctcccctagaggggccaagccaagcgttaaatcagaattgagtccagtagctcgccagacgagccagataggcggctcgagcaaagcccctagccgctctgggagccgtgattcgacccctagcagacccgcacagcagcccttgagtagaccgattcagagtccggggagaaactccatctcacctggaaggaatggaatctcacctcctaacaagctatcacagctgcctagaacctctagcccaagtaccgcgagtaccaagtcttcgggatctggaaagatgtcctatacctcacctggcaggcagatgtcacagcagaacctcaccaaacagaccggactgtccaagaatgccagctctattcctagaagtgaatcggccagtaaggggctaaatcaaatgaacaatggcaacggagccaataaaaaagtcgagttaagtagaatgtcatcaactaagagcagcggatcagagagtgaccgaagcgaacgacctgtcctagttagacagtccactttcataaaggaagccccaagtcctacattgcggaggaagctggaggagtcagccagttttgaatctctctcgccctcatccaggcctgcttcccccacaaggagccaagcacagacccctgtgcttagcccaagcctgccagatatgtccctgtcaacacatagtagcgtccaagctggcggctggcgaaagctgccccctaatctgtctcccactattgagtacaatgatgggcggccggctaagcgtcatgatatcgcgagatcccattcagagtcacccagcaggctcccaattaatcgatccggaacatggaagagggaacatagtaaacactcaagcagcctcccacgcgtgtccacgtggcgaagaaccggttccagtagttcaattctgtcagcttcctctgagtcttccgaaaaggccaagagcgaggacgagaaacacgttaatagcatatctggaacgaagcagagtaaggagaatcaagtctccgccaaagggacatggcggaaaattaaggaaaacgaattctcccccaccaactctactagccagaccgttagctcaggggccactaatggggctgagagtaagactctgatttatcagatggctcccgctgtatctaaaacagaggacgtgtgggtgagaatagaagactgtcctatcaacaatccacggtccggccgctcaccgacagggaacacaccccccgtcatcgactctgtgtctgagaaggcgaatcccaatatcaaagattctaaagacaatcaggccaagcagaacgtcggaaatggaagtgtgccaatgaggacagtgggtctggagaaccgactcaactcattcatacaggtggatgcgcccgaccaaaaagggacagagatcaagccaggacaaaacaaccccgtgccagtcagcgaaacgaacgagtccagtattgtagagcggacgccattctcttctagttctagctccaaacactcctcgcccagcggaacagtcgctgcacgtgtgacccctttcaactataacccatccccccgcaaatctagtgctgattccacaagcgcccgcccgtctcagatcccaaccccggtgaataataatactaagaagagggattctaaaacagactcaactgagagtagcggaactcagtcccccaagaggcattctggcagttacctggtcacatctgtctag

SEQ ID NO: 13767 - DNA, 8532 bp, synthetic construct
  misc_feature 1..8532: note = Description of Artificial Sequence: Synthetic coding sequence
  source 1..8532: mol_type = other DNA
atggcagcggcatcctacgatcagctgttaaaacaggtggaggcactcaagatggagaactccaacctccgtcaggaactcgaggataactccaaccaccttaccaagttggagactgaggccagcaatatgaaggaggtccttaagcaactacagggaagtatcgaggatgaagctatggccagcagtggacagatcgatctcttggaaagacttaaagagctgaatctcgattcaagtaatttcccaggcgttaagctgaggtctaagatgagtttgaggagctacggctctagagaggggtcagtgagtagtcgctctggcgagtgtagccccgtgccaatggggagtttcccccgacgaggcttcgtgaatggaagccgggagagcacgggatatctggaagagctcgagaaggaaagatccctcctgctggctgatctggacaaggaggaaaaggaaaaggactggtactacgcccagctgcagaaccttaccaagagaattgattccctgcccctcaccgaaaacttcagtctgcagaccgacatgacacgcaggcagctcgagtatgaggcgcggcagattagagtcgcaatggaagaacagctcggcacttgccaggacatggaaaagcgggcgcagcgccgcattgcccgaattcagcagatcgaaaaagacatactgcgcatccgacagctgcttcagtctcaggccaccgaggctgagaggagcagtcagaacaaacacgaaacggggagtcatgatgcagagcgtcaaaatgaaggtcagggcgtaggggaaattaacatggcgacttccggaaacggccaaggcagcacaacacgcatggatcacgagaccgccagtgtgttgtcaagctctagtacacacagcgctcctaggcgcctaacttctcacctcggaaccaaagtggagatggtgtactccctactgagtatgctcggaactcatgacaaagacgatatgagccggaccttgcttgccatgagtagctctcaggatagttgtatttctatgcggcagtcagggtgcctgccactgctgatacagctactccacggtaatgataaggattcagtgctcttagggaactcgaggggatcgaaagaggccagggcacgagcatcggcggcgctgcataacattatccactcccagcctgacgataaacgtgggaggcgcgagataagggtgctgcacttgctggaacagatccgggcatactgtgagacctgctgggaatggcaggaagcacacgaacccggaatggatcaggacaaaaatccaatgccggcgccagtggagcatcaaatatgcccagccgtctgcgtgctgatgaaacttagctttgacgaagaacacaggcatgcaatgaacgagctaggcggccttcaggcgattgcagaactcctgcaggtggattgtgagatgtatgggttgactaacgaccactactcaattacgctgcggaggtatgcaggaatggccctgactaaccttaccttcggggacgtagccaacaaggccacactttgcagtatgaagggttgcatgagagctctcgtggcccaattgaagtccgagtcagaggatctgcagcaggtgattgcttcagtgcttcggaacctctcttggcgcgcggatgtcaactccaaaaagacattacgtgaagttggatcagtgaaggccctcatggaatgtgcacttgaggtcaaaaaggaatcgactcttaaaagtgtgttgtctgccctgtggaacctatcagcccattgcacagagaacaaagccgacatctgtgcggttgacggggccttggccttcttggtgggcaccttgacctacagatcgcagacgaacaccctcgccattattgagtccgggggtgggattctgaggaacgtaagttcactgattgccactaacgaagaccatagacagatattgcgggagaacaactgcctccagaccctcctccagcatctaaaatcccacagcctgaccattgtgtctaatgcctgcggcaccttgtggaaccttagcgctagaaatcccaaagaccaggaggccctatgggatatgggggcagttagtatgctgaaaaatcttattcatagcaaacataagatgatcgccatgggctctgcggcggctctccgtaatctgatggcaaataggccagcaaagtacaaggacgccaacatcatgagccctggcagctcgcttcccagcctgcacgtgagaaaacagaaggctctggaagccgaactggacgcccagcatctttctgaaaccttcgataacatcgataacttgtcccctaaagcctcccatcggagtaagcagaggcacaaacaaagcctgtacggcgattacgtttttgatactaatcgccatgacgacaatcggtctgacaactttaacacaggcaacatgacagtgctttcaccatacttaaacacgactgtgctgccaagcagttcttcttcccgtggctctctagacagctcccgttcagaaaaagaccgctcactagagcgcgagagagggatcggactggggaactaccatccagccactgaaaatcccggaacctccagcaaacgggggcttcagatctctacaactgccgctcagattgctaaggtcatggaggaagtttccgcgatacataccagccaagaggacaggagtagcggcagtaccactgagcttcactgcgttaccgatgagcgaaatgctttgagacgctcttccgccgcccacacacattcaaatacctacaacttcactaagagcgaaaatagcaatcgaacatgcagtatgccgtatgcaaaactcgaatacaaaaggtcctccaacgacagccttaactctgtttcctcctctgatggatatggcaagcggggccagatgaaaccaagtatcgagtcctatagcgaggacgacgagtccaagttttgctcttatggccagtatcccgcggacttggctcataaaatccactccgccaaccatatggacgataatgatggtgaactcgacacccccatcaactactctctcaagtactccgacgagcagttgaactccggccgccagagtccttcgcagaacgagcgttgggctaggcctaaacacatcatcgaggacgaaatcaagcagagtgaacaaagacagagcagaaatcaaagcaccacttatcccgtgtataccgaatcaaccgatgacaaacacctaaaattccagccacatttcggtcagcaggaatgcgtttccccttatcgttcccgaggcgcaaacgggtccgaaacgaatcgagtcggtagtaatcatgggattaaccaaaatgtcagccaaagcctgtgtcaggaggatgactacgaggacgataagccgactaattactctgaacggtacagtgaggaggagcagcacgaggaggaagaaagacctaccaattacagcataaaatataatgaggaaaagagacacgtggatcagcccattgattacagtctgaagtacgctaccgacatcccgagttctcagaagcagtccttttcgttcagcaagagttcctctggccagtcatcaaagactgagcatatgtcttcctccagtgaaaacactagcacaccctcctcaaacgccaagcgccagaaccagcttcatccttcctctgcccagagcaggtcaggccagccccagaaggctgcgacttgtaaggtctcttcaatcaatcaagaaactatccagacttactgtgtcgaagacactcccatttgtttctcaagatgcagctccttatccagccttagttcggccgaggacgagattggttgcaaccagaccactcaggaagctgacagcgccaatactctgcagatcgcggagataaaggagaagattggcacacgcagcgccgaagatcctgtgagtgaggtaccggctgtgtctcagcacccacggacgaaaagcagcaggctgcagggcagcagcctctcatccgagagtgcccgccataaagccgtagagttctcctctggggctaagtccccctcgaaaagcggggcacagacaccaaagtcccctcctgaacactacgtgcaggagactccgcttatgttttcacggtgtacaagtgtttcgtcgctcgacagctttgagagccgtagcatagccagcagtgtacagagtgaaccgtgctctggcatggtgagcggcattatttcccctagtgacttgccagacagccccggtcaaacgatgcccccctcaagaagtaagacaccccctccaccaccccagactgctcagaccaaacgtgaggtccctaaaaacaaagcccctactgctgaaaaacgggagagtgggcccaagcaggcggccgtgaacgctgcagtccagagagttcaagtgcttccagatgcggacactctgcttcattttgctacagagtccacgccagatggattctcttgcagcagctcactgagtgcattgtccctggatgagcccttcatccagaaggatgtcgagttgcgcattatgcctcctgtccaggagaacgataatggcaatgagacagagagcgaacagcctaaggagtccaatgaaaaccaagagaaggaagccgaaaagacaatcgacagcgaaaaagatctgttggacgatagcgatgatgatgacatagagatcctcgaagaatgcattatatcagcaatgcccaccaagtctagcagaaaggccaagaagcccgctcagaccgcatctaaactgcccccacctgttgccaggaagccaagtcagctacccgtttacaagttactgcctagtcagaacaggctgcaaccccaaaaacacgtgagcttcacccccggcgacgacatgccgcgcgtctactgcgtggagggaacacccatcaatttttccactgcaacatcattatcggatctcacaatcgaaagtcctcccaacgaactggccgccggagagggggtaaggggcggcgctcagtcaggagagtttgagaagagggacacaatacccactgaggggaggagtacagatgaagcccagggaggtaagacgagctcagtgactattcccgagctggacgataataaggccgaagaaggcgacatcctggctgagtgcattaactctgcaatgcccaaagggaagtcccataaaccatttcgcgtcaagaagatcatggatcaggttcagcaagcttccgcttcgagctctgctccgaacaagaatcagctggatggtaagaaaaagaagcctacctctcctgtcaaaccaatcccccagaacacagagtaccggacccgggtgcggaagaatgccgatagtaagaacaacctaaatgctgagagggtgttcagcgataacaaggattctaagaagcagaacctgaagaacaattctaaagtttttaatgataaattgcctaataacgaggatcgggtgagaggcagttttgctttcgatagtccccaccattatacgccaattgaaggtaccccctactgcttctccagaaacgattctctttcatctctagacttcgatgatgacgacgtggacctgtcccgagaaaaagccgagctccggaaggccaaagaaaacaaggagagtgaggctaaagtgacaagtcacaccgaactcacatccaaccaacagagcgccaacaagacacaggcaattgccaaacagcccattaaccggggccagccaaagcctatcctacagaaacagtctacgttccctcagagctcgaaggatattcccgataggggagccgcaactgacgagaagttgcagaacttcgctattgagaacacacccgtttgtttcagtcacaattcatccctttcttctttgagtgacatcgaccaggaaaacaacaataaagagaatgaacctatcaaagagacggagcctccggacagccagggcgaaccctcgaaaccgcaagccagcggatatgcacctaagtcatttcatgtcgaagacacaccagtttgctttagccgtaacagtagtctatccagcctgagcattgattccgaggacgacctcctccaggagtgcattagttccgctatgcctaaaaaaaaaaagccgtcccggctcaagggagacaacgagaagcacagccctaggaacatggggggtatattaggagaggaccttacgttagatctcaaagacatccagcgccccgactctgaacacggactcagccctgattccgagaacttcgactggaaagcaatccaggaaggcgccaattccatcgttagtagcttacatcaggctgctgcagctgcctgtctgtcacgccaggccagttcagactcagacagcattctgtccctcaaatcgggcatttcattaggaagccccttccatctgacccctgatcaggaagagaagccttttacctctaacaaaggaccacgaattcttaagccgggtgagaaaagcaccctggaaaccaagaaaatcgagtctgagagtaagggtattaaaggcgggaaaaaagtatataagagccttatcacaggaaaggttcgtagtaactccgagatctccggccaaatgaaacagcctctccaggcgaacatgcccagcatttcacgaggccgcacaatgattcacattcctggcgtgcgcaacagcagctctagtactagcccggtgagcaaaaaaggaccgccactaaaaacccctgcctccaaaagtccttctgagggccagacagccaccacgagtcccaggggagccaaaccatcggtcaaaagcgagttatctccagtggcgaggcagacctctcagatcggtggaagctctaaggctccctcaaggtccggcagcagagacagcaccccgagccggcccgcccagcagcctttaagccggccaattcagtctccaggaaggaattcaatctcaccagggcggaacgggatctcaccccctaataagctgtcccagctcccacgaacctcctctccatccacggccagcactaagtcatctgggagtggaaaaatgtcttatacttcacctggccgacagatgtcacaacagaatctgaccaaacagactgggctgtcgaagaacgcaagttctatcccgcgctcagaaagcgcaagcaagggcttgaaccagatgaataacgggaacggagcaaataagaaagtggaactatcccgaatgtcatcgaccaagtccagtgggagtgagagcgaccgcagcgagcgacccgtgttggtccgccagagtacttttatcaaagaggccccgtctccgacactgaggcgcaagcttgaggagagtgcctccttcgagtccctgagtccgtcaagcaggcccgcctctcccacacgcagccaagcccagacgccagtgctgtcccctagcctcccggatatgtcccttagtacccacagctccgtccaggctggtggatggaggaaactgcctcccaacctgtcccccaccattgaatataacgatggtcgccccgcaaaaagacatgacatagcccgatcacattccgaaagtcccagccgtctccctatcaatcggtccggaacgtggaaacgcgagcactctaaacactcttcttctctgcctagagtctccacctggcgccgcaccggttccagctctagcatcctatccgcatctagtgaatcctctgaaaaagcaaagagtgaagacgagaaacacgttaatagcattagcggaactaagcagtccaaggagaatcaagtgtccgctaagggaacttggagaaaaattaaggaaaacgaattctctcctactaactcgacatcacagaccgtgagctcgggagccaccaatggggcagaatccaaaacccttatttaccagatggcacccgccgtatctaagacagaagacgtgtgggtgaggattgaggactgccccattaacaatccaagatctggacggtctcctacgggaaatactccccctgtgattgattcggtttctgagaaggcaaatcctaacatcaaagattcgaaggataaccaggcgaagcagaacgtcggcaacggctccgttccaatgcggacagttggactagaaaataggctcaactccttcatccaggtcgacgctccggaccagaagggaacggaaataaagcccggtcaaaacaatcccgtgcctgtgagcgaaaccaacgagtcgagcattgtggaaagaacgccattcagctccagttcctcttcaaagcactcctccccaagtggaaccgtggctgcacgagtgacgccctttaactacaatcccagccctcgtaagagctcggcagactcaactagcgcgcgcccatctcaaattccgacacctgtaaacaacaatactaaaaagcgggattcaaaaacagattccaccgagagttctgggacccaaagtcccaagcgccacagcggtagttacctggtgactagcgtgtag

SEQ ID NO: 13768 - DNA, 8532 bp, synthetic construct
  misc_feature 1..8532: note = Description of Artificial Sequence: Synthetic coding sequence
  source 1..8532: mol_type = other DNA
atggctgcggcctcttatgatcagttgctgaaacaggtcgaagcactgaaaatggagaactcaaaccttcggcaggaactcgaggacaatagtaatcacttaacaaaacttgaaaccgaggcctctaacatgaaggaggttctgaagcagctacaggggagtatcgaagacgaggccatggcaagcagtggccagattgatctcctggaacggcttaaagaattaaatctcgattcgtccaattttcctggggttaaactgagatccaagatgagccttaggtcctacggaagcagggagggatccgtaagctcccgaagcggcgagtgttcccccgtgccgatgggatcctttccaagacgcggctttgtcaatggatcccgtgaaagcactggatatctggaagaattggaaaaggaacgcagccttctgctagctgatttagacaaggaggagaaagagaaagactggtactacgctcagctgcaaaatctgactaaaagaatcgacagcctgcctctgacagagaacttttctttgcagacagatatgacaaggcggcagctggagtacgaggcccgacagattcgggtggccatggaggagcagttagggacatgtcaagacatggaaaagcgggcccagaggcgaattgcacggattcaacagatagagaaggatattcttcgcattcgccagctgctccaatcccaagctaccgaagccgaaaggtcttctcaaaataaacacgaaacggggtctcatgatgccgaaaggcaaaacgaaggccagggtgtgggggaaatcaatatggcgactagcgggaacggccagggttcaactactcgcatggatcacgaaacggcaagcgtgttgtctagttccagcacacactctgccccgcggagactgacctctcacttgggcaccaaagtggagatggtttattcattgctctccatgctggggacccacgataaggatgatatgtcccgaactctcctcgccatgtcctcatctcaagattcgtgcatttccatgcgccagagtggttgcctcccactgctgattcaactgctgcacggaaatgacaaagacagtgttctgctggggaattcaagagggtccaaagaggcccgggcccgggccagcgcagctctacacaatatcattcacagccagcctgacgacaaaagaggcagaagggaaattagggtcctgcacctcctcgagcagattcgcgcttattgcgagacctgctgggagtggcaggaggcacacgaacccggtatggaccaagataagaatcccatgcctgctccagtggagcatcagatctgccccgcggtgtgtgtgcttatgaaactgtctttcgacgaagagcacagacatgccatgaatgagctggggggccttcaggccatcgctgagcttctgcaggtggattgcgaaatgtacggcttgaccaacgaccactacagcattacactacggcggtatgccgggatggcccttacaaatctcacctttggcgacgttgccaataaagccacactgtgcagtatgaaaggttgtatgcgcgcacttgtggcccagctgaaatctgagagcgaggacttacagcaggtcattgcgagtgtgctgcgcaacctgtcgtggagagccgacgtaaacagtaaaaagaccttgagagaagtaggttccgttaaagcacttatggaatgtgccctcgaggtaaaaaaggaatccacattgaaatcggtgctgtctgccctttggaacctgagtgcacattgtaccgagaacaaggctgatatctgcgccgtagacggagcactggcctttctggtgggcacattgacataccgtagccagacgaacacactcgccataatagaatcaggaggcggcatcctgagaaacgtatctagcctgattgccactaatgaagatcatcgacaaatccttcgcgaaaataattgccttcagacactgttgcaacacttgaagtcacacagtttaacaatcgttagtaatgcgtgtggcaccttgtggaatctgtcagcccggaatccaaaggatcaggaggctctgtgggatatgggggctgtgagtatgctgaagaatctgatccactccaagcataagatgattgccatgggatcagccgcagccctccggaacctgatggccaatagacccgctaaatacaaagacgccaacatcatgagcccgggcagttcccttccaagtctccacgtcagaaagcagaaagccttggaagccgagctggacgcgcaacacttaagtgagacctttgacaatattgacaatctgagccctaaagcgagtcatcgaagcaaacagcgccacaagcagagtttgtacggggactatgtgtttgatacaaacaggcacgacgataaccgttcagataattttaatactggcaatatgaccgtcctgtccccgtacctgaacacaaccgtgctgcccagcagctcctcttcgagaggcagtctggatagctctagaagtgagaaagatcgcagtctggagagggaaagaggcatcgggctgggaaattaccatcctgccacagaaaatccgggcacttcttctaaacggggcctgcagatatccaccaccgcggcccagatcgccaaagtaatggaggaggtgtccgccatccataccagccaggaggatagatcctctggttctaccaccgaacttcactgcgttactgacgaacggaacgcactgcgtaggagctcagctgctcacactcacagtaatacgtataattttactaagtccgaaaacagtaaccgcacatgtagtatgccttacgcgaagctggagtacaagcgcagtagcaacgactctctgaattcagtttccagcagcgatggctatgggaaaagagggcagatgaaaccctccatcgaatcgtactccgaggatgacgaatccaagttttgctcatacgggcagtacccagccgatctggcgcataaaatccacagcgcaaatcacatggatgacaatgatggggaactagacacccccatcaattacagcctgaagtactccgacgagcagctaaatagcggccgccagagtcctagccagaatgagcggtgggcacgccctaaacacatcattgaagatgagattaagcaatccgaacagaggcaatctcggaaccagagtacaacataccctgtctacactgagtcaaccgatgataaacatttaaaattccaaccccactttggccagcaggagtgcgtgtctccctaccgctcccgcggggctaatggctcagaaaccaaccgagtaggatctaaccacggcatcaatcaaaatgtgagtcagagtctgtgccaggaggatgactacgaagatgacaaaccaacaaactactctgaaagatactccgaagaagagcagcatgaggaagaggaaagacccaccaactattccatcaagtataacgaagaaaagcgtcacgttgaccagcccatagattactctctgaagtacgcgactgatataccttcttcccaaaagcagagctttagtttctctaaatcctcctcaggacaaagtagtaaaaccgaacacatgagttcctcttctgagaatacctctactccctcctcgaacgcaaaaagacagaaccagttacacccttcgtccgcacagagccgcagtggacagccacagaaggctgctacatgcaaggtcagtagtataaaccaagaaacgatccagacatactgtgttgaggacacccctatctgtttctctcggtgttctagtttgtcctccctgtcgtccgcagaggacgaaatcggatgcaatcagacgacacaggaagccgattctgcgaacacactgcagattgcggaaatcaaagagaagatagggactaggtccgcagaagatcccgtgtcagaggtgcctgcagtatcacagcacccgcggacaaaatcatcccgcttacaaggcagttctctctcctcagaatctgcgaggcataaggccgttgagttttccagcggcgccaagtctccttccaagtccggagcccagacgcccaaaagccctcctgagcactacgtgcaagaaacccctctaatgtttagtaggtgtacatctgtgtccagtttggatagctttgaatcccgatctatcgcttcttcggtgcagtccgagccttgtagcggcatggtgtccggcatcatttccccatccgacctgcccgatagccctgggcaaaccatgcctccaagtagatctaagactcctccaccaccacctcaaacagctcagactaaacgagaagtacccaagaataaggcccctacagcagaaaagcgcgagagcggccccaagcaagcagccgtgaatgcagccgtgcagagggtgcaagttctgccagatgccgatactctccttcattttgccacagagtcaactcccgacggctttagctgcagttctagcctctccgcattgagtcttgatgaaccttttatccaaaaggatgtggagcttagaattatgccacccgtgcaggagaacgacaatggcaacgagactgaaagtgagcaacccaaagagagcaatgagaaccaggagaaggaggctgaaaagacaatcgacagcgaaaaggacctcctggatgactcggatgatgatgacatagagattctcgaagagtgcataatttccgccatgcccaccaagtcttctcggaaggctaagaagccggcccagacagcctcgaaattgcccccacccgtggcccggaagccaagtcaacttcctgtatataagttgctgccctcccagaatcggctgcaacctcagaagcacgtgagttttacacctggcgatgacatgccccgagtctactgtgtggagggaacccccatcaatttctcaacggccacaagcttaagcgacctcactattgagagtcccccaaacgaacttgctgctggcgagggcgtgagggggggagcccagagcggggagttcgaaaagagagatacaatcccaacggaaggccgatcaactgacgaggcacaggggggtaagaccagttctgttactattccagagctagacgacaataaagcagaagagggcgatatcctagctgagtgcattaacagcgcaatgcctaaagggaaatcccataaacctttccgggtcaagaaaataatggaccaggtgcagcaggcaagtgctagttctagcgcccccaacaagaaccagctcgacggaaagaaaaagaaacctactagccctgtgaaaccaatccctcaaaataccgaataccgcacacgtgttcggaagaacgctgactccaaaaataatctgaacgcagaaagggtgtttagcgataataaagattctaagaaacagaacctgaagaataattccaaggttttcaacgacaagttacctaataacgaggacagagtacgagggagttttgcgtttgatagtccgcatcattacactccaatcgagggcacgccatactgtttcagccgcaacgacagtctctcctcactggacttcgatgatgatgacgtggacctgtctcgggagaaggctgaactgcggaaggcaaaagagaataaggagagcgaagcaaaggtcacctctcacaccgagctgacttcgaaccagcagtccgccaataagacccaggcaattgctaaacaacccatcaacagaggtcaacctaaacccattctgcagaagcagtccacattccctcagagctcgaaggacatacccgacagaggtgcggcaacagacgaaaaactccaaaatttcgccattgagaatactccggtctgcttctcccacaactctagcctttctagcttgtcagatattgaccaggaaaacaataacaaggaaaatgagccaatcaaagagacagagcccccagattcccagggggaaccttcaaagccccaggccagcggctatgcacctaaatccttccatgtcgaggataccccagtatgcttctctagaaactcttcgctgtcatctctgagtattgatagcgaggatgatctcctgcaggagtgtatatctagtgccatgccgaagaagaagaagccctctcgcctgaaaggcgacaatgaaaagcattcaccaagaaatatgggcggcatccttggggaagatctgactttggacctcaaagacattcaaaggcctgactccgagcatggcttgagccctgatagtgagaactttgactggaaggccatccaggagggtgccaatagcattgtttcaagcctgcaccaagccgcggctgctgcctgcctgagccgtcaagctagtagcgactccgactcgattttgtccctcaaatccggcatttcactgggtagccctttccaccttactcccgatcaggaagagaaaccattcacgtccaacaaaggtcctagaatcctaaagcccggggaaaagagcacactggagaccaaaaagattgaaagtgaaagtaagggaatcaagggtggaaagaaagtgtacaaatccctcatcacgggcaaggtccgatctaattcagagatttcggggcaaatgaagcagccgctccaagccaacatgccgagcattagccgcggcaggactatgattcacatacccggcgtaagaaattcgagcagtagtactagccccgtgagcaagaagggaccccccctgaaaacccctgcttcaaagagcccatccgaaggtcaaactgctacgaccagccctcgaggtgctaaacccagcgtgaaaagtgaactaagcccggttgcccgacagacaagccagatcggcgggagcagcaaggccccatcccgctccggctctagggactccacaccctcccgtccagctcagcaacctctctctagacctattcagagtccgggacgaaacagtatctcccctgggaggaatggcatttcgccacctaataaattgagtcaactgcctcgcacgtccagccccagtacagcatctacaaaatctagtggatccggtaagatgagctatacatctcctgggaggcaaatgtcacaacagaatctgaccaagcagaccggcttgagtaaaaatgcctcttctatcccgagaagcgagagcgcctcaaagggtctcaatcagatgaacaacggcaacggagcaaataaaaaggtggagttaagcagaatgagcagcacaaagagcagtggctcagagagcgacaggagcgagcggcctgtcttggtgaggcagagcaccttcatcaaagaagcccccagcccaaccctccgtcgaaagctcgaggaaagtgcctcttttgaaagcctctctccgagctcacggccagcctcacctactagatcccaggcccagacccctgtgctgagtccatccctgccggacatgagcctcagcactcacagcagtgtccaggcaggtgggtggcggaagttgccaccaaacctgtcccccaccattgagtataacgacggccggccagctaaacgtcatgatatcgcaagaagccattctgagagtccatctaggctccccatcaaccgtagtggtacctggaagcgcgagcatagtaagcactccagttccctgcctagggtaagcacctggcggcgcaccggctctagctcttccatcctgagcgctagttctgagagcagcgagaaggccaagagtgaagacgagaagcacgtgaattccattagcggaaccaaacagagcaaggagaaccaagtcagtgcaaagggaacttggcggaagatcaaggagaacgaattttctccaacaaacagtaccagtcagactgtctcaagcggtgcaacaaatggggccgagtccaaaaccttgatttaccaaatggctcccgccgtgagcaaaacagaagacgtgtgggttcgtatcgaggattgtcctataaacaaccctagatcgggccgctcacctaccggtaatacgcctcccgttattgatagtgtatctgaaaaagcaaaccctaatatcaaggatagcaaagacaatcaggcaaaacagaatgtgggcaatggttccgtccctatgcgcaccgttgggttggaaaaccgcctgaactcttttatccaggttgacgcccccgatcagaaaggcaccgagataaaaccagggcagaacaacccggtcccagtttctgagacaaacgagagcagcatcgtggagaggaccccattttccagcagttctagcagcaagcattcatccccttctggtacagtggccgcgagagtcactccttttaattacaatcccagccctagaaagtccagtgccgatagcacaagcgctcggcccagccagatcccaaccccagtgaataataataccaaaaagagagattccaagaccgattccacagagtcctctggcacgcagtctccaaagaggcactctggtagttatctggtaaccagtgtgtag

SEQ ID NO: 13769 - DNA, 864 bp, synthetic construct
  misc_feature 1..864: note = Description of Artificial Sequence: Synthetic coding sequence
  source 1..864: mol_type = other DNA
atggccgcagcctcctacgaccagttgctcaaacaggtggaggctcttaagatggagaactcgaatctcagacaagagctcgaagataattccaaccacctgacgaagctggagactgaagcctcgaatatgaaagaggtgctgaaacagctccaaggcagcattgaggacgaagccatggcaagcagcggccagatcgacctgctggaaaggctgaaagaactgaaccttgacagttctaatttcccaggggtcaagctgcgatctaagatgtctttgcgtagttatgggtccagagaaggcagcgtgtcaagtcgcagtggcgagtgctcaccagttcctatgggctcttttccacgcagaggctttgtcaacggatccagggagagcacgggatatctggaggagttggaaaaggaacgctccctgcttctggccgatctcgacaaagaagaaaaggaaaaagactggtactacgctcagctacagaatctgactaagaggatcgactcacttcctcttaccgagaatttcagccttcagactgatatgacacgccgacaactggaatacgaggctcgccagattcgagtcgccatggaggagcaactgggcacctgtcaagacatggaaaagagagcgcagaggaggattgcgagaatccagcagatcgaaaaagatatactgagaattagacagctgttgcagtcccaagccactgaggccgaacgatccagtcagaacaaacatgagaccggttcacacgatgccgaacgccagaacgagggacaaggcgtgggggaaattaatatggcgactagcggaaatggacagatcgaaaaaatgcgaatgtttgaatgctag

SEQ ID NO: 13770 - DNA, 357 bp, synthetic construct
  misc_feature 1..357: note = Description of Artificial Sequence: Synthetic coding sequence
  source 1..357: mol_type = other DNA
atggctgctgctagttacgaccaactgttaaagcaagtggaagccctcaaaatggagaactctaatctgaggcaagagctggaggataacagcaaccaccttactaagctggagacagaagcttctaatatgaaggaggtgctgaaacaattacaaggatctatagaagacgaagctatggctagtagtggacagatagatctgctcgagaggctgaaggaacttaatctggactccagcaacttccccggcgtgaaattgagatccaagatgagcttaaggtcctacggttcaagggaaggctctgtgagcagcaggagcggtgagtgttctccggtcccaatgggatccttttag

SEQ ID NO: 13771 - DNA, 3918 bp, synthetic construct
  misc_feature 1..3918: note = Description of Artificial Sequence: Synthetic coding sequence
  source 1..3918: mol_type = other DNA
atggcggccgcctcctacgaccagctgctcaaacaggtagaggctctgaaaatggaaaactctaacctgagacaggagctcgaagacaactccaaccaccttaccaagctggagaccgaggcctccaacatgaaagaagtactgaagcagctccagggtagtattgaggacgaggccatggcctcttcaggacagatagatttgctggaaagactcaaagagttgaacctcgactcatctaactttccaggagtcaaactcaggagcaagatgtccctacggagttacgggtctagggaagggtccgtgtcctctcgaagcggggagtgcagccctgtgcctatgggatcgtttcccaggagaggatttgtgaacggttctcgggagtctactggctacctagaggaactggagaaagaaaggagcttgctcctggcggacctagataaggaggagaaggaaaaagattggtactatgctcagctccagaatctgactaaaagaattgattcgctaccgttgacagaaaatttctccttacagacagatatgacaagacggcagctggagtatgaagcccggcagattagagtggcaatggaggagcagctggggacgtgccaggacatggagaagcgtgcccagcggagaatcgcccgtattcagcaaatcgagaaggacattctgcggattagacagttgcttcagtcacaggctacagaggctgagagatcttcgcagaataaacacgagactggctcgcacgacgccgagcggcagaatgaaggccagggcgtgggggagatcaacatggcaacctctggcaatggacaagggtccaccacgaggatggaccatgaaaccgccagtgtattgagttcaagctccacacacagcgccccaaggaggctcaccagccatcttgggaccaaagtggagatggtgtatagcctgctcagcatgctgggtacccatgataaggatgacatgtcacggactctgctcgcaatgtcatccagccaagatagctgcatctccatgaggcagagtggctgtctgcccctcctaattcagctattgcatgggaacgacaaggatagtgtgctcctgggaaacagtcggggctccaaggaggcccgggcccgggcctcagctgccctacataacatcatccactcccagccggacgataaacgggggcgtcgcgagatccgagttctgcatctgctcgagcagattagagcttattgcgaaacgtgttgggagtggcaagaagcccacgagccaggaatggatcaggataaaaaccccatgccggcccccgtggaacatcagatttgtcctgccgtttgcgtgctaatgaaactctccttcgacgaagagcacaggcacgcaatgaatgagctgggtggactgcaggccatcgccgagctacttcaagtcgattgcgagatgtacggactgacgaatgaccactactccattactctgaggcgatacgccggaatggcacttacaaatctgacattcggggacgtcgctaacaaagctaccttgtgttcaatgaagggatgcatgcgcgcactagtcgcacagctgaaatcagaatcagaagacttacaacaggtgattgcatccgttcttcgcaatctgtcttggcgcgcggacgtgaatagtaaaaagacactccgtgaggtgggctccgtgaaggcccttatggagtgcgcattggaggtgaaaaaggagagtactttgaagtccgtgctgagcgccctttggaatctctcggctcattgtactgagaataaggctgacatctgcgccgtcgacggagcactggcatttctagtaggtaccctcacataccgatctcagacgaatacactagctatcatcgagagcggcgggggcattctcaggaatgttagtagtctgatcgccacaaatgaagatcatcgacagattctacgtgaaaacaattgcttacagacactactgcagcatttgaagagtcacagccttactattgttagcaacgcttgcgggaccttgtggaatctgagcgctcgcaaccccaaggatcaggaggccctctgggatatgggtgccgtcagcatgctgaaaaaccttatacacagcaagcataagatgatagcaatgggctccgcagccgcgctaagaaacctgatggccaacagacccgcaaaatacaaagacgctaatataatgtcgcccggatcttcactacccagccttcacgtgcgcaaacagaaggctctggaggccgagttggacgcgcagcatctatcagagacattcgacaacattgataatctgtcaccaaaggcaagccatagatctaagcaacgtcacaaacagagcctttacggagactatgtctttgacacaaaccggcatgatgacaatcgctctgataatttcaataccgggaatatgacagtcctgtccccttatctgaacactactgtcttgcctagtagctcttctagcagaggctccttagacagctcccgcagcgagaaagatagatcactggaaagagagcgaggcataggactgggcaattaccatccggccacggaaaaccccggcacatcttccaagcggggcttgcagatctctacgaccgcggcccaaatagcaaaggtcatggaggaggtgtctgcgattcacacttctcaggaagacagaagcagcggcagtaccacagaactgcactgcgtgaccgacgaaagaaacgccctccggcgctcttctgcggcgcacactcattccaatacttacaacttcaccaaaagcgaaaattcgaatcggacctgttcgatgccttatgcgaagttggaatacaaacgctcctccaatgacagcctgaatagtgtttcctctagcgatgggtatggaaaacgtggacaaatgaagccatcaatagagtcctatagcgaggacgacgagtcaaaattttgcagctatgggcagtaccctgcagacctggcccataaaatccacagtgcaaaccacatggacgataatgacggagaactggacaccccaattaattatagtctcaaatattccgatgaacagcttaatagcggcaggcaaagcccttcccaaaatgagagatgggcgaggccgaaacatataatcgaggatgagattaagcaatccgagcagcggcaaagtcggaaccagtctaccacctatcccgtttacaccgagtctacagacgacaaacatcttaaattccagccacattttggacagcaagagtgtgtctctccgtatcgatcaaggggtgctaatgggagcgaaactaatcgcgtcggctccaaccacgggataaaccagaatgtatcgcagagcctctgccaggaggacgactatgaggatgacaagccgacgaactattctgaacgctattcggaagaggaacagcacgaggaagaggaaaggccaactaactactccattaagtacaacgaggagaagcgacatgtagatcagccaatcgactactcactcaagtatgccaccgacatcccctcctcacagaaacagagcttttcattttcgaagtcctctagcggtcagtcgtctaagaccgagcatatgtcaagctctagcgaaaatacctctaccccttcatctaatgctaaacgccagaaccagctacacccaagttcagcccagagccgctccggccagccacagaaggcagcaacgtgtaaagtctcctcaatcaatcaggaaaccattcagacctactgcgtcgaggacaccccaatctgcttctctcggtgcagctctctttccagtttgtctagcgcggaggacgagatcggttgcaatcagaccacacaggaggccgattcggctaacactttgcaaatcgcttag

SEQ ID NO: 13772 - DNA, 2796 bp, synthetic construct
  misc_feature 1..2796: note = Description of Artificial Sequence: Synthetic coding sequence
  source 1..2796: mol_type = other DNA
atggctgaaatcaaggaaaagatctgcgactatttgtttaacgtcagcgacagcagtgcgcttaatctggctaagaacattgggttgactaaagccagagacataaacgccgtgctgatagacatggagcgtcagggtgacgtgtacaggcagggcaccacaccaccaatttggcacctgactgataaaaagagggagcgcatgcagatcaaacgtaacactaatagtgtacccgagactgcacctgcagccattcctgagacaaaaagaaatgctgaatttctgacctgcaatatacctactagtaatgcatcaaataatatggttactaccgagaaggtggaaaatggccaggagccagtgatcaagttagagaaccggcaggaagctaggccagagcctgcccgcctcaagccgcctgtgcactataacggacccagtaaagcaggctacgtggactttgagaacgggcaatgggccactgatgacatccctgacgacctgaactccataagggccgcacccggcgaattccgcgccatcatggagatgccttcgttttactctcacggactgccacggtgctctccgtacaaaaagctgactgagtgccagctgaagaaccccatctccgggttactggaatatgcacaattcgctagccagacttgcgagttcaatatgattgagcagtccgggccacctcatgagcctaggttcaaatttcaagttgtgatcaacggacgtgagttccctcccgccgaagctggcagtaagaaagtggctaagcaagacgccgcaatgaaagctatgacaattttactggaggaggcgaaagctaaagactctgggaaaagcgaagaaagctctcattatagcactgaaaaagagtcagaaaaaaccgccgaatcccagactcctacaccgagtgccacaagttttttttcgggaaagtctcccgtcaccactttgctggagtgcatgcacaagctcggcaactcttgcgaatttcgactattatccaaggaagggccggctcacgaacccaaatttcaatactgtgttgctgtgggggcccagacctttccatccgtaagcgccccatctaaaaaagtcgcgaagcaaatggccgcagaggaagccatgaaggcactacacggagaagctaccaattccatggcttcagacaaccaacccgaaggcatgatcagtgagtctttggataatcttgaaagtatgatgccaaataaagtcagaaagattggggagctggttcgttacctgaatacgaatcccgttggtggtttgttggagtatgcaaggtcacacggctttgccgccgaatttaagttggtggaccagagcggtcccccgcatgaacctaagttcgtctaccaggcaaaagtcggaggtcgatggttccccgcggtatgtgctcactctaagaaacaaggtaagcaggaagcagccgacgccgcgctgagggtgctgatcggtgaaaatgaaaaggccgaacgcatgggcttcacagaagtgacccccgtaaccggcgcctccctacggagaactatgcttctgctctcccgttctcccgaagcacagcccaaaactcttccactgacagggtcaaccttccatgatcagatcgcgatgctgagtcatcggtgctttaataccctgactaactcttttcaaccgtccttgttggggagaaagatcttggcggctattattatgaagaaggacagcgaggacatgggcgtggtggtctccctgggcaccggaaaccggtgtgtgaagggcgattccctatcactgaagggagagaccgtgaacgactgccacgctgagattatttcacggagaggattcattcgctttctctacagcgaattaatgaagtataatagccaaaccgcaaaagattccattttcgaaccagccaaaggaggcgagaaactccagatcaagaagacagtgtcgtttcacctctatatcagtaccgctccttgcggggatggcgcactatttgacaagtcctgtagtgaccgggccatggaatctactgagtctcgacactacccggtgttcgagaatcctaaacaaggaaaactacgaacgaaggtcgagaatggggaaggtacaatccccgtggagtcctccgacattgttcccacatgggatggtattcgcctgggcgagcggctccgcaccatgagttgtagcgataagatactgcgatggaatgttctgggcctgcagggggctctattaactcactttctccagccaatttacctcaaatccgtgaccctcggctatctttttagtcagggccacttgacccgcgcaatatgctgcagggttacacgcgacggctccgcattcgaggacggccttaggcatcctttcatcgtgaatcaccctaaagtgggcagagtgtccatatacgattccaagcgccagagcgggaagactaaagaaactagcgtgaactggtgtctagccgatggttatgatttagaaatcctcgatggcacaaggggaactgtcgatgggccacggaacgagctctctagagttagcaagaagaatatctttcttctctttaaaaagctctgtagttttagatatagacgcgatttgctgcgcttaagctatggcgaggccaagaaagccgcgagggactacgagactgcaaagaattacttcaaaaagggactgaaggatatgggatatggcaactggatctccaagccccaagaagaaaaaaatttttatttatgccccgtgtag

SEQ ID NO: 13773 - DNA, 3681 bp, synthetic construct
  misc_feature 1..3681: note = Description of Artificial Sequence: Synthetic coding sequence
  source 1..3681: mol_type = other DNA
atgaatccccgtcagggctattccctgtcaggatactatacacaccctttccagggatacgagcacaggcagctgcggtaccaacaacctggtcccggcagctctcccagcagtttcttactcaagcagattgagtttttaaaggggcagctgcccgaagcgcccgtgattggcaaacagacacccagtttacccccctccttgccaggtctgagaccccgctttccagtactactggccagctcaacacgggggcggcaggtcgacatcagaggggtgcctagaggcgtccatctcaggtcacagggcctgcagagaggcttccagcatccatcccctaggggtcgctcacttccacagcgaggggtagattgcttgtcttcccattttcaagagctcagtatctatcaggatcaggaacagcggatacttaagttcctcgaagagctgggagaagggaaggctactacagctcatgacctctctggcaagctcgggaccccgaagaaagagataaacagggtcctgtactcgctcgctaaaaaaggcaaactccaaaaagaagccgggacaccacccctctggaaaatcgctgtgtcaacccaggcatggaatcagcactctggagttgtaaggcctgacggacatagccagggcgcacccaatagcgacccttccctagaaccagaagacagaaattccactagcgtatccgaagatctcctcgagccgttcattgcagtgagcgctcaggcctggaatcaacacagtggggtcgtgcggccggactcccatagccaggggtcccctaacagtgatcctggccttgagccggaggactctaattccacaagcgcactggaagatcccttggagtttctcgatatggctgagatcaaggagaaaatttgtgactacctgttcaacgtcagcgattcgtccgctctgaacctggccaaaaacattgggctcacaaaggcccgggacatcaatgccgtgttgattgatatggagaggcagggggatgtgtacagacaggggaccacacctccaatatggcatcttactgacaaaaagagggagcgtatgcagatcaagagaaatacaaacagcgttccagaaacggctcccgctgcaataccagagaccaagcggaatgctgagtttctgacttgcaatatccctacttccaacgccagcaacaatatggtgaccacagagaaagtagagaacgggcaggagcccgtcatcaagctagagaatagacaggaagctcgaccagaaccagccagactcaagcctcccgtgcactataatgggccatctaaggccggctatgtcgattttgaaaacgggcagtgggccaccgacgatattcccgacgatctgaattccataagagccgcgcccggggagttcagagccatcatggaaatgccaagcttctacagccatggtctcccaagatgttcaccatacaaaaaattgaccgagtgccaactcaaaaatccaataagtggtctgctagaatatgctcagtttgcatctcagacctgcgagtttaacatgattgagcagagcgggcccccccacgagccaaggtttaagtttcaggtggtcatcaacggaagggagtttccccctgctgaagccggttctaagaaggtggcaaaacaggacgctgctatgaaagctatgacaatacttcttgaggaggcgaaggcaaaggactctggcaagtccgaagagtcaagtcactatagcacagagaaggaaagcgaaaaaactgccgaatcccagactcctacgcccagtgccacctctttcttctcagggaaaagccccgtaactactctcctggaatgcatgcacaagctggggaacagctgtgagtttaggcttctctccaaggagggaccggctcacgaaccaaaattccaatactgcgtcgccgttggcgcccagacctttccgtccgtgtcagccccttctaagaaggtggccaaacagatggcggctgaagaggcaatgaaagccttacatggcgaggcgactaattctatggcttccgacaatcagccggagggaatgatcagcgaatctctggacaatttggaatcaatgatgcccaacaaggtgaggaaaatcggcgaacttgtgcgttatctgaacacaaatccggtggggggactcctcgaatacgcaaggagccacgggttcgcagccgaattcaaactggtggatcaatccgggccaccccatgagcccaagttcgtctaccaggctaaggttggtggcagatggttccccgcagtgtgcgcacactccaagaaacaggggaaacaggaggcagccgacgcggccctccgcgtgcttattggagaaaatgagaaagccgaaagaatgggctttaccgaagttaccccggtcactggagcctcactgagacgcaccatgctcctgctctccaggagtcccgaggcccagcctaaaactctccctctgacagggtccacattccatgatcaaattgcaatgctgtcccataggtgcttcaacaccctgacaaatagcttccagccttctttgctagggagaaagatccttgcagctataatcatgaaaaaggactcggaagacatgggagtggtggtgagcctgggaacaggcaaccgatgtgtcaaaggtgactctctgagccttaagggcgaaaccgtcaacgattgtcacgccgagataatttcccgccgcggctttatccgtttcctgtactccgaactgatgaagtacaatagccagacagctaaggatagtatcttcgagccagctaagggtggcgaaaaactgcagataaagaaaacagtctctttccatctgtatatctccactgccccatgcggggacggcgccctgtttgataaaagctgttccgacagagcgatggagagcacagaaagtaggcactaccctgttttcgagaatcctaagcaaggcaagttgcggaccaaggtagagaatggggagggaaccatccctgtcgaatcaagcgacattgtgcctacttgggacggcatccggctgggcgagcgattgcgtaccatgagctgcagcgataaaatactgcgctggaacgtgttagggctgcagggggcattactgacccattttttgcagcccatctacctgaagtccgtcaccctggggtacctattctcacagggtcatttaacacgggctatctgctgtagggttacgcgggacggcagcgcctttgaagatggcctgaggcacccctttatcgtgaaccacccaaaagtaggccgtgtgtctatatacgatagcaagcggcagtctggtaagacaaaggaaacctctgtgaattggtgtctggcggatgggtacgatctggaaatcctcgacggaacgcgtgggacagtcgatggccccagaaacgagctgagccgggtaagtaagaagaacattttcctgcttttcaaaaagctttgttctttcaggtataggagagatctactgagattgtcctatggcgaggctaagaaagccgccagggattacgagaccgccaagaactatttcaaaaaaggtcttaaagacatgggttacggaaattggatctccaagccgcaggaggagaaaaacttttatctttgccctgtatag

SEQ ID NO: 13774 - DNA, 3588 bp, synthetic construct
  misc_feature 1..3588: note = Description of Artificial Sequence: Synthetic coding sequence
  source 1..3588: mol_type = other DNA
gggtattctctgtccggatactacacccatccattccaaggctatgaacacaggcagctgaggtaccagcaacctggacctggctcttccccttcttctttcctcctgaagcagatagaatttctgaagggccagctccccgaagccccggttattgggaaacaaaccccctccttgcctccaagcctccctggactccgcccacgctttcccgttctcctggcaagctcaacaagaggccggcaggtggatatccgcggagtccccaggggggtccatctacggagtcagggcctgcagaggggatttcagcacccttctcccagagggcgctctctccctcaacgcggagtcgactgcctgagcagtcacttccaagaactctcaatataccaggatcaggagcagaggatcctgaagttcttggaggagctcggagaaggaaaggccacaacagcccacgacctcagcggcaagttaggaaccccaaaaaaggagataaacagggtgctctacagtctggctaagaaaggaaagctgcagaaagaggcagggacaccacccctctggaagatcgcggtgtctactcaagcttggaatcagcattctggggtcgtgcggcctgacggccactcccaaggtgcacctaattctgatccaagtctggagcccgaagataggaatagcaccagcgtctcagaggacctcttggagccattcatcgccgtcagcgcccaggcctggaatcagcactcaggcgtcgtgcggcccgattcccattcacagggaagccctaacagcgatcccggactcgagccggaggacagcaattcaacttccgcactggaggacccgctggagttcttagacatggcagagattaaggaaaaaatctgtgactatctgttcaacgtgagtgacagtagcgctctgaatttggccaaaaacatcggcctgacaaaggctagagatatcaatgctgtgctgatagatatggagaggcaaggagacgtatataggcagggaactacaccccccatttggcacctaaccgacaaaaaaagggaaagaatgcagattaaaagaaataccaattccgtgccagagaccgcaccagccgctattcccgagacaaagcgaaatgcagagttcctgacatgcaacatacccacctcaaacgcgtccaacaacatggtgacaactgagaaggttgaaaacggccaagagccagtcataaaactggaaaacaggcaagaggcccggcctgagccggcccgactaaagccacccgtgcactataatggtccaagtaaggctggatacgtcgatttcgagaacggacagtgggctacagacgatatccctgatgacctgaactcaattcgcgcagctcccggtgaattccgtgctattatggagatgccgtcattttactcacacggattgccaagatgcagcccttacaaaaaattgacagaatgtcaactgaaaaatccaattagcggactcctggagtatgctcagtttgcatcccagacatgcgagtttaatatgattgagcaaagcgggccccctcatgaaccacgcttcaagttccaggtcgtcatcaatggacgagaattccctcccgctgaggccgggtcaaagaaggtggccaagcaggatgccgctatgaaagccatgactattctgctggaagaggctaaggcaaaggacagcgggaagagcgaggagagctcacattatagcaccgaaaaggaatccgaaaaaaccgccgagtcccagacgccaaccccatcagctacctcctttttttcaggcaagtcacctgtgaccacactcttagagtgtatgcataaacttggaaattcctgcgaattcaggctgctcagtaaagagggtcccgcacacgagcccaaatttcagtactgcgtggctgtgggagcacagaccttcccctctgtctcagctccgagcaaaaaagtcgccaagcagatggcagctgaagaagcgatgaaagccctccacggcgaggccacaaacagcatggcttctgacaaccaaccagaaggaatgatatcggagtcgctggataacctggaaagtatgatgcctaataaagttagaaagatcggagaactcgtcagataccttaacaccaatcctgtgggtggacttttggagtacgcacggtcccatggcttcgcggcagaatttaagctggtcgaccaaagtgggccaccccatgagcctaagtttgtctatcaggccaaagtaggtggacgttggttccctgcggtctgtgcacacagcaagaaacaaggtaaacaagaggcagccgatgccgcactgagagttctgatcggggaaaacgaaaaggcagaaagaatgggcttcacagaactcccactaactggatccaccttccacgaccagatcgccatgctgagccaccgatgctttaataccctaaccaattcctttcagccaagcctgctgggtaggaagatactagccgctattattatgaagaaagacagcgaggacatgggtgtagtggtcagccttgggaccggaaatagatgcgtgaagggcgactcactaagccttaagggtgagacagtgaacgactgccatgccgaaatcatcagtaggcgcggcttcattcggttcctgtatagcgaactcatgaaatacaattcccagaccgcaaaggacagtatctttgagccagccaagggaggcgagaaattgcagattaaaaaaactgtgagtttccacttgtatatttccaccgcaccctgcggcgatggcgctttgttcgacaagagctgctctgacagagcgatggaaagtacggaatcccgacactatcctgtatttgaaaatcccaaacagggcaaattgcggacaaaagtagaaaatggagagggtactatccccgttgagagtagtgacatcgtcccgacctgggatgggattcgcctgggggagcgtcttaggaccatgtcatgttccgataaaatcctgagatggaacgtgctcggactgcagggcgccttgctgacccacttcctacaacccatctacctgaagtccgtcacgctcggatacctgttcagccagggccatctgacccgggccatctgttgccgagtcactcgcgacggttcagcgtttgaggatggactgcggcacccgtttatcgtcaaccatcctaaggttggaagggtctccatctacgacagcaaacggcagtcagggaagacaaaggagacctctgtcaattggtgtctcgccgatgggtacgatcttgagattctggacgggacacggggaactgtcgatggccccaggaacgaactctccagggtatccaaaaaaaacatattcctcctgtttaagaagctgtgttccttccggtaccggcgagacctgctgcgactctcttatggcgaggccaagaaagctgcccgggactatgaaactgcaaaaaattattttaaaaagggtctcaaggacatgggttatggcaattggataagtaaacctcaggaggagaagaacttttatttatgccccgtttag

SEQ ID NO: 13775 - DNA, 528 bp, synthetic construct
  misc_feature 1..528: note = Description of Artificial Sequence: Synthetic coding sequence
  source 1..528: mol_type = other DNA
atggggaaggtcctgtccaagatcttcggcaacaaggagatgagaatcctaatgctcggcctggatgcagccggtaagactacaatcttatataagttgaaactgggccaatctgtcacaacgatccctactgtcggatttaacgtcgagaccgtcacctataaaaatgtgaagtttaatgtatgggatgttggggggcaggataagattcgccccttgtggagacactactataccggtacacagggactgatatttgtggtggactgcgcagatcgtgaccgtattgacgaagccagacaggaacttcaccgaattatcaacgatagggagatgagagatgctattatcctgatattcgccaataaacaggacctccccgacgccatgaaacctcatgaaattcaggaaaagttgggtctcacccgcatcagggacaggaattggtatgtacagccaagctgtgctactagcggcgatggtctctatgaaggtctgacctggctgacgtctaactacaaaagttag

SEQ ID NO: 13776 - DNA, 1398 bp, synthetic construct
  misc_feature 1..1398: note = Description of Artificial Sequence: Synthetic coding sequence
  source 1..1398: mol_type = other DNA
atgttcagacaagaacagccgttggctgaagggtcctttgcgccaatgggcagcctccagccggacgccggtaatgcatcctggaatggaaccgaggcccctggcggcggcgcccgggccacgccatatagcctacaagtcactttaaccctggtctgcctggccgggttgctgatgttgcttaccgtgtttgggaacgttttagttatcatcgccgtctttaccagccgtgccctcaaagccccacaaaatttatttctggtctctctggccagcgccgatatattggtagcaacgcttgtcattcccttctccctcgcaaatgaggtgatggggtactggtattttggcaaagcgtggtgcgaaatctaccttgcccttgacgttctgttctgcacatcatcaatcgtccacctgtgcgccatcagcctcgaccggtactggagcattacccaggcaatcgagtataacctgaagcgaaccccacgacgaattaaagcaattattatcactgtctgggtgatcagtgccgttattagtttcccccctcttataagtattgagaaaaaggggggcgggggcggtccacagccagctgaaccacgttgcgagatcaacgaccaaaaatggtatgtgatctcctcctgtatcggatccttcttcgctccatgcctcatcatgattttggtgtacgtgagaatttaccagattgctaagagaagaactagggtgccaccgtccagacgcggcccagacgccgtagccgctcctccgggcgggacagaacgtaggccaaatggtctgggtcccgaacgaagtgctggccccgggggcgctgaagccgagcccctcccaacccagcttaatggggcacccggagaaccggcacccgccggaccacgagacaccgacgctctcgacctggaggaaagcagttcatccgatcacgctgaacggcctccagggccacggcggcctgagcgtggcccccgtggcaaaggcaaagccagagcaagccaggttaagcccggcgattctcttcccagaaggggcccaggggctacagggattgggacgcccgccgcggggccaggggaggagcgcgtgggggcagcgaaggcgagccggtggaggggccgccagaacagggaaaagcgcttcactttcgtcctggccgtggtaataggggtgttcgtggtgtgttggtttccattcttttttacctacacgcttacagccgtcggctgtagcgtccctagaaccctatttaagtttttcttttggttcggttactgtaatagctctctgaaccctgtcatatacaccatttttaatcatgacttccggcgcgcttttaagaaaatcttgtgtcgaggggatcggaaacgtattgtgtag

SEQ ID NO: 13777 - DNA, 285 bp, synthetic construct
  misc_feature 1..285: note = Description of Artificial Sequence: Synthetic coding sequence
  source 1..285: mol_type = other DNA
atggcccccctgaagatgctggcactcgtaacccttttgctcggagccagtctccagcatatacatgccgcccgtggaactaatgtgggaagggaatgctgcctggaatactttaaaggagccatcccccttagaaaattaaagacttggtaccagactagtgaggactgctccagggacgccatagtgttcgtgaccgttcaaggtcgagccatttgtagtgaccctaataataaacgtgtgaagaacgcagtgaagtatctgcaatccctggagcgtagctag

SEQ ID NO: 13778 - DNA, 1635 bp, synthetic construct
  misc_feature 1..1635: note = Description of Artificial Sequence: Synthetic coding sequence
  source 1..1635: mol_type = other DNA
atgccggggaggtgccagtctgacgctgcaatgagagtgaacggccctgctagccgcgccccagcaggctggacatctggcagccttcataccggcccgcgggccggcaggccaagagcccaggccagaggcgtgcgcgggcggggtctgctcttaaggccacggccagcgaaggagctcccactccccagaaagggaggtgcctgggcccctgccggcaaccctggtcctcttcaccctctgggagtcgccgtgggaatggccggatccggacgactggtcctacggccctggattcgcgagttaatcctcggaagtgagacaccctccagccctagagctggacagctgctagaggtactccaggacgccgaggccgctgtcgcgggcccgtcccacgcacccgatacctctgacgttggtgccaccctgctcgtgagcgacggcacccatagtgttagatgcctagtcacgagagaagcattagatacgtcagactgggaggaaaaggaatttggattcaggggaaccgaaggacgtctgttgctgctccaggattgcggcgtacacgtgcaggtagccgaagggggagctcccgccgagttctacctgcaagtggatagattttctcttctgcctaccgagcagcccagactccgggtaccaggctgcaaccaggacctggacgtccagaaaaaactgtacgactgtcttgaggaacacctgtctgaatcgacctcgtcgaacgccgggctgagtctcagccagctcttggatgagatgagggaggaccaggaacaccagggagcgttagtgtgcctggcagaaagctgcctcaccttggaaggcccatgtacagccccgcctgttactcattgggccgcctcccgttgtaaagccacgggcgaggctgtctatacggtgcccagttctatgctgtgtatttccgagaatgaccagctaatcctgtcctctctgggcccctgccagcgcactcagggtcccgaactgccaccccccgatcctgctctccaggatctgtccctcacattgatcgcgagtccaccgtcctcgccctcatctagcggaacacccgcacttcccggccacatgagcagcgaggagagtggtacttctatcagtttactaccggccttatctctggcggcgcctgatcccggccaaagatccagctctcaaccctcccctgccatttgttcggcgcccgctactctgacgccacggtccccccacgcctctagaaccccctcatctcccttgcagtcctgtacccccagcctctcccctagatcccacgttcccagcccacaccaagctctggtgactcggccgcagaagccatctctggaatttaaagaatttgttggcctaccctgcaaaaatcgccctcccttcccccgaaccggggccactcggggcgcccaggagccctgctccgtgtgggagccacctaaacgacacagagatgggagtgcttttcagtacgaatatgagcctccttgcaccagcctatgcgcgagggtgcaggcagtgaggcttcctccacagctcatggcatgggccctccacttccttatggatgcacaacccggatctgagccaaccccaatgtag

SEQ ID NO: 13779 - DNA, 558 bp, synthetic construct
  misc_feature 1..558: note = Description of Artificial Sequence: Synthetic coding sequence
  source 1..558: mol_type = other DNA
atgaagctggtctctgtggctctcatgtaccttggtagcctagccttcctgggagctgatactgccagactagacgtcgccagcgaattccgcaagaaatggaacaagtgggctctctcccggggaaaacgtgagcttcggatgagctcctcatatccgactggcctcgcagacgtgaaggcaggaccggcacaaacgctcattcgcccccaggatatgaagggggcgtccaggagccccgaggatagcagccccgacgccgctcgcattagagtaaagagatacaggcagtctatgaataattttcaaggcctgagaagtttcgggtgcagattcggaacctgcaccgtgcagaagttggcccatcagatttaccaattcaccgacaaagataaggataatgttgcccctagatccaaaatctcaccccaagggtatggccgccgccgcagaagatcattaccagaggccggaccaggcagaacactcgtgtcctccaaacctcaggctcacggtgcaccagcacccccttctggttcagccccacactttctgtag

SEQ ID NO: 13780 - DNA, 558 bp, synthetic construct
  misc_feature 1..558: note = Description of Artificial Sequence: Synthetic coding sequence
  source 1..558: mol_type = other DNA
atgaagctcgtatcagtagcactgatgtacctgggcagtttggcgtttcttggcgccgacaccgcacggctcgatgttgcctctgaatttagaaaaaagtggaataagtgggcgttgagtagaggcaagagggagctgcgtatgagttccagttaccctaccgggttggccgacgttaaagctggacccgctcagactctgatccgccctcaagacatgaaaggcgcctcgcggtcaccggaggactccagtcccgacgctgctcgaattcgggtcaaacggtatcggcagtctatgaataatttccaggggctgcgcagctttgggtgcagattcgggacgtgcacagtccaaaagctggctcaccagatttatcagttcacggataaagacaaagacaacgtcgctccccggtctaagataagcccccagggttatggacggaggagaagaagatcattgcccgaagccgggccaggccgaacactggtgtcttctaagccacaggcccacggggcaccggctcccccgagcggcagcgcgccacacttcctatag

SEQ ID NO: 13781 - DNA, 558 bp, synthetic construct
  misc_feature 1..558: note = Description of Artificial Sequence: Synthetic coding sequence
  source 1..558: mol_type = other DNA
atgaagctggtgagcgtcgctctgatgtacctcggctctttggccttcttgggggcagataccgcccgcctcgacgtcgccagtgaattccgaaagaagtggaacaaatgggccctctcacgggggaagcgcgagcttcggatgagctcctcctatcctactggactcgcagatgtcaaggctgggcctgcccagaccttgatcagacctcaagatatgaagggggcgtccaggtcaccagaagacagctcacctgatgctgctcgcatccgggtgaagcgatacagacagtctatgaacaacttccagggcctgcggagtttcgggtgtcgctttgggacttgcaccgttcagaaacttgcgcaccagatatatcagtttacagacaaggataaagataacgtcgcccctcggtctaaaataagtccgcagggatatgggcgaagacggcgacgcagtctgccagaggctggccctggcagaaccttggtctcctccaagccacaggctcatggagctccagccccaccttcaggctccgcccctcatttcctatag

SEQ ID NO: 13782 - DNA, 702 bp, synthetic construct
  misc_feature 1..702: note = Description of Artificial Sequence: Synthetic coding sequence
  source 1..702: mol_type = other DNA
atggcagcaggtactgctgtgggggcttgggttctcgtgcttagcctgtggggcgcagttgtgggcgctcaaaacataaccgcccgaataggcgaacctctcgtgctgaagtgcaaaggcgctcccaaaaagcccccccagcgcttggagtggaagctgaataccggaagaacagaagcctggaaagtcctgtcgcctcagggaggcgggccgtgggacagcgtggcccgtgtcctgccaaactcttctttattcttgccagccgtgggcattcaggacgaggggatattcaggtgtcaggctatgaataggaatggcaaagaaaccaaaagcaattatagagtaagagtctaccagattccaggcaagcccgaaatagtggattccgcttccgagctcacagctggcgtgccgaataaggtggtcgaggaaagtagaagatcccggaaacggccatgtgaacaggaagtcgggacttgtgtaagcgaaggatcttaccccgccggcacactgtcctggcacctggatggcaaaccactggttccaaacgaaaaaggggttagtgtgaaagaacagaccagacgccatcccgaaactggcctgtttacccttcagagcgaactaatggtcacccccgcgcgggggggggacccacggcctacatttagttgtagcttctcacccggcttaccaaggcactag

SEQ ID NO: 13783 - DNA, 1029 bp, synthetic construct
  misc_feature 1..1029: note = Description of Artificial Sequence: Synthetic coding sequence
  source 1..1029: mol_type = other DNA
atggctgcggggacagccgtgggggcctgggtgctggtattgtctctttggggcgccgttgtcggagcccagaacatcacggcgcgaataggggagcccctcgtgctgaagtgtaaaggcgcccccaagaagcctcctcagcgattggagtggaaactagggggtggcccttgggactctgtcgctcgagtgcttcccaattcatcccttttccttcctgctgttggcattcaggacgaaggaatctttaggtgtcaggccatgaaccgaaatgggaaagagacgaaatccaattacagggtgagggtctaccaaattcccgggaagccagagattgtagactccgccagtgagctgacggccggtgttcctaataaagtgggcacctgtgtgtccgagggctcttatcccgctggcacattgtcctggcatcttgatgggaaaccactggtccccaatgagaaaggcgtctccgtgaaggaacagacccgtaggcacccagaaacgggattattcaccctgcagagcgagctcatggtaacacccgcaaggggcggcgaccctcgtcccaccttttcatgctcattctctcccggattaccccggcatcgagccctgcggaccgcaccaatacagccacgcgtatgggagcctgtccctctggaggaggttcagcttgtggtcgaacctgagggcggagctgtggctccaggaggaacagttacccttacttgcgaggtgccagcccagccgagcccacagatccactggatgaaggacgtttccgacctggaaaggggagccgggcgaaccagacgcggcggagcaaactgtaggttgtgtggtcgaatccgggccggcaactcatcccccggtccaggcgatcctgggagacctggtgatagtcgaccagcccattggggccatctggtggcaaaagccgcaactccccgcagaggagaggagggcccacgcaaacctggcggaagaggtggggcgtgtcgaactgaatccgtgggcggcacgtag

SEQ ID NO: 13784 - DNA, 1044 bp, synthetic construct
  misc_feature 1..1044: note = Description of Artificial Sequence: Synthetic coding sequence
  source 1..1044: mol_type = other DNA
atggctgcaggtaccgcagtgggggcttgggtattggtattaagtctgtggggggccgttgtgggcgcccagaatataacagctcggataggcgagcccctcgtactgaagtgcaagggtgctcccaaaaagcctccacagcgactagaatggaaactgaacacaggccggacggaggcctggaaagtcttgtcgccacagggcggtggtccctgggactcagtcgcccgcgtgctgccgaactcctccttgttcctgccagcagtgggcattcaagatgagggcattttccgttgtcaggcgatgaataggaatggtaaggagacaaaatcaaattacagggtgagggtttatcaaataccagggaaacccgaaattgtagactcagcaagtgaactcaccgctggcgtgcctaataaagtcggaacttgtgtgtccgagggctcctatccagccggcacactttcttggcatctggatggaaagccgcttgtgcccaacgaaaagggagttagcgtcaaggaacaaacaaggcgtcatcctgagactggtttgtttaccctgcagagtgaattaatggttacccccgctagagggggggatcccagaccaacgttttcctgttccttcagcccaggactacccagacaccgtgcactgcggacagcccctatccagccccgggtatgggaacctgtgcccctggaagaagttcaactggtggtggaaccagaaggcggagccgtcgcgcccgggggaacagtgactctgacatgcgaagtgcccgcccagccatctcctcagattcactggatgaaagatggggtcccactacctctgccaccttccccggtactgatcctgcctgagattggaccacaggaccaggggacatattcttgtgtcgctacccacagtagccacggtcctcaggagtcccgagccgttagtattagcatcattgagcctggcgaggagggtcctacggcaggcgagggatttgacaaggtgagagaggccgaggactctccacagcacatgtag

SEQ ID NO: 13785 - DNA, 1215 bp, synthetic construct
  misc_feature 1..1215: note = Description of Artificial Sequence: Synthetic coding sequence
  source 1..1215: mol_type = other DNA
atggccgccggaacagccgtcggggcatgggtgctcgtgttgtccctgtggggcgccgtggttggggcccagaatattaccgcacgcattggggaacccttggttctgaagtgcaaaggagcgccaaagaagcccccccaaagattggagtggaaactcaacactgggcgcaccgaggcttggaaggtcctgtcaccacaagggggaggaccttgggactccgtggcaagagtcttaccgaactcctctctctttctcccggccgtgggcatacaggacgaaggaatctttagatgccaggcgatgaacaggaacgggaaagagaccaaaagcaattacagagtgcgggtgtaccagatcccaggaaaacccgagatcgtagattccgcctcagaattgactgcaggcgttccaaacaaggtgggaacatgcgtatcggagggatcgtatccggctggcaccctgtcctggcacctcgacggcaagcctcttgtgcctaacgagaagggagtgtcagtcaaggagcaaacacggcggcatcccgagaccgggctgttcacactgcagtccgaactcatggtcacacctgcaagaggcggcgaccccagacctacatttagctgttcattctctcctgggttgccaagacatcgggcgctgagaacagccccaatacaacctcgcgtttgggagccagtgcccctggaagaggtgcagctagtggtcgagcccgagggaggggctgtcgccccagggggaaccgtgactttgacctgcgaagtgccggctcaaccaagtccccagattcattggatgaaggatggcgtccccctcccccttcctcctagtccagtgctgatattgcccgaaatcggcccccaggaccagggcacttatagctgcgtcgcaacacacagctctcatggtccccaagagtcccgtgcagtgagcatatcaattattgaacccggcgaggagggcccaactgccggttcagtaggaggctcaggactgggcaccctcgctctcgcgctcgggattctgggaggattaggtacagccgccctgttgatcggagtgattttgtggcagcgacggcagcgccgcggagaagagcgcaaagccccggagaaccaggaggaggaggaagaaagggctgagctcaaccaatctgaggaacctgaggctggagaatcctcaacaggagggccttag

SEQ ID NO: 13786 - DNA, 705 bp, synthetic construct
  misc_feature 1..705: note = Description of Artificial Sequence: Synthetic coding sequence
  source 1..705: mol_type = other DNA
atggccgctgggacagcggtgggggcctgggtgctggtcttatcgctctggggagcagtggtgggtgcccagaacataaccgcaaggattggtgagccactcgtgctgaagtgcaaaggagcaccaaaaaaacctcctcagcgactggagtggaagctgaacaccggaagaacagaggcgtggaaggtactgagcccccaaggcggggggccatgggacagcgtggctcgtgtattgcccaatagcagcctcttcctccccgctgtcggcatccaggacgaggggatttttcggtgccaagctatgaatcgtaacgggaaagaaactaagtccaattacagatccctacggacctttacaatcacggccagcgattggatcttccccccaagcgaaataccgggcaaaccggaaattgtagactccgcctcggagctcacagcaggagtgcctaataaagttggaacttgtgtgtctgaggggtcttatccggctggaacgttgtcatggcacctagacggtaagccactggtccctaacgagaagggcgtcagcgtgaaggagcaaactcggcgccatcccgagacggggttgtttacgctgcaatctgagctgatggtcacaccggcccggggaggcgatccccgtcccacattcagctgctcttttagccctgggctgcctcgacacagggcactccgctag

SEQ ID NO: 13787 - DNA, 402 bp, synthetic construct
  misc_feature 1..402: note = Description of Artificial Sequence: Synthetic coding sequence
  source 1..402: mol_type = other DNA
atgaaagacggggtcccgctgccactgccacccagccctgttctgatcttgccagaaatcggaccacaggaccagggtacttattcctgtgtggccactcatagtagccatggtccacaggaatctcgggctgtcagcatcagtattattgagcctggtgaggaagggcctaccgccggctctgtgggcgggtccggactcggcactctggccttggctttggggatcctaggtggtcttggcacagcagccctgctcataggcgtgatcctgtggcagcgtaggcagcgcaggggagaggagagaaaagctccagagaaccaagaggaggaggaggaaagggcagaactgaaccagagtgaagaaccggaggctggggaaagtagcacgggagggccatag

SEQ ID NO: 13788 - DNA, 1308 bp, synthetic construct
  misc_feature 1..1308: note = Description of Artificial Sequence: Synthetic coding sequence
  source 1..1308: mol_type = other DNA
atgggagctggagaaagagttcaggcacctccacgcgcggaagcaacagctgggagaggcgcagaccgcgcacgtacgttagaaggctctagaatggccgccggaacagcagtgggggcgtgggtgctcgtccttagtctgtggggtgctgtggtgggggcccaaaacattacagcccggataggtgagcctttagtgctgaagtgtaagggagcacctaaaaagccgccccagcgtcttgaatggaagcttaatacaggccgtaccgaagcatggaaagtactgtccccccagggagggggaccttgggattctgtcgccagagtgttgcccaattcaagcctgtttttgcctgccgttgggattcaagatgagggtatctttcgctgtcaggctatgaacaggaacggaaaagagacaaagagcaactacagagtaagggtgtatcagattcccggaaagcccgaaatcgtagacagcgccagcgaattaacagctggagtgcccaacaaggtaggtacatgtgtctcagagggatcttaccctgccggcacactgtcctggcatctggatggaaagccattggttcccaacgagaaaggcgtatccgtaaaagagcagacgcgtcgtcatcctgaaaccgggttattcaccctgcagtcagagttgatggtgactcccgcccgcggcggtgatcctcgcccaacattcagctgttcattctctccaggactgccacggcaccgagctctgcgcaccgcgccaatacaaccgagagtttgggaacccgttccactggaagaggtgcagctggtggtagagccggaggggggggccgtggcaccgggcgggacagtcaccctgacatgcgaagtccccgcccaaccttctcctcagatccactggatgaaagatggcgttccgctgcccctccccccctcaccagtgctgatcctgccagaaataggaccccaagaccagggtacatactcttgcgtcgccactcatagcagtcatggtccacaggagagcagagctgtctcaatcagtattattgagcccggcgaagaaggacccactgccggcagcgtaggcggcagcggcctggggactctcgccctcgccctgggaatcctcgggggattaggcaccgctgccctgctgattggcgtaattttgtggcagagacgccagcggagaggcgaggagagaaaagcacctgagaaccaagaagaggaggaggagcgcgccgagctaaaccagtcagaggagccagaagccggagagagctctacagggggaccctag

SEQ ID NO: 13789 - DNA, 387 bp, synthetic construct
  misc_feature 1..387: note = Description of Artificial Sequence: Synthetic coding sequence
  source 1..387: mol_type = other DNA
atggccgcgggaaccgcggtgggtgcctgggtgctggtgctgtctctatggggggcagttgtcggcgcacagaatatcactgccaggatcggcgaacctttggtcctgaaatgcaagggtgcaccaaagaagcctccacaacgactggagtggaagctcaacacaggccgaaccgaggcatggaaggtgttgtccccacagggcgggggtccgtgggatagtgtcgccagggttctccctaatagctcgctgtttctgccagccgtgggaatccaagatgagggaatcttcagatgtcaggcgatgaacaggaatggaaaagagaccaagagcaattacagagtgagagtgtaccaatttgagaacctccataattattcgttgtag

SEQ ID NO: 13790 - DNA, 462 bp, synthetic construct
  misc_feature 1..462: note = Description of Artificial Sequence: Synthetic coding sequence
  source 1..462: mol_type = other DNA
atggcagccggcacagcggtgggtgcatgggtactggtgttgtctttatggggcgctgtagtgggcgcccagaatatcacggcacgcattggcgagcccctcgttctaaaatgcaagggcgcaccaaaaaaaccaccgcagagattggaatggaaactgaacacaggtagaaccgaggcttggaaggttctgtcaccccagggtggtggtccctgggactctgtggcccgtgtcctgcccaatagctctttatttttgcctgcagtgggtatccaagacgaggggatacttggtgggctggggactgcggcgttactcatcggggttattctgtggcagagacggcagaggagaggcgaagaacgaaaggcccccgaaaatcaggaggaggaggaggagagagccgagttgaaccagtcagaagagccggaggccggcgagtcctccacaggaggaccgtag

SEQ ID NO: 13791 - DNA, 885 bp, synthetic construct
  misc_feature 1..885: note = Description of Artificial Sequence: Synthetic coding sequence
  source 1..885: mol_type = other DNA
atgaacagaaacggcaaagaaacaaagtccaactatagagtgcgggtctaccagattcctggaaagcccgagatcgtggatagcgccagtgagcttaccgcaggcgtgcccaataaggtcggcacatgcgtgtctgagggatcttacccggccggaactctgagctggcacctcgacggaaagccactggtccccaatgaaaagggtgtctctgtcaaagaacagacccgcaggcacccagagacagggctgtttacgcttcaaagcgaacttatggtgactcctgcccgcgggggtgacccacggccgaccttctcctgctccttttctcctggccttccacgccatagagccctgcgaaccgcacctattcagcctagggtgtgggagcccgttcccttggaggaagtgcaactggtcgtcgaaccagaagggggcgccgtagcccctggcggtacagtcaccctaacctgcgaagttcctgcgcagccctcacctcagattcattggatgaaggacggcgtaccccttcctctgcctccaagtccggtattgatcttacctgaaataggacctcaggatcaggggacttactcctgtgtggctacgcactccagtcatggcccccaggagtcccgggccgtgtccatttctattattgggtcagttggcggaagcgggttggggacactcgcccttgctctgggcattctcggggggctgggcactgccgccctgctgattggagttattctctggcagcggcgtcagcgacgcggtgaggagcgtaaagcacctgagaaccaagaggaggaggaggaaagggccgaactgaatcagagcgaagagccggaggctggggagtcatccacgggaggaccatag

SEQ ID NO: 13792 - DNA, 366 bp, synthetic construct
  misc_feature 1..366: note = Description of Artificial Sequence: Synthetic coding sequence
  source 1..366: mol_type = other DNA
atggcggccggtactgcagttggtgcttgggttctggttctctcgctgtggggagccgttgttggtgctcagaatattacagcccggattggggaacccctcgtactcaagtgtaagggcgcgcccaagaaacccccccaacgcctggagtggaagttgaacaccgggcggacggaggcttggaaagtattatcaccacagggagggggtccctgggactctgtcgctagggtacttccaaactcatcacttttcctgcctgccgtcggtattcaggacgagggaatcttccggtgccaggccatgaaccgtaacgggaaagagaccaagagcaattggtggtggagccaaaaggtggaacagtag

SEQ ID NO: 13793 - DNA, 1092 bp, synthetic construct
  misc_feature 1..1092: note = Description of Artificial Sequence: Synthetic coding sequence
  source 1..1092: mol_type = other DNA
atggctgctggcaccgcggttggggcatgggtgctcgtgctgtccctgtggggcgcagtcgttggcgcccagaacattaccgcacgcataggggagcctctcgtgcttaagtgcaagggtgcccccaagaaacccccccaaaggttagagtggaaactgaacactgggcgtacagaggcgtggaaagtgttgtccccacaggggggggggccctgggactccgtggcaagggtgctcccgaatagcagcttgtttctgcccgcagtggggatccaggatgaggggatctttaggtgtcaggccatgaatcggaatggaaaggagaccaaatccaactatcgagtgcgcgtctatcagatcccgggaaagcccgagatcgtcgatagcgctagcgaactgactgcaggcgtgccaaataaagtggtggaggagagtcgccgcagcaggaaacgaccctgtgagcaagaagtaggaacttgcgtaagcgaggggtcataccctgctggtaccttgtcatggcacctggatggaaagcctctggtgcctaatgagaaaggggtgtctgtcaaggagcagaccaggcgccatcccgagacggggcttttcacgctgcaatctgaactgatggtgacccctgctcgcgggggagaccccagacccacctttagttgttctttttcaccgggtctccctcggcacagagcactccgcacagcccctattcaaccccgcgtttgggagcccgtgcccctcgaggaagtacaattggtagtggaaccagagggcggtgctgtcgcaccgggaggtacagtaacccttacttgtgaggttccggcccagccaagtcctcagatccattggatgaaggatggggtgcccttacctttacccccatctcccgtgcttatcctcccggagatcggccctcaggatcaggggacatattcttgtgtggccacccactcatctcacggcccacaggaaagccgggctgtgagcattagtatcattgagcctggggaggaaggacctactgccggtgaaggatttgacaaagtgagggaggcagaggattctccccagcatatgtag

SEQ ID NO: 13794 - DNA, 3633 bp, synthetic construct
  misc_feature 1..3633: note = Description of Artificial Sequence: Synthetic coding sequence
  source 1..3633: mol_type = other DNA
atggcagcccagtccagtctgtataacgatgaccgcaacctgctacggattcgcgaaaaggaacgacgtaatcaggaagctcatcaggaaaaggaagccttcccggaaaagatccccttgttcggagagccatataaaaccgccaaaggcgacgagctgagctcccggattcagaacatgctgggcaactacgaagaagtgaaagaattcctcagcaccaaatcacacacacatcggctcgatgctagcgaaaatcggttaggaaaaccaaaatatcccctgatccccgataaaggaagcagcatcccctcgtcatcctttcacaccagtgtgcaccatcagtccatccacacgcctgcaagcggccctctttctgtgggaaatatttcccataatcctaagatggctcagccccgtactgaaccaatgccttcccttcatgccaaatcctgtggcccccctgacagtcagcacttgacgcaggaccgtcttggccaggagggctttgggtcatcccaccacaaaaagggagatcggcgggcggacggagaccactgcgccagcgtgaccgactctgccccagaacgggagttgtcacccttgattagtctcccgtctcctgtaccgcctctcagccccatacactctaatcaacaaactctgccaaggacgcaaggctcaagcaaggtccacggcagctcaaataacagcaagggctattgtcccgctaaaagcccaaaagatttagctgtgaaggtgcacgataaagagactccccaggattccctggtggcacccgcacagcccccgagtcagacttttccccctccaagcctcccctccaagtcagtggccatgcagcagaagccaaccgcctacgtaagaccaatggacgggcaagatcaagcaccttcagagagtcccgaattgaagccactgccagaagattatcgccaacagacgttcgaaaaaaccgatctcaaagtgccagccaaggcgaaactgaccaagttgaagatgccctctcaatctgtcgaacagacttacagcaacgaggtgcattgcgttgaggagatcctgaaggaaatgactcatagctggccgcctcccctgacagctattcatactccgtccacagctgaaccatccaagttcccctttccaaccaaggactctcagcatgtgagctctgtcactcagaatcagaagcagtatgacacgtcttctaagacacatagtaatagccagcaaggaactagtagtatgttggaagatgacctgcagctcagcgattccgaggatagcgactccgaacaaactccagagaagccaccatcttcctcagctccaccaagtgcgcctcagagcctgccagagcccgtggcaagcgcacattcaagttcggccgagtccgagtccacttcagactcagatagcagctcagactcagaaagcgagtcttcatccagcgattcagaagaaaacgagccactcgagactccagccccggagcctgagcctcctacgaccaacaagtggcagctggataactggctgaccaaggtgagccagccggctgctccacccgaggggccacggtcaactgaacccccgagaagacatccagaaagcaagggctctagtgactctgccacctcacaggagcacagtgaaagtaaagaccccccccccaagtccagctctaaggctcctcgagcccctccagaggcaccccatccaggaaagaggtcctgccagaagagcccggctcagcaggaacctccacagagacagacggtgggcactaaacaaccgaaaaaaccagtcaaggccagtgcccgcgccggcagtaggacttctctgcagggtgagagagagcctggcctgcttccttatggcagccgagatcaaacctctaaggacaagcctaaagtgaagaccaagggcagaccgagggcagctgcaagtaacgaacctaagccagcagtacccccctcaagcgagaagaaaaagcacaaatcttccctgcccgcgccaagtaaagcccttagcggaccagaacccgccaaggacaatgtggaggatcgcaccccagagcatttcgccttggtgcctttaacagagtcacaaggtcccccgcacagcggttccggctctcgcacaagcggctgtcgccaggcagtagttgtccaggaagactcgcgaaaagatcgactccctctgcccttgagagataccaaactgctcagccctcttagggacacaccaccaccgcagtccttaatggtcaaaataaccctggatctgctcagccggattccacaacctcccggaaaaggttcacggcagaggaaagccgaggataaacagccccctgcggggaaaaagcatagtagcgaaaagaggtccagcgactcgagtagcaagctggccaagaaaaggaagggagaagccgagagggactgtgacaataaaaaaatccggctggagaaagagatcaaatcacagtcctcatcttcttcctcaagccataaggagagctctaagactaagccaagtagaccttcttctcaaagtagcaagaaagaaatgctccctcctcctccagtaagctcaagctcccagaagcccgctaaacctgcgctcaaacgcagtcgccgagaagctgatacgtgtggccaggaccccccgaagtccgctagttctaccaagagtaatcataaagactccagcatccccaaacagaggagggtcgaaggcaaaggatcacgctcttcaagcgagcacaagggctcctcgggagacacagctaatccatttccagtcccaagcctgccaaatggtaactcaaaaccaggcaagcctcaggtcaaattcgataaacagcaggcagatctgcacatgcgtgaggccaaaaagatgaagcagaaggctgagctcatgaccgatagagtgggaaaagcttttaagtatctggaagcagttttatcctttatagagtgcggtatagccaccgagagcgaatcccagtcctctaagtccgcttactctgtctatagcgagaccgtggatttgattaagttcattatgtccctcaaatccttctccgatgcaacagcacccactcaagaaaagatttttgccgtcctgtgtatgcgctgccagagtatacttaacatggccatgttccgctgtaaaaaggacattgcaataaaatactcaaggacacttaacaagcattttgagtcatcatcaaaggtagcccaggctcctagtccgtgcatcgcttctactggcaccccttcgccattgtctccaatgccttctcctgcctcctcggtgggatcgcagtcatccgccggcagtgtgggttcctcaggagtggccgcaacaatttcaacccccgtgaccattcagaacatgacctctagctacgtcaccatcacatcacacgttctgacagcttttgatctgtgggagcaagcggaggcattgactagaaaaaataaggagttctttgcccgactcagcactaacgtttgcacgctcgccctaaacagtagcctggttgatctcgtgcactacacacgtcagggctttcaacagctgcaggagttaaccaagaccccctag

SEQ ID NO: 13795 - DNA, 1266 bp, synthetic construct
  misc_feature 1..1266: note = Description of Artificial Sequence: Synthetic coding sequence
  source 1..1266: mol_type = other DNA
atggcctttaccgagcgggtcaattcctccgggaattctttatataatgacgatcgaaatctcctgcgtatacgtgagaaggagcgccggaaccaggaagctcatcaggagaaagaggccttccccgagaagattcctcttttcggagaaccctataaaacagccaaaggtgatgagttgtcgagtaggattcagaatatgctgggaaactatgaagaagtgaaagaatttctttcgacaaaatctcacacccatcgtttagacgcttctgagaataggttggggaaacccaagtatccactgatccctgataaaggtagctctattccttcaagctcatttcacacttccgtccaccatcagagtattcacacgcccgcctctggcccacttagtgtaggcaacatctcacacaatcctaaaatggcgcagcctcggaccgaacctatgccaagtttgcatgccaaatcatgcggccctcctgactcacagcacttgacccaagatcggttaggccaggagggcttcggcagttctcaccataaaaaaggcgacagaagggctgacggcgaccactgtgcctcggttacagactccgcgcccgagcgcgaactctcccccctgatctcacttccatctcccgtccccccattgtccccaatccactcaaatcagcagaccctcccccgcacccagggatcaagtaaagtgcatggttctagcaacaattccaagggctattgcccagctaaatcacccaaagatcttgccgtcaaagttcatgacaaagagactccccaggatagtctggtggccccagcccaaccgccaagtcagactttccccccgccgagcctcccgagcaaatccgtggccatgcagcagaagcctacagcttacgtccggcccatggacggacaggatcaggcaccttccgaaagcccagaactcaaaccacttccagaggattacagacagcagacttttgaaaagaccgacctcaaagtccccgcaaaagccaaactgacaaagcttaaaatgccttctcagagcgtggaacagacatactcaaacgaagtgcactgtgtggaagaaatcctcaaggactctcagcacgtgtcttccgtaacacagaatcagaaacagtatgatacctctagcaaaactcattccaattctcaacaggggacctcttcaatgctcgaggacgatctccaacttagcgattccgaggacagtgacagcgagcagacacctgcaccatag

SEQ ID NO: 13796 - DNA, 3657 bp, synthetic construct
  misc_feature 1..3657: note = Description of Artificial Sequence: Synthetic coding sequence
  source 1..3657: mol_type = other DNA
atggctttcacggagagagttaattccagcggaaacagcctgtacaatgacgatagaaatctccttagaatcagagaaaaggagcgccggaaccaagaggcccaccaagaaaaagaagcgtttccagagaagattccactcttcggtgagccttacaagactgccaaaggagatgagctcagctcacgtattcagaacatgctcggcaactacgaggaggtgaaggagttcttgagtaccaagtcccatacccaccgccttgatgcgagtgagaatcggctggggaaaccaaagtatccactcattccagacaaaggaagcagcattccctctagctcgttccatacctcagtccatcaccagtccattcacacaccagcctctggaccactgagcgtaggaaacattagtcacaacccgaaaatggcccagccacgcactgagcctatgccaagcctgcacgctaagtcctgtgggccaccagactcccagcacctgacgcaggaccgcctcggacaagagggctttgggtcatcccaccacaaaaagggggaccggcgtgcagacggggaccactgcgcttccgtcacggactcagcacccgagcgggagctgtctccgctcatttcgctaccttcacccgtgcctcccctgtctccaattcattcgaaccagcaaaccttaccacgcacacaaggttcgtctaaagttcatggcagcagcaataacagcaaagggtattgtcccgctaaatctcccaaagacttggccgtcaaggtacatgacaaggagacaccccaggactcccttgtcgccccggcccaacccccgagtcagacattccctccaccatcccttccaagcaaatcagtggctatgcagcagaagcccacagcttatgttaggccaatggatgggcaggatcaggcccccagtgagtctcccgaactgaagcccctgccggaggactatagacaacagacgtttgagaagacagatcttaaggtgcccgcaaaagccaaactgaccaagctgaagatgccatctcaatccgttgaacagacatacagtaatgaggtgcactgcgtggaagagattttgaaagaaatgactcatagctggccacctccactgacagccattcacaccccaagtactgccgagccttctaagtttccctttcctacaaaagattcacagcatgtgtcttcagttacgcagaatcagaagcaatatgacacatcctccaaaactcactccaacagtcagcagggtactagtagcatgctggaggacgacctacagctttcagatagcgaggactcagactctgagcaaacacccgagaagcctccctctagctccgctccgccttctgccccccagtccctcccagagcccgttgcctccgcccactcttctagtgcagagagcgaaagtacctcagattccgactcatcttcagactcagagtcagagtcctcttcatctgactctgaagaaaatgagccactggagacaccagcacccgaacctgaacctccaaccacaaacaagtggcaacttgataactggctgacaaaggtttcccaacccgcagctcccccagagggtccacgttccaccgagccacccaggcgccatcccgaaagcaagggctcctccgattccgcgacaagccaggaacatagtgagagcaaggatcctcctcctaaatcctcatccaaggccccaagagccccgcccgaagctccccacccagggaagcgaagctgccaaaaatctccagcccagcaagagcctccacagcgacagaccgtgggcactaagcagcccaagaagcccgttaaggcctctgcaagggccggatcacgcacctcgcttcagggggaaagagaaccaggactcttaccatatggttccagggaccaaacatccaaggacaagcccaaagtcaagactaaggggcgacctcgcgccgctgcgtcaaatgagcctaaacccgctgtgcctccaagctccgaaaaaaaaaaacacaagtccagcctgcccgctccttccaaggcgctaagcggacccgaacccgcaaaagacaacgtggaagatcgcacgcccgaacactttgcccttgtacccctcaccgagtcccagggcccacctcactcgggatctggctcccggacgtctggctgcaggcaggccgtggtagtacaagaggacagccggaaagatcggctgcctctgcctcttcgagacaccaagttgctttcccccctccgcgacactccgcctccgcaaagcctgatggtcaagattacccttgatctgctgagtcgtatacctcaacctcctgggaaggggagcagacaaaggaaagctgaggacaagcagccacccgcaggtaagaaacattcgagtgagaagaggtcttccgatagttcgtctaagttggccaagaaaaggaagggcgaggcagagcgcgactgtgacaataagaagatcagactggagaaagagatcaagtcccagagtagctcttcctcctcatcccacaaggagtcgtctaagacaaagcctagccgtccctcctcacagtctagcaagaaggagatgctgccccctccccctgtaagctcttcctcccagaagccagcaaagccagccctgaaacgcagcagacgcgaggccgacacatgcggacaggacccccctaagagcgcctcatccaccaaatctaaccacaaggattcatctatccccaagcagaggcgcgtcgagggaaagggtagcaggtcttcctctgagcacaagggctcatctggcgacacagcaaacccttttcctgtgccgtctctccccaatggtaactctaaacctggcaagccccaagtgaaattcgataagcaacaggccgatctgcatatgcgggaagctaagaagatgaaacagaaggcagaactgatgacagatagggtggggaaggcatttaagtaccttgaggcagtgttatccttcatcgagtgtggcattgcgactgagtcagagagccagtcgagcaaatccgcctacagtgtctactcagagaccgtggacctcattaagtttatcatgagccttaagtccttcagcgatgctacagccccgactcaagagaaaattttcgcggtcctctgtatgcgatgtcagtctattctgaacatggccatgtttaggtgtaagaaagacattgccatcaaatattcccggaccctaaacaaacactttgagagtagcagcaaagtcgcccaagccccgtctccttgcattgcaaggtcaacaggtactccctcacctctgtcccccatgcctagccctgcctcctcggttggctcgcagtcatctgctgggagtgtcggtagcagcggtgttgccgcaacaattagtactcctgtcacaatacaaaacatgactagctcctatgttactatcaccagccatgtcctgactgcgttcgatctatgggagcaggcggaggcgttgacccggaaaaataaggagttctttgccagactgagtaccaatgtttgcaccctagccctcaattcttccctcgtggatctggtacattacacacgccaggggtttcaacagctccaagagctgaccaaaactccttag

SEQ ID NO: 13797 - DNA, 1221 bp, synthetic construct
  misc_feature 1..1221: note = Description of Artificial Sequence: Synthetic coding sequence
  source 1..1221: mol_type = other DNA
atggcattcaccgaacgggttaatagtagcggtaatagtctctataacgacgatcggaatctactgcggattagagagaaggagagacgcaaccaggaggcacaccaggagaaggaggcctttccagagaagatccccctgttcggggagccctataagaccgcaaagggcgatgagctgtcaagtagaattcagaatatgttaggtaattacgaagaggttaaagaattcctgagtaccaagtctcatacccaccggttggatgcctccgaaaaccgattggggaagccaaagtaccctctcatcccggacaaaggaagtagcattcctagctcttcattccatacttctgtgcaccaccagtctatacacacacccgcctcaggtcctctgtcagtcgggaatatctcccataaccccaagatggctcagcccaggactgaaccaatgcccagcctgcatgctaaaagttgcggcccaccagattcacagcacttgactcaggatcgcctgggccaggagggattcggttcatctcatcataaaaagggggataggcgcgctgacggagatcattgtgcctcagtgaccgactctgcccccgagcgggaacttagccccttaatcagtttgccttcccccgtgcccccactctcccccatacactctaaccagcagaccctgccaagaactcaaggcagcagcaaggtacatggcagttctaacaacagcaagggttactgcccagctaagtccccaaaagacctggctgtgaaggttcatgacaaagaaactccccaggacagtcttgtggcgcccgcacagcccccgtcacagacatttcctccaccctcactaccctctaagagcgttgctatgcagcagaagcctacagcgtacgtgaggcctatggacggacaggaccaggccccttccgaaagtccagaactgaaacctttgcctgaggactacaggcagcaaactttcgaaaagactgatctaaaagtacctgcaaaagccaaattgacaaagctgaagatgccctctcaatccgtagaaacctacagtaatgaagtccattgtgtcgaggaaatacttaaagagatgactcactcatggccaccacccctcaccgcgatccatactccctctacggccgaacctagcaagtttcctttccccaccaaggattcacagcacgtttcaagtgtgactcaatag

SEQ ID NO: 13798 - DNA, 1473 bp, synthetic construct
  misc_feature 1..1473: note = Description of Artificial Sequence: Synthetic coding sequence
  source 1..1473: mol_type = other DNA
atgccaagtcagtcagtagagcaaacctactcaaatgaagtccattgcgtggaggaaattcttaaggaaatgacgcacagctggccccctccgctcacagccattcatacaccctctacagccgagccctccaagtttcctttccccactaaagattcacagcatgtgagctccgtgacgcaaaaccagaagcagtacgacaccagcagtaagacccactcgaactcccagcaggggaccagttctatgttagaagacgacctccagctgtccgattcagaagattccgacagcgaacagactccagagaaaccaccgcatctgcaccttcaggtactgcatagcccttttcagaaccagtggcaccagcacatccccgcggttcaaagtcagaaggcccctgtgactcaaacggtgccacagacgcaaagagcccgggcggtgcaggacagcgaagaaaatgagcccctcgagacacccgctcctgagccagaaccaccaactactaataagtggcagctagataattggctcacaaaagtgagccaacctgcagcaccacccgaaggcccgcgatccactgaaccacccagacggcacccagaaagtaagggaagcagtgattctgccactagccaggagcattccgaaagtaaggaccccccgccaaagtcgagctcaaaggcaccaagggcaccccccgaggcgccgcatcccgggaaacgatcctgccaaaaaagccctgcacagcaggagccgccgcagagacagacggtaggcacaaagcaacctaaaaaaccggttaaagcctccgctcgggctggtagtcgaacttcactgcagggggaacgggaacccgggctcctgccatacgggtcaagggatcagactagcaaggacaagcccaaggttaagacaaagggaagaccacgggcggctgcgtcaaatgagcccaagcctgcagtgccaccttcaagcgaaaagaagaagcacaaatctagcctgccagctccctccaaagcactgagtggcccagagccagccaaggataacgtggaggataggaccccggagcatttcgctttggtaccactgacagagtctcagggccccccccacagtgggtccggcagccgcacatccggttgccggcaagcggtggtggtccaggaagacagcaggaaggatagacttccactccccctgagggataccaagctgctcagcccccttagggataccccaccgcctcagtctttgatggttaaaatcacattggacctccttagccgcatcccacagcctccaggaaagggctctaggcaacggaaggcagaggacaaacagccgcctgcagggaaaaaacatagttccgagaaaaggtctagcgattcgtcctccaaattggccaaaaaaaggaaaggcgaggctgaacgcgactgtgataacaagaagattagactcgagaaatag

SEQ ID NO: 13799 - DNA, 2550 bp, synthetic construct
  misc_feature 1..2550: note = Description of Artificial Sequence: Synthetic coding sequence
  source 1..2550: mol_type = other DNA
atgacacattcttggccgccacccttgactgccatccataccccgagcaccgctgaaccttccaagtttcccttcccaacaaaggatagccagcatgtaagctcagtgacacaaaaccagaagcagtatgacacaagctccaaaacccatagtaattcacagcagggcactagctcaatgctggaggacgacctgcagttgtcggattcggaggatagcgactccgagcagacccctgagaaacccccatcgtccagtgctccaccttcggctcctcagtctctgcccgagcctgtggctagcgcccactcttctagcgctgagtctgagagcacctccgactctgactccagttctgatagcgaatctgaaagtagtagttctgactcagaagagaatgaaccgctagaaacgcccgcacctgaacctgagccacccaccacaaataagtggcaattggacaactggctaactaaagtctcccagcctgccgccccacctgagggaccacggagcaccgaaccgcctcgccggcaccccgagtctaagggatctagtgatagcgctacatctcaggagcactctgaatccaaggacccacctccaaagtccagttcaaaggctccacgtgcccctcctgaggccccacacccggggaagaggagctgtcagaaatctcccgcccagcaggagcccccacagagacagacggtcggtactaagcagcccaagaaaccagtaaaagctagtgcccgagcgggcagtcgaaccagcctacagggggagagggaacctggcctgcttccctatggttccagggaccagacatcaaaggacaagccgaaggtcaagactaagggacgacccagagctgctgcttcaaacgagcctaaacctgccgttccgccgtctagcgagaagaagaaacataagtcttccctgccggcaccgtccaaggccttgtctggacctgaaccagcgaaagataatgtagaggacagaaccccagaacattttgcgctggtgcccctcacagagtcacagggacctcctcattccgggagtggaagccggacatctggctgccgccaggccgtggttgtacaggaagacagcaggaaggatcgtctgccgctgcccttgcgtgacacaaaactgctttccccattgcgggacacaccacccccacagtccctcatggtaaagatcactctggatctgctgagcagaataccccaacctccaggtaagggatcccggcaacggaaggcagaggataagcagccccccgccggtaagaaacatagtagcgaaaaaaggtcctctgactcatcttctaaactcgcaaagaagaggaaaggggaagccgagcgggattgcgacaataagaaaatacgccttgagaaggagatcaagtctcagtcgtcgagttccagttcttcacataaggagtcctctaaaaccaagccttctcgtccttcctcccaatcgtctaaaaaggagatgcttccgcctcctcctgtttcctcctcatctcagaaacctgctaaaccagctcttaaacgatctcgccgtgaagccgacacgtgtggtcaggatcccccgaagtctgcaagctccacgaagagcaaccacaaagactctagcataccaaagcagcggagggtggaggggaagggaagccgctcttctagcgagcacaaaggcagcagtggcgatactgccaatccttttccagtaccctctctgcccaatggtaactccaaacccggtaaaccccaagtgaaatttgacaagcagcaggcagacctccatatgcgagaagcaaagaaaatgaagcaaaaggccgaacttatgaccgacagggttggcaaagcatttaagtacctcgaagctgtgctatcctttattgaatgcggtattgccaccgaatcggaaagtcagtcgagcaagtccgcatactcggtctacagcgagaccgtggacctgataaagtttatcatgagcctgaagagcttctctgatgcgactgctccgactcaggagaaaatctttgccgtgctatgtatgcgttgtcaatctatcctgaatatggctatgtttcgatgtaagaaagatattgctattaagtattccagaaccttgaataagcacttcgaatcttcctcgaaggtggctcaggctccttccccctgcattgcgaggtcgacaggcactccttcccctctcagtcccatgccatccccagcgtcctctgttggttcccagtctagcgccggatccgtgggatcttccggggtggccgctactattagtacaccagtgactatccagaatatgacctctagctacgttaccattacatcgcacgtactcacagcttttgatctttgggagcaggccgaggccctcactcgtaagaacaaagagtttttcgctcggctttccacaaatgtatgcacactggcattgaacagcagtctggtggatctcgttcattatacaaggcaagggtttcagcagctgcaagagctcaccaagacgccatag

SEQ ID NO: 13800 - DNA, 2376 bp, synthetic construct
  misc_feature 1..2376: note = Description of Artificial Sequence: Synthetic coding sequence
  source 1..2376: mol_type = other DNA
atgcctgacatgcatttcaaggcacctaaaataagtatgcccgatgtggaccttcacctgaaaggtccgaaagtgaagggagatgtggacgttagtgtccctaagctggagggagatctgaccggcccatctgtgggagttgaggtccctgacgttgaactagagtgccctgatgctaaactcaagggtcccaaatttaaaatgccagaaatgcattttaaaacgcccaagattagtatgccagatgtggacctccatttgaaggggcccaaggtcaagggcgatatggacgttagcgtcccaaaagtcgaaggcgagatgaaagtacccgatgtggatataaagggccctaaaatggacatagacgcaccagacgtcgatgtgcacggtcctgattggcatctgaagatgcccaaaatgaaaatgccgaagttttctatgccggggtttaaggcagaggggcccgaagtcgacgtgaacctgccgaaggccgacgttgttgtgtctggcccgaaagtcgatgtggaggtcccggatgtttcgcttgaagggcctgaaggcaaactgaagggacctaagctcaaaatgccggaaatgcattttaaagctcccaagatctctatgcctgacgtggatctgcatctaaaagggcctaaagtgaagggagatgtggacgtgagcctacctaagctggagggcgaccttactggcccctctgtagatgtggaagtgcccgacgtggaactcgaatgccccgacgccaagctcaagggacctaagttcaagatgccagagatgcacttcaagactccgaaaatcagcatgcctgatgttaacttgaatctcaagggacccaaggtcaaaggcgacatggacgtcagtgtgcctaaggtggaaggtgaaatgaaagtcccagatgtggatatccgtggaccaaaagtggacatcgacgcgccagacgtcgacgtccacgggcctgactggcacctgaagatgccaaaaatgaaaatgcccaagttcagcatgcctgggtttaaaggggaaggccccgaagtggacgtaaatctcccgaaggctgatgtagatgttagcggtcctaaggtggatgtagaagtgcctgacgttagcttagagggtccagaaggcaagttaaaaggtccgaaattcaagatgccagaaatgcacttcaaaactcccaaaatcagcatgcccgacgtggacttcaacctgaagggtccgaagatcaagggggacgtggatgtttccgcccccaagttggagggggagctgaagggcccagagctcgatgtgaagggaccgaaactcgatgccgatatgcccgaagtggcagtagagggtcctaacgggaagtggaaaacccccaagtttaaaatgccagacatgcacttcaaagcccccaagataagtatgccagacttagatctgcatttaaagtctccaaaggccaagggggaggtggacgtcgatgtgccgaagctggaaggggacttgaaaggacctcatgtcgacgtcagtgggcctgacattgatatcgaggggcctgaaggcaagctgaagggcccaaaatttaagatgccggatatgcacttcaaagcccctaatatcagcatgcctgacgtggatctaaaccttaaggggcccaaaatcaaaggggacgtggatgttagcgtgcctgaagtcgaaggcaaactggaagtgccagacatgaacatccgagggcccaaagtggatgtcaatgctccagacgtgcaggccccggattggcatctcaaaatgccgaaaatgaaaatgcctaagttctctatgcctgggttcaaagctgagggcccagaagtggacgtgaatttgcctaaagccgacgtcgacatctctgggcctaaagttgatatcgaagggccagatgtgaatattgagggtccagaagggaaactcaagggccccaaactcaaaatgcctgaaatgaatataaaggccccaaagatatccatgcccgactttgacctgcacctcaaaggcccaaaagtgaagggcgacgttgatgtgagcctccccaaagtcgaaggggatttgaagggcccagaggtggacattaaaggaccaaaggttgacataaacgcccccgatgttggtgtacagggccctgattggcatcttaagatgcccaaggtgaagatgccaaaattctccatgcctgggttcaaaggtgaaggccccgatggagatgtcaagctcccaaaagctgatattgacgtgtctggaccaaaggtagatattgaggggccagacgtgaatatagagggaccagaggggaagctgaaaggacccaagtttaagatggcccaaaggtggtggtag

SEQ ID NO: 13801 - DNA, 450 bp, synthetic construct
  misc_feature 1..450: note = Description of Artificial Sequence: Synthetic coding sequence
  source 1..450: mol_type = other DNA
atggagaaggaggagaccacccgggagctgctcctgccaaattggcaagggagcggatcacacggactcacaatcgcacaaagggacgatggggtgttcgtgcaggaggtcactcagaattcacccgcggcgcgaaccggcgtagtgaaggaaggcgaccaaatcgttggcgcaaccatctacttcgataatttgcagagtggggaagtgacacagctcctaaacacaatgggacatcacacagttggactgaagctgcaccgcaagggggaccgatcccctgagcctgggcagacatggacgcgcgaggtcttttccagctgcagtagtgaagtagttctgaatactccgcagccatccgccctggagtgcaaggaccagaacaagcagaaagaggctagttcacaagctggcgccgtgtccgtgtcaacaccgaatgccggcctgtag

SEQ ID NO: 13802 - DNA, 17673 bp, synthetic construct
  misc_feature 1..17673: note = Description of Artificial Sequence: Synthetic coding sequence
  source 1..17673: mol_type = other DNA
atggagaaggaagagactactagggagctgctgctccctaactggcaagggtctggttctcacggcctcaccatcgctcaaagagacgatggagtgtttgttcaggaagtaacgcagaatagccccgctgcaagaacgggtgtagttaaagagggcgatcagattgtgggggccaccatttactttgacaacctgcagagcggggaggtaacacagctgttgaataccatgggtcatcacactgtgggacttaaacttcatcggaaaggtgaccggagccccgagcctgggcagacttggacccgggaagtttttagcagttgttctagcgaggtggtgttgtcgggagacgacgaggaatatcaacgcatctacactacaaagatcaaaccaaggctcaaaagcgaagacggcgtggagggagacttaggggagacgcagagcagaaccatcaccgtcactcgacgcgtaactgcttataccgtggatgtcacaggtagagagggagccaaggatattgacatatcctcaccagagtttaagataaagattcctagacacgaactgaccgaaatatccaatgtggatgtcgaaacccaatcaggtaaaactgtgataaggctcccctccggatcgggtgcggccagtccaactggttccgctgtggatataagggctggcgcgataagcgcgtccggtcccgaactgcaaggcgccggacattccaagctgcaggtaaccatgcctggcattaaggtgggagggagtggggtgaacgtcaatgcaaaaggcctggatctcggaggtagaggcggagtccaggtgcctgcagttgatatctcgtccagcctaggaggtcgtgctgtcgaggtacagggaccgtccctggaatccggtgatcatggaaagattaaatttcctaccatgaaagtgccaaagtttggggtttctacagggcgggaaggccaaacccccaaagctggtctgcgagtatctgctcccgaggtgagtgtgggtcataaaggcggcaaaccaggcctaacgatccaggcccctcagcttgaggtttcagtgcctagcgctaacatcgagggcctggagggaaagctcaagggacctcagataactgggccgtctctggaaggcgacttaggcctaaagggagcaaaaccgcaaggacacattggggtggatgcctcagccccccagatcggtgggtcaatcaccggcccctctgtggaggttcaggcgccagacattgatgtccagggccccggtagcaaacttaatgtccccaagatgaaggttcctaaattctcagtttcgggggctaagggcgaggaaactggcatcgatgtcacgctgccaacaggggaagttaccgtgccaggggtctccggggacgtatcgctgcccgaaatagctactgggggcttagaaggcaaaatgaagggaaccaaagtcaagacccccgaaatgatcattcagaagccaaaaatatccatgcaggatgtggacctgtctctcggctcccccaaattaaaaggcgacattaaggtaagcgctcccggggtccagggagacgtaaagggacctcaggtggcccttaagggcagccgagtcgatatcgagacccccaacctcgagggtacccttactggcccacgtctcggcagcccttcagggaaaacgggcacttgtcgcattagcatgtccgaggtggatttaaatgtggccgcacctaaggtgaaaggaggcgtggacgttactttgcccagggtcgagggtaaggtgaaggttccggaggtggacgttcggggacctaaagttgacgtctccgcaccggatgtggaggcacacggtcctgagtggaacctgaagatgcccaagatgaaaatgcctactttttcaactccaggcgcgaaaggcgaaggcccggacgtccatatgacgttgcccaaaggcgatatctccattagcgggcccaaggtgaatgtagaagctccggacgtcaacctggaggggctaggcggcaagctgaaggggcctgacgtcaagctccccgacatgagtgtgaagactccgaaaatttctatgcctgacgtggatctgcacgtgaaggggactaaggtcaagggggagtatgatgtgacggtgccgaagctggaaggggaactcaagggccctaaggtggatatcgatgctcctgacgtggacgtgcatgggcccgactggcacctgaagatgccaaagatgaaaatgcctaagttcagcgtccctggctttaaggctgagggccccgaggtagacgtgaacctcccgaaggctgatgtggacattagtggccctaaaattgatgtgacagctcccgatgtgtcaattgaggagccagaagggaaactgaagggtccaaaattcaagatgccagagatgaacatcaaagtacctaagataagcatgcccgatgttgacctgcatctgaagggtcccaatgtaaagggagaatacgatgtgacaatgccaaaggtggaaagtgagataaaagtgccggatgtggaactgaagagcgcaaagatggacatagatgtacctgatgttgaggtccagggcccagattggcacctgaaaatgccaaagatgaaaatgcctaaattttcgatgccgggcttcaaagcagaaggtcctgaagtcgatgtaaacctgcccaaagccgatgtagatatcagcggaccgaaagtgggcgtggaagtgccagacgttaacattgagggtccagaaggcaagctcaaagggcctaaatttaagatgcccgaaatgaacatcaaggcccctaaaatttcaatgcccgatgtcgacctgcacatgaaaggccccaaagtgaagggcgagtatgacatgacagtcccgaaattagagggagacttaaagggccctaaggtcgatgttagcgctcccgacgtagagatgcaagggccagattggaatctgaaaatgccaaagatcaaaatgccaaagttttctatgccgagccttaaaggagagggtcctgagtttgacgtgaatctgagcaaggccaacgtagacatatcagccccaaaggtggatactaacgcacccgatctttcgctggaggggcccgaagggaagttaaagggccccaaatttaagatgccagagatgcactttcgggcacctaaaatgagcctccccgacgtcgacctggaccttaaggggccaaagatgaaggggaacgttgacatctctgccccaaagatcgaaggcgaaatgcaggtgccggacgtcgatattcgggggcctaaggttgatatcaaagctcctgatgtggaaggccagggtctagattggagcctgaaaatcccgaagatgaaaatgcccaaattctcgatgcctagcctgaagggagaaggtcctgaagtggatgtgaatctgccgaaggccgatgtagtggtgagtggacctaaggtcgacatcgaggctccagacgtgtccctcgaggggcccgaggggaaactcaagggccccaagtttaagatgccggaaatgcactttaaaactcccaagatctccatgccagacgttgacctacatcttaagggcccaaaagtcaagggtgatgtcgacgtatcagtccctaaagttgaaggggagatgaaagtgcctgacgttgaaatcaagggacccaagatggatatcgacgcacctgacgtcgaggttcagggccccgattggcatctcaagatgccaaaaatgaagatgcccaaattcagcatgccaggcttcaagggagaaggcagagaggttgatgtaaatctgccaaaggccgatatagatgtttctggaccaaaggtggacgtggaggttccagatgtgtcattagaaggcccagagggaaaactcaaaggaccgaagtttaaaatgcctgaaatgcacttcaaggctcctaagatctctatgcccgacgtcgacttaaacctcaagggccctaagctaaaaggcgatgtggatgtctccctgcccgaggtggaaggagagatgaaggtcccagacgtggatatcaagggacccaaagtcgacataagtgctcccgatgtcgacgtccacggccccgattggcacttgaagatgccaaaagtcaaaatgcccaaattcagcatgcctggctttaagggtgaaggacctgaggtagacgtgaaacttcccaaagccgacgttgacgtctccggtccaaagatggacgcggaggtgccagacgtgaacatcgaaggaccagacgcaaaactgaaaggcccaaaatttaagatgcctgagatgtcgatcaagcctcagaagatctccattccggacgttggtctgcacttgaaggggcccaagatgaaaggcgattatgatgtgacagttccaaaggtggaaggcgagattaaagcccctgacgtagatataaaggggccaaaagtggacataaacgcaccggacgtggaggttcacgggcctgactggcacctcaaaatgcctaaagtcaaaatgcccaaattctcaatgccagggtttaaaggggagggcccagaggtcgacatgaatctgcctaaagctgacctgggggtgtccggtcctaaagtggacatcgacgtgcccgatgtgaacttggaggctcctgaaggaaagctcaaggggcccaagttcaagatgcctagtatgaacatccaaacacacaagatctcaatgcctgatgtggggctgaacctgaaagctcccaaattgaaaacagacgttgatgtctcactgccgaaggtagaaggggacctgaaaggtcccgaaatagacgtgaaggcccctaagatggatgtgaacgtcggggatatcgatatcgagggaccagagggaaagctgaaggggccgaagtttaagatgcccgagatgcattttaaggcccctaagattagtatgcccgatgtcgatctccacctcaaagggccgaaggtcaaaggcgatatggatgtgtccgtgcctaaggtcgaaggagaaatgaaggtgccggatgtggatatcaaaggccccaaggttgatattgatgcacctgatgtggaagtacatgaccctgactggcatctgaaaatgcccaaaatgaagatgccaaagtttagtatgccggggtttaaggctgaaggccccgaagtcgacgttaatcttccgaaggcagacattgatgtttctggcccttctgtggatacggatgcccccgatttggacattgaaggcccagaagggaagctaaagggaagtaagttcaagatgccaaagctgaatatcaaagccccgaaagtctctatgccagatgttgatctgaatttgaagggcccgaaactaaagggcgagattgatgcttccgtgccggaattggagggagatcttcggggcccccaggtagacgtaaagggcccttttgtggaggccgaagtacctgatgttgatcttgaatgtccagatgctaaactgaagggccccaaatttaagatgcctgaaatgcacttcaaagctcccaaaattagcatgcctgacgtcgacctgcacttgaaaggacccaaggttaaaggagatgcggatgtctccgtcccaaagctggagggggatctgacagggccctcagtcggcgtggaagtacccgacgtcgagctcgagtgccccgacgcaaagctcaaaggcccgaagttcaagatgcccgacatgcactttaaggcccctaagatctccatgccagatgtggacctccatcttaagggtcccaaagtaaaaggagacgttgatgtgagcgtgcccaagctcgagggggacctgacaggcccatctgtcggggtcgaggtcccagacgtagaactggagtgcccagacgctaaactgaaaggccccaagtttaaaatgccggagatgcacttcaagacgccaaaaatatctatgcctgacgtggatcttcatctgaagggaccaaaagtcaaaggagacatggacgttagtgtccccaaggtggagggcgaaatgaaggttcctgacgtcgatattaaaggaccaaagatggatatcgacgcacctgacgtggacgtgcacggccctgactggcacctcaaaatgccgaagatgaagatgcccaagttttcgatgcccggcttcaaggctgaagggcccgaggtggacgtgaacctaccgaaagccgacgttgtggtgagcggacccaaagtagacgtggaggtccccgatgtttctcttgaaggaccggaggggaagcttaagggccctaaactgaaaatgccggaaatgcacttcaaggcccccaagattagcatgccagacgtagatctgcatctgaagggtcctaaggtgaagggcgacgtcgacgttagcctcccgaagctcgagggtgatcttaccgggccatctgtggatgtggaagttcctgatgtggaactcgaatgccctgacgcaaagctgaaaggcccgaagttcaaaatgccggaaatgcattttaaaacgccaaagattagtatgccagacgtcaatctcaatctcaagggacccaaagttaagggtgacatggatgtttctgtgcccaaagtcgagggcgagatgaaggtccctgacgtggatatcaggggccctaaagtggacatagacgctcctgacgtcgacgtccacggaccggattggcatttgaaaatgccgaagatgaagatgcctaagttctcaatgcccggatttaagggggaagggcccgaagtcgatgtgaatctgcctaaagccgacgttgacgtcagcggccctaaggtcgatgttgaagtgccggacgtatccctcgagggcccagaaggaaaactcaaggggcctaaatttaagatgcccgaaatgcacttcaaaacaccaaagataagcatgcccgacgtggattttaacctgaagggaccaaaaattaagggcgacgtcgacgtctccgcgcctaagttagagggcgagctcaaggggcccgagctggacgtaaaaggaccaaaactggatgccgacatgcccgaagtcgctgtggagggccctaacggcaagtggaaaacgccaaaattcaaaatgcccgacatgcacttcaaggcacccaaaatcagcatgcccgacttggacctgcatcttaagagcccaaaggccaagggagaggtggatgtggacgttccaaagctcgagggcgatcttaaggggccgcatgttgatgtgtctggacccgatatcgatatcgagggccctgagggcaagctgaaagggcccaaattcaaaatgcccgacatgcacttcaaagctcccaacatctcaatgccagacgtggacctgaatctgaaaggacccaaaataaagggagatgtggatgtgagtgtgccggaggtcgaagggaaactggaggtaccagacatgaatatcaggggcccgaaggtcgatgtcaacgcccctgatgtgcaggctcctgattggcatttgaaaatgcccaaaatgaagatgccaaaattttcaatgccaggcttcaaggctgagggaccggaggtggacgtcaacctgcctaaggctgatgtggacatctcaggccccaaagtagatattgaaggtcccgatgttaatatcgaaggcccagaagggaagctaaagggaccaaagctcaagatgcctgaaatgaatatcaaagctcccaaaataagcatgcctgattttgacctacatctcaaaggacctaaggtcaaaggcgatgtcgacgtaagcctccctaaagttgaaggagacttaaagggccctgaggtcgacatcaaggggcctaaagtcgatattaatgccccagatgtcggcgtccaggggcccgattggcatttgaagatgccaaaagtcaagatgcccaaattttctatgccagggttcaagggcgagggacctgatggcgatgtcaagctgcccaaggcagacatcgacgtgagcggacccaaggtggatattgaggggcctgatgtaaatatcgagggacccgaaggaaagctgaagggacctaaatttaaaatgcctgaaatgaatataaaagctcccaaaatctcgatgccggatattgatctgaacctcaagggtcctaaggtgaagggcgacgttgacgtgagcttacctaaagtcgagggagacctgaagggaccggaggtcgatattaaggggccgaaggttgatatcgacgcgccagacgtcgacgtccacggccccgactggcatctgaagatgcccaaaatcaaaatgcccaaaatttctatgcctggctttaagggggagggtcctgatgtcgatgtcaatctgccaaaggcggatatcgacgtttctggacctaaggtagacgtggagtgtccagacgtgaacatagagggtcccgaagggaaatggaagagtcccaaattcaagatgcccgaaatgcacttcaaaacccccaagatttctatgcccgatattgatctgaatcttacagggcccaaaattaagggcgatgtcgatgtcactggtccaaaggtagagggcgatcttaagggtccagaggttgatctgaagggcccaaaggtggatatcgacgttcccgatgtaaacgtgcagggccccgattggcatctgaagatgcccaaaatgaagatgcctaaattttcaatgcctgggtttaaagcggaagggcccgaggtagacgtgaatctgcccaaggctgatgtagacgtgagcgggcctaaggtggacgttgaaggcccggacgtgaatatcgagggccctgaaggaaaacttaaaggacccaaatttaagatgcctgaaatgaacattaaagcccccaaaataccaatgcccgacttcgacctgcatcttaagggaccaaaagtcaagggtgacgtagatatcagcctgcccaaggtcgagggcgacttgaaggggccggaggttgacattaggggcccacaagttgatatagatgtgccagatgtgggggtgcagggccccgactggcaccttaagatgcctaaagtcaagatgcctaagttttcgatgccaggattcaagggggagggacctgatgtggacgtgaatctgcccaaggccgatttagacgtgtccggccccaaagtcgatattgatgttcctgatgtaaacattgagggccccgaaggcaaactcaaaggtcctaagtttaaaatgccagagatgaatataaaagcgcccaagatttctatgcctgacatcgatttgaacctaaaggggccgaaagtgaaaggggacatggatgtgtcgcttcccaaggtggaaggcgatatgaaagtccccgatgtcgatattaagggacccaaagttgatatcaatgcaccggacgtcgacgttcaaggccctgattggcacttgaaaatgccgaaaatcaaaatgcccaaaatttcaatgcctgggtttaagggcgaaggcccagaagtagacgtaaatctgcctaaagccgatctcgatgtgagcggaccaaaggttgacgttgatgtgccagatgttaatatcgaaggtcccgacgcaaaactgaagggcccaaagttcaagatgcccgaaatgaatattaaggcccccaagatctccatgcccgacttggacctgaacctaaaggggccaaaaatgaagggcgaggttgatgtgtctctggcaaacgttgagggcgaccttaagggacctgcgctggatataaagggccccaaaatcgatgtggatgcccccgatatcgatattcacggccctgacgccaagctgaagggccccaagctcaagatgcccgacatgcatgtgaacatgcctaagatatcaatgcctgaaattgacctgaacctgaaggggagtaagctgaaaggagacgtcgatgtaagcggtccgaagctagagggcgatatcaaagctcccagcctggatataaaaggacctgaagttgacgtctccggcccaaaactcaacattgagggcaagtcaaaaaagtctagattcaagctgcctaaatttaacttcagcgggagcaaagtgcagaccccggaggtggacgttaaagggaagaagccagacatcgatataactggacctaaagtggacatcaatgcgcccgatgtggaggtgcaagggaaagtgaagggctctaagttcaagatgccattcttgagtattagcagccccaaggtgtccatgccagatgtcgagttgaatctgaagagccccaaggttaagggagatctggacatcgccggccctaatctggaaggcgatttcaagggcccaaaagtcgatatcaaagcacctgaggtgaatctgaacgctccagacgtggatgttcacgggcctgactggaacctcaaaatgccaaagatgaagatgccaaaattctccgtcagcggtctgaaagcagaggggccagatgtggccgtggacctgccaaagggcgatattaacatcgaaggaccatcaatgaacattgagggaccggacctaaacgttgagggtcctgaaggaggcctgaaggggccaaagtttaaaatgccagacatgaacataaaagctcctaagatctctatgcccgacatcgatctcaacctgaaaggaccaaaagtgaaaggcgatgtcgacatctccctgcccaagctggagggcgacctcaaggggcctgaggtagacatcaagggtcctaaggtcgatattaatgccccagatgtagatgtccatgggccagactggcacttgaagatgccgaaagtgaagatgcctaagttttccatgccggggttcaagggggagggaccagaagtggacgtgacactgcccaaggctgacattgatatcagtggccccaacgttgacgttgatgtgcccgacgtgaacatcgagggtccagatgccaagttgaaggggcctaagtttaaaatgcctgaaatgaacatcaaagcacctaagatatccatgccggacttcgatttgaacttgaagggccccaaaatgaaaggagacgtggtagtgtctcttcccaaggtcgagggggatctcaagggcccagaggtcgacattaaggggccaaaagttgacatagatacgccggacattaacattgagggatctgaaggcaagttcaagggccccaaatttaagattccggaaatgcatttaaaggccccaaaaatttccatgcccgatattgatctgaacttgaagggcccaaaagtgaaaggcgatgttgacgtgtctttgccaaagatggaaggggatttgaaaggcccagaggtcgacattaaaggccccaaggtcgacattaacgcacctgatgtggatgtgcaggggcccgattggcacctcaagatgcctaaagtgaagatgccaaaattttctatgcctggattcaaaggtgagggccctgatgtcgacgtgaatctgcctaaggctgacttggatgtcagcggccccaaagtcgacatcgatgtcccagatgtgaacattgaagggcctgaagggaagctgaagggaccaaaattcaaaatgccagaaatgaacatcaaggcccctaagatatccatgccagacattgatttgaacctgaagggaccaaaagtgaagggagatatggacgtgagtttaccaaaggtggagggagacatgcaggtgcctgacttggatatcaaggggccgaaggtggatattaatgcacctgacgtcgatgtgcgggggccggattggcacttgaaaatgccaaaaattaagatgcccaagatttccatgcccggcttcaagggcgagggccccgaagtcgacgtcaacttgccaaaggccgacctggatgtgtcagggcctaaagtagatgtggatgttcctgacgtcaatattgaaggaccagatgcaaagcttaaaggccctaaatttaagatgccagagatgaacattaaagcgcctaaaatatcgatgccagattttgacttgcacctaaaaggtcctaaggtgaaaggagacgtggacgtctctttaccaaagatggaaggggatctaaaagcacccgaggttgacataaagggtcccaaggtggacatcgacgcccccgatgtggacgtccatggacccgactggcacttgaaaatgcccaaggtcaagatgcctaaattctcaatgcctggctttaaaggggaaggacctgaagtggacgtgaacctgcccaaggctgacattgacgtgtctggccctaaagtcgacatcgatacaccagacattgatatccatggccctgaaggcaagctcaagggaccgaagttcaaaatgcccgatctgcacttaaaagctcctaaaatctccatgccggaggtcgatctaaacctgaagggtccgaagatgaagggcgacgtggacgtgtctctgcctaaggtcgaaggggatctcaaggggcccgaggtcgatatcaaaggcccgaaagttgacatcgatgtgcccgacgtcgacgtacaaggcccagattggcatctcaagatgccaaaggtgaagatgccaaaattctctatgccaggatttaagggcgaaggacccgatgttgacgtgaacctgcctaaggcagatctagacgtgagtggacctaaggtggatatcgatgtccccgacgtgaacattgagggccccgacgctaaactcaaaggccctaagttcaagatgcccgagatgaacattaaggccccaaaaattagcatgcccgacttcgacctgcacctgaaaggccctaaggtgaaaggggatgtggacgtctcactgcccaaagtggagggcgacctgaaggggcctgaggtggatataaagggccctaaggtggatatcgacgcccctgacgtggacgtgcacggcccggattggcatttgaagatgccaaaagtaaagatgcctaaattttctatgcccggattcaagggtgaaggcccggatgtagatgtgacacttccaaaagcggatatagagatatcgggcccgaaagtcgatattgatgctcctgacgtgtccatcgaggggccagacgcaaaactgaagggacctaagttcaagatgcccgagatgaacattaaagctcccaagatttcaatgcctgacatcgatttcaatctgaaaggtccgaaggtgaagggagacgttgacgtgagtctgcccaaggttgaaggagatctgaaaggacccgagatcgatatcaaaggcccatccctggatatcgacacccccgacgtgaatatcgaaggtccggaaggaaagttaaaagggcccaaattcaagatgccagagatgaatattaaggcgccaaaaatttcaatgcccgactttgatttgcaccttaagggacccaaggtgaagggggacgtcgacgttagtttgccaaaggtcgagtctgacctgaaaggccccgaagtagatatcgaaggtcctgagggcaagcttaaaggccccaagtttaaaatgcccgacgtccacttcaagtctccacagatttcgatgagtgacatcgatcttaatctgaagggtcccaagatcaagggcgacatggatatttctgtgcccaagttggaaggggacctgaaaggtcctaaagtcgacgtcaaggggccaaaagtgggtattgatacacctgatatcgacatacatggtcctgagggcaaactgaagggccctaagttcaaaatgccagatctccacctaaaggctccgaaaatcagcatgcctgaggtggacctgaacttgaaaggtcccaaggtgaagggcgacatggacatctcgctgccaaaggttgagggagacctgaagggacctgaagtggatattagggaccctaaggtcgacattgacgtgccggatgtcgacgtgcagggacctgactggcatctaaagatgccaaaggtgaagatgcctaagttttccatgcctggttttaagggcgagggcccagacgtggacgtcaatctgcctaaagcagatattgatgtctccggtccaaaggtcgatgtggatgttcccgatgttaatatcgagggcccagacgctaaactcaaaggtcctaagttcaaaatgccagagatgagtataaaagcgcctaaaattagcatgcccgatatcgatctcaacttgaaagggccgaaagttaagggcgatgtggacgttacacttcctaaggttgagggcgatttgaaaggtcccgaggctgatattaaagggcctaaagtggacatcaatacgcctgatgtggacgtgcatggcccggactggcatctgaagatgcccaaggtgaagatgccaaagttttccatgcccgggtttaaaggagaggggcccgacgtcgacgtgtccttgcccaaggcagatatagacgttagcggacctaaggttgacgtcgacattcctgatgtgaacatcgagggccctgatgctaagctgaaaggtccaaagttcaaaatgccggaaatcaacattaaagcacccaaaatatccatccccgacgtggatctcgacttgaagggcccaaaggtaaagggtgatttcgacgtgtcggtgcctaaagtggaaggaactctgaaaggacccgaagtggatttgaaaggccccaggctcgactttgagggacctgacgctaaactgtctggaccatctctgaagatgcctagtctggaaataagtgctcctaaagtcaccgcaccagacgtagatctgcacttgaaagcccccaaaatcggctttagcggacccaagctagagggaggagaggtggacctaaaaggccccaaagtggaggccccaagcctggatgttcacatggactctccggacataaatatagaagggcctgatgttaaaattccgaaattcaaaaagccaaagtttggctttggagcaaaatcccccaaagcagacattaaatctccttctcttgatgtgactgtgccagaagccgaactgaacctcgagacccccgaaatctctgtgggtggcaagggtaagaaatcgaagttcaaaatgccaaaaattcacatgagcggcccaaaaatcaaagccaaaaagcaggggttcgatttaaatgtccctggaggggagatcgatgcttctctgaaagcccccgatgtcgacgtcaatattgccggccccgacgcagcactcaaagtggatgtaaagtcaccaaagactaaaaagactatgtttggtaagatgtacttccctgacgttgaattcgacatcaagtctcccaagtttaaagccgaggccccactgccgtctccaaaactggaaggggagttacaggcacccgatctggagctgagtctgcctgccatccacgtcgaaggcttagatatcaaagcaaaggcacctaaggtgaagatgcctgacgtcgacatatctgtacccaaaattgagggtgacttaaaaggtccgaaggtacaggccaaccttggtgcaccagatataaatatcgagggtctcgacgccaaagtcaagaccccaagttttggcatcagcgccccccaggtgtctatacctgacgtgaacgtaaatctaaagggtccaaagataaagggcgacgtaccctccgtgggccttgaaggccctgacgttgatctgcagggcccggaggcaaaaataaaattcccaaaattcagcatgccaaagattgggatacctggggtgaaaatggaaggcggaggtgcggaggtccatgcccaactcccttctctggaaggggatcttagaggccccgacgtgaaactggaagggcctgatgtcagcctaaagggtcctggcgttgacctgcccagcgttaatctgtctatgcctaaggtgtctggcccagatctggacctgaacttaaagggcccctcactcaaaggagatctggacgcctctgtgccctcgatgaaggtccatgcccccgggctgaacctgagcggggtcggcggtaagatgcaggtgggtggagatggcgtgaaggttccaggaattgatgccaccactaagctgaatgtaggcgcccccgacgttaccttgcggggcccctctcttcaaggcgatctggcagtgagcggcgatattaaatgtcctaaggtgtctgtgggtgcacccgacctgagtttggaagcaagcgagggaagtataaaactgcccaagatgaagctccctcagttcggcatcagcacaccaggatccgatctacacgtaaatgctaaaggaccgcaagtcagcggcgagttgaagggtccaggagtcgatgttaatctcaaggggcctcgaatctctgcgcccaatgtggattttaatctggaaggtcctaaagtgaaaggctcattgggagcgacgggagaaataaaagggccaacggtaggaggcggactaccaggaatcggtgtacagggcctggaaggcaacttacagatgccggggataaaatcctccggatgcgacgtcaatttgcccggtgtaaacgtcaagctaccaactggccagatatccggacccgaaatcaaggggggattaaaaggatccgaggtgggtttccatggtgcagcccctgatatatcagtcaaaggacccgcctttaatatggcaagtcccgagtcagacttcgggattaatctcaagggccctaagatcaaagggggagctgatgtttccgggggtgtctctgcaccagacattagtctcggggaaggacatctgagcgtgaaaggctctggaggtgaatggaaggggccacaggtcagtagtgctctcaacctggacacatctaaatttgccggtgggctgcacttcagcggccctaaagttgagggtggggtaaaaggaggacaaataggcttgcaggcccccggactgtctgtcagcgggccacagggccacctcgaaagtgggtctgggaaggtcacatttcccaagatgaaaattcccaaatttacattttctggacgagaactcgtgggaagagagatgggagtcgatgtgcactttccaaaagcggaagctagtatccaggctggtgccggcgatggagagtgggaggagtccgaggtgaagctgaaaaagtctaagatcaagatgccaaaattcaatttcagcaaacctaagggtaaagggggagtcactggttctccggaggcttccatctccggatcaaaaggagatcttaaatctagcaaagcctctctggggtccttggagggagaggcagaggcagaggcatcatctcctaagggaaaatttagcctcttcaaaagcaagaagccccggcaccggtctaactctttttctgatgagagagaattctctggtccatctaccccgactgggacacttgagttcgaaggaggcgaggtgtctctggaagggggaaaggtgaaggggaagcacggtaaacttaagtttggtactttcggaggattaggcagcaagagtaagggacactacgaagtgacaggtagtgacgacgagaccggtaaacttcagggctctggtgtgtccctggcctccaagaaatccaggctgtcaagtagcagcagtaacgacagcggtaacaaggtgggaatccaactgccggaggtggagctgagcgtgtcgacaaaaaaggaatag

SEQ ID NO: 13803 - DNA, 372 bp, synthetic construct
  misc_feature 1..372: note = Description of Artificial Sequence: Synthetic coding sequence
  source 1..372: mol_type = other DNA
atggagaaggaagagaccacccgggagctgcttctgcccaactggcagggctcgggctctcatggtctgaccattgcccaacgtgacgacggggtctttgtgcaagaggtgacccagaattccccagccgctagaactggcgtggtgaaagaaggcgatcagatcgtaggggcaacaatctacttcgacaaccttcagtccggcgaagttacccagctgttgaatactatgggccaccataccgtaggccttaaattgcataggaaaggagatcgatcacccgaacccggacaaacatggactagggaggtattcagtagctgttcctccgaggtcgtcctcagcggtgacgatgaagagtaccagcgatag

SEQ ID NO: 13804 - DNA, 435 bp, synthetic construct
  misc_feature 1..435: note = Description of Artificial Sequence: Synthetic coding sequence
  source 1..435: mol_type = other DNA
atggaaaaggaggagaccactagagagttgctgctgcccaattggcaagggtcaggaagccacggattgactatcgctcaaagagacgacggcgtgttcgtccaggaagtcacgcagaattctcccgctgccaggacgggagtagtaaaggaaggagaccagatcgtgggggcaacaatctatttcgataacctccagtctggcgaggtgacccagctcctcaacaccatgggccatcacacagtgggcctgaagttgcaccgtaagggggaccgttcgcctgaacccggacagacttggacacgagaagtcttttccagctgttcctcagaggttgtcctcagcggggatgacgaggagtaccagcgcatttacacaaccaaaattaagccgaggctgaagtccgaggatggggttgagggtgatttaggatag

SEQ ID NO: 13805 - DNA, 261 bp, synthetic construct
  misc_feature 1..261: note = Description of Artificial Sequence: Synthetic coding sequence
  source 1..261: mol_type = other DNA
atggagaaggaagaaaccactagggagctcttactcccaaactggcagggcagtggctctcatgggctcactattgcccagcgggacgacggcgtgtttgtgcaggaggtgacccagaacagccctgccgcgcgtactggcgttgttaaagaaggcgaccagattgtcggtgccacaatctactttgataatctgcagagcggcgaggtgacccaacttctgaacacaatggggcaccataccgtgggtctgaagctgtag

SEQ ID NO: 13806 - DNA, 366 bp, synthetic construct
  misc_feature 1..366: note = Description of Artificial Sequence: Synthetic coding sequence
  source 1..366: mol_type = other DNA
atggagaaagaagaaacgacacgggagctgcttctgcccaactggcagggcagtggctcgcacggactcacgatagcacagcgcgatgacggcgtcttcgtccaggaagtgactcagaacagccccgcggctaggaccggtgtggtaaaagagggggatcagatcgtgggtgcgacaatttactttgacaatctccaaagcggggaggtcacacaactgctgaataccatggggcaccacaccgtagggttaaaattgcataggaaaggcgatagatctcctgaaccaggccaaacctggaccagggaggtgttttcctcatgctcctccgaggttgtgttaaataccccgcaaccctctgcctag

SEQ ID NO: 13807 - DNA, 2904 bp, synthetic construct
  misc_feature 1..2904: note = Description of Artificial Sequence: Synthetic coding sequence
  source 1..2904: mol_type = other DNA
atggctaaggggttttatatcagcaaatccctaggcatcctggggattctactcggggtggcagctgtttgtaccattatcgccctctctgtggtgtattctcaagagaagaataagaacgcaaacagctctcccgtggcatccacgaccccctcagctagcgccacgacaaatccggcctctgcaactacgctagaccagagcaaagcctggaaccgctaccgactgccaaatacattgaaacccgattcctatagagtaacacttagaccctacctgactcctaatgatcgcgggttatacgttttcaaagggagcagtaccgtacgctttacatgtaaagaggcaacggacgttatcatcatccacagcaaaaaactgaactatactctgagtcagggccacagagtggtgctccggggcgtgggtggctcccagcctcctgatatcgataaaacggagctggtagaaccgactgagtatctggtagtgcaccttaagggctcactggtaaaggattcacagtatgagatggactccgaattcgagggcgagctggctgatgaccttgccgggttctatagatccgaatatatggaggggaacgtcaggaaagtagttgccactactcaaatgcaggcagccgacgcccggaaaagcttcccatgcttcgatgagcctgcaatgaaagctgaattcaatatcaccctgattcacccaaaagacctaacggccctgtccaacatgttgcctaaagggccgtctacacctctgcccgaagacccaaattggaatgttaccgagttccacactacccctaagatgagtacatatttgctcgcttttattgtttcagagtttgattacgtggagaagcaagcctctaacggcgtgctgatacggatttgggcccgaccatccgcaattgctgccggacatggggattatgcccttaatgttacagggccaatccttaacttctttgcgggacactacgataccccctaccccctgcctaagtctgaccaaataggactgccggattttaacgcaggagctatggagaattggggcctggtcacataccgagaaaattcactgttgttcgacccacttagcagctcatcatcaaacaaggagagggtcgttactgttatcgctcacgaactggcccaccagtggtttggcaatctagttaccatcgagtggtggaatgatctctggctgaatgagggattcgcatcgtatgtcgaatacttgggggccgattacgcagaaccaacctggaaccttaaggatcttatggtgctcaacgacgtttatcgtgtgatggccgttgatgctttagcatcttcgcatcctctgtcaacccctgcgtccgaaattaacacccctgcccagatctctgaactgttcgacgcgataagctattctaagggagcttccgtgcttcgcatgttatcctctttcctgtcagaggacgtatttaaacagggtttagcttcttatttgcacaccttcgcgtatcagaacacaatctatctaaatctgtgggaccatcttcaggaggctgtgaataaccgctctatacagctcccaacaactgttagagatattatgaaccggtggacattgcaaatgggattccccgtgattacagtggatacctctacaggtactctgtcacaggagcattttctcctcgaccctgacagtaacgtaactaggccttctgaattcaattacgtttggatcgttcccattacatccatcagggacgggaggcagcagcaggactattggctcatcgatgtgcgcgcacagaatgatcttttctctacatctggaaatgaatgggtgttgctgaatctcaatgtgaccggttattatcgcgtcaattacgatgaagagaactggcgcaagattcaaacccagctccaacgtgaccatagcgcaattccagtcatcaacagagcacagatcatcaacgatgcattcaatttagcctccgctcacaaagtaccagtcaccttggctcttaataatactctgtttctgatcgaagagaggcagtatatgccatgggaggcagcgctcagttccttaagctacttcaaattaatgttcgacaggagtgaagtttacggcccaatgaagaactacttaaaaaagcaggttactccactgttcattcactttagaaacaatactaataattggcgcgaaattcccgagaatttaatggatcagtattccgaggtgaatgctatcagtacagcatgttctaacggagtcccagagtgcgaagagatggtctctggcctgtttaagcagtggatggaaaaccctaataataatccaatacatccaaacctccgatctaccgtctactgtaacgctatcgcccagggcggtgaagaggagtgggattttgcttgggagcagttcaggaacgcaaccctcgtgaacgaggcagacaagctccgcgccgctctggcttgcagcaaagagctatggatccttaaccgttacctgtcttatactctaaatcctgacctcatccgaaagcaggatgccaccagcacaatcatctcaattaccaataacgtcattggtcaaggcctcgtgtgggacttcgtccagagcaactggaaaaagttgttcaacgattacggcggcggttccttttcatttagcaatctgatccaggccgttacacgccggttctccacagaatacgagctgcagcagctggagcagttcaagaaagacaacgaagaaacaggcttcgggagtgggacaagagccctggagcaggcattagaaaagacaaaggccaatattaagtgggtgaaagagaacaaagaggtggtcctgcagtggtttactgaaaactctaagtag

SEQ ID NO: 13808 - DNA, 312 bp, synthetic construct
  misc_feature 1..312: note = Description of Artificial Sequence: Synthetic coding sequence
  source 1..312: mol_type = other DNA
atggcaaagggcttctatatttccaagagtctgggaatcctgggaattctattgggcgtggccgccgtgtgcactattattgccctttctgtcgtctatagccaggagaaaaataagaacgcaaacagttccccagtggcctcaactacacctagcgccagtgccaccactaaccccgcctcagccacgacactggatcagtcaaaggcgtggaaccgatacagactgccaaataccctcaaacccgacagttacagggtaaccctccgcccctaccttacaccaaacgatagaggcctgtatgtgttctag

SEQ ID NO: 13809 - DNA, 186 bp, synthetic construct
  misc_feature 1..186: note = Description of Artificial Sequence: Synthetic coding sequence
  source 1..186: mol_type = other DNA
atggctaagggtttttatatctcgaagagtctgggcatcctggggatccttctaggagtggccgccgtgtgtacaattattgccctttccgttgtgtattcgcaggagaagaacaaaaatgccaacagtagccctgtggcatctactacgcccagcgcttcagccaccactaacccagcttcatag

SEQ ID NO: 13810 - DNA, 381 bp, synthetic construct
  misc_feature 1..381: note = Description of Artificial Sequence: Synthetic coding sequence
  source 1..381: mol_type = other DNA
atgaatcagaataccgataagatctcggggtctggatctaactccgatatgatggagaattctaaagaagaaggaacttcctctagcgagaaatccaagtcttcaggatcgagccgatcgaaacgtaagccctccattgtgactaagtatgtggagagcgatgatgaaaagcctctcgatgacgaaaccgtgaacgaggacgctagcaacgagaacagcgaaaacgacattaccatgcagtctcttcctaaggggactgtaattgtgcaaccagaacccgtactcaacgaagataaagacgactttaaggggcctgaatttcggtctcgaagcaagatgaaaacagagaatcttaagaagcggggcggtaaatacaaatag

SEQ ID NO: 13811 - DNA, 7479 bp, synthetic construct
  misc_feature 1..7479: note = Description of Artificial Sequence: Synthetic coding sequence
  source 1..7479: mol_type = other DNA
atgacagccgaaccgatgtctgaatcaaaattgaatacgttggtgcaaaagttacacgactttcttgcccacagttctgaagagtctgaggagacttccagcccaccaagactcgcaatgaatcaaaacaccgataagataagtggaagtgggagcaattcagatatgatggagaactcgaaggaggagggtaccagtagctccgagaaatctaagtcctcaggctccagtcggtcaaaacgaaaaccctccatagtgacaaagtatgtcgaaagtgatgacgagaaacccctggacgatgagacagttaacgaagacgctagtaatgagaactccgagaacgacataacaatgcagtccttaccaaaaggaaccgtcatcgttcagcctgagcccgttctgaatgaggataaggatgactttaagggaccagaattccggagcaggtcaaaaatgaaaacagaaaatctcaaaaagaggggtgaagacggtcttcacgggatcgtgtcgtgtaccgcatgtggccaacaggtcaatcacttccagaaggactctatttatcgccacccaagccttcaggttctgatctgtaagaactgctttaagtactacatgtctgacgatatctctcgcgacagtgacggaatggatgagcaatgccgctggtgcgcagagggtggaaacctgatttgctgtgacttctgccacaacgccttttgcaagaagtgtatcctgcgcaatctgggcaggaaagaactttcaacaatcatggacgagaataatcagtggtattgttacatatgtcacccagagccactgttggatttggtgactgcctgtaactccgtgtttgaaaacctggaacagctgctccagcaaaataagaaaaaaattaaagtggacagcgagaaatccaacaaggtgtacgagcacacaagtagattttcccctaagaaaaccagttcaaactgtaacggggaagaaaaaaagctggatgactcctgcagcggctcagtcacgtattcctactccgcgctgattgttcccaaggagatgattaagaaagccaagaagctcatagaaacaacagccaacatgaactccagctacgtaaaatttctaaagcaagccaccgacaattcagagatatccagcgccacaaaattgcgccagttaaaggccttcaagtcggtgctggcagacatcaaaaaagcacacctggctctggaagaggatctgaattcggaattcagggccatggacgccgtgaacaaggaaaaaaacaccaaagagcataaagtcatagatgccaaattcgagacaaaggcacgcaaaggcgagaaaccatgcgctcttgaaaagaaagatatcagcaagtccgaagccaagctgtcacgtaaacaggtcgacagtgagcacatgcaccaaaacgtccctactgaggagcaacggacaaacaaatccaccggaggggaacacaagaagtcagaccggaaggaggagccacagtacgaacctgcgaacaccagtgaagacctggacatggacatcgtgtccgtgccatctagcgtgccagaggacatatttgaaaatcttgagacagccatggaggtgcagagctctgtagatcatcagggggacgggtcttccggaactgagcaggaggtggagtcgtcatccgtgaagttaaatatctcatcaaaggacaaccggggaggcattaaaagtaagacgaccgctaaggtaaccaaggaactgtacgttaagctgacacccgtaagcctgtcaaattcccctatcaagggggctgactgccaagaagtgccgcaggataaggacggatataagtcctgcgggttaaaccctaagttagagaaatgcggcctcgggcaggaaaatagtgacaacgaacatcttgtcgaaaatgaggtgagtttacttctggaggagagtgacctgaggcggtctccccgtgtcaagactacccctctcagacggccaacagagactaatcccgttacatcaaactcagatgaggagtgtaatgaaaccgtaaaggaaaagcaaaaactctccgtgcctgtgcgaaaaaaagacaaaagaaatagttccgatagcgctattgataatcctaagcccaataaattgcccaaatctaaacaaagcgagacggtggaccaaaacagcgatagcgatgaaatgctggccatacttaaggaggttagtagaatgtcccactctagcagcagtgatactgatatcaatgagatccataccaatcacaagactctgtatgacctaaaaacacaggccggcaaagatgacaagggtaaaagaaaacggaaatcaagcacttcaggctctgactttgacactaaaaaagggaaaagtgctaaatcctctattatttcaaaaaaaaaaaggcagacccagtctgagtccagcaactacgacagtgaattggagaaggagataaagtctatgtcaaagatcggagcggctaggactactaagaagaggatccccaacacaaaagatttcgacagcagcgaggacgaaaagcacagtaagaagggaatggacaaccagggtcacaaaaatttgaagaccagtcaggaggggagttccgatgacgcagagaggaagcaggagagagagaccttcagtagtgcggaaggaaccgtggacaaagacacgaccattatggagctgcgcgatcggcttccaaaaaagcagcaggcatctgcttctacagacggtgtcgataaactgagcgggaaagagcagtcatttacttccctggaggtccggaaagtggcggagaccaaggagaagagcaaacacttgaagacaaagacatgcaagaaagtgcaggacggattgtctgatatcgcagaaaaatttctgaaaaaggatcagtccgatgagacatccgaagacgacaaaaagcagtcaaagaaagggactgaagagaagaaaaaaccatctgattttaagaaaaaagttatcaagatggaacagcaatacgagagttcatccgacgggaccgaaaagctccccgaaagagaggaaatctgccactttccaaagggcatcaaacagattaagaatggtacaaccgacggcgagaaaaagtcgaagaaaatccgcgacaagacatctaaaaagaaagacgaattgagtgactatgcggaaaaaagcacaggcaagggagatagctgtgattcgtctgaggacaaaaagtcaaaaaatggagcatacggtcgcgaaaagaagcggtgcaaattactgggtaagagttctcgaaaacggcaggactgctcaagcagtgatacagaaaagtacagtatgaaagaggatggatgcaactccagtgacaagaggcttaagagaattgagctgcgggaacgccgaaacctatcatctaagagaaacactaaagagatacagagtgggtctagtagttcggacgccgaggaaagtagtgaagataataaaaagaaaaagcagcggacttccagcaagaagaaagcagtgattgtaaaggagaagaagagaaacagtttacgcacttccactaaacggaagcaggccgacattacttcaagttcctcatcggacatcgaggatgacgaccaaaatagcattggtgagggcagtagcgacgaacagaaaatcaaacctgtaaccgaaaacctagtcctgtcctcgcataccgggttctgccaatccagcggcgacgaggccttgtccaaatccgtacccgtcacagttgacgacgacgatgatgacaacgatccggaaaaccgcatcgccaaaaagatgctgctggaggagatcaaggcaaacctgagtagtgacgaggacggttccagtgacgacgagcctgaagagggaaagaagagaactggcaagcagaacgaggagaatccaggggacgaggaggcaaagaaccaggtgaattcagagagtgactccgatagcgaggagtctaagaagccgcgatacaggcatagactgttacggcataagctgaccgtgtccgacggcgagagcggggaggagaagaagaccaagcccaaagaacacaaggaggtgaaggggaggaaccgccgcaaggtaagcagtgaggactctgaagactccgacttccaggagagcggagtatccgaggaagtgtccgagtctgaggacgagcagcggccccggacccggagcgctaagaaggcagaactagaggagaatcagaggagctataagcagaaaaagaagcggcgccgcatcaaagtgcaggaggattcaagctcggagaacaagtcaaatagcgaagaagaagaggaggaaaaagaagaagaagaagaggaggaagaggaggaggaggaagaagaggaggatgagaatgatgacagcaagagtcctgggaagggcaggaagaaaataaggaaaattctcaaggacgacaagcttcgtacggagacacagaacgcactgaaagaggaggaggagcggaggaaacggatcgccgaaagggaaagggagcgcgaaaaactacgcgaagtcattgagatcgaagacgcaagccctactaagtgtcctattactaccaagctggtactggatgaggacgaggagactaaagagccacttgtgcaggtccaccggaacatggtgatcaagctcaaaccacaccaggtggatggcgtgcagttcatgtgggattgctgctgcgagtctgtaaaaaaaacaaaaaagtcaccaggatccgggtgcattttggctcactgcatggggttgggaaagacgctccaagtggtcagcttcctccacaccgtgctgctgtgcgacaaacttgacttttccaccgcgcttgttgtctgcccactgaacacagccctgaactggatgaacgagtttgaaaagtggcaagagggcctcaaggacgacgagaaactggaagtctctgagctggccaccgtaaagagaccacaggaaaggagctacatgctgcagcggtggcaagaggatgggggggtgatgatcattgggtacgagatgtatcggaatttagcccagggaaggaacgtgaaaagccggaagctgaaggagatttttaataaagccctggtggatccggggcccgacttcgtggtatgcgatgagggccacattctaaaaaatgaggctagcgcagtgtcgaaggcaatgaacagcattcgaagtcgccggcggatcattctcacaggaacaccccttcagaacaatttgatcgagtaccattgtatggttaactttattaaggagaacttgctcgggagtatcaaggaatttcgaaaccgatttataaacccaatacaaaatggtcagtgtgcagacagcaccatggtggatgttcgcgtcatgaagaagcgtgctcacatactgtatgagatgttggccggctgcgtgcaaaggaaggattatacagcgctcacaaaatttctcccccccaagcacgaatacgtgctggccgtgcggatgaccagcattcaatgtaaactgtaccaatattacctggatcaccttacaggtgtggggaataacagcgaggggggcaggggcaaggctggagccaagctgtttcaggactttcagatgttatccagaatttggacccatccctggtgcctgcaactcgattatatctcaaaagagaacaagggatactttgacgaagacagcatggatgagttcattgcttcggattcagacgagacttctatgagccttagctctgacgactacacaaaaaaaaaaaagaaaggtaaaaaagggaagaaagactcctcctctagtggatcaggatccgacaatgatgtggaggtaatcaaggtttggaacagccggagcaggggaggaggtgaagggaacgtggacgagacgggcaataacccttccgtctcactaaaattggaggaatctaaggctactagtagctctaacccttcgtctcctgcgccagactggtacaaagatttcgtgactgatgccgacgcagaagttctggagcacagtggcaagatggtgttgctttttgaaatcctgaggatggcagaagaaatcggcgacaaggtgctggtcttttctcagagtctgattagcctcgacttgatcgaggactttcttgagctggccagcagggagaaaaccgaagataaagacaaacctctgatctataagggagagggaaagtggctcagaaacatcgactactatcggctagatggatccacaactgcacaatctagaaagaaatgggcagaagagttcaacgacgagaccaacgtgagaggcagactgtttatcatcagtaccaaagccggctcgctcggcattaacctagtcgcagctaaccgcgtgatcattttcgacgcatcatggaacccctcgtacgatatccagagcatcttccgcgtctatcgattcggccagaccaagccagtctacgtgtacaggtttcttgcccaggggaccatggaagataagatttatgaccgccaggtcaccaagcagtcattgtctttccgagtggttgaccagcagcaagtcgaacggcatttcacaatgaacgaacttactgaattatacaccttcgagcccgatctgctcgatgacccaaattctgagaaaaagaagaagcgggataccccaatgttgcccaaagacaccatactagcagagctgctgcaaatccataaggaacatatcgtgggctatcacgaacatgactctctgcttgaccacaaggaagaagaagaattaaccgaagaggagcgtaaggccgcctgggctgaatatgaggcagagaaaaaaggactgactatgagattcaatattccgacagggacaaatctccctccggtctcttttaacagccagactccgtatattccattcaatctgggagccctgtccgccatgagtaatcagcagttggaggacttgataaaccagggccgcgaaaaggtggtggaagcaaccaattccgtgaccgcagtgaggatacagccgctggaggatatcatatccgcagtttggaaggagaatatgaatctgtccgaggcacaagtgcaggccttagccctaagccgtcaggcatcacaggagctcgacgtgaagcgccgtgaggcgatctataacgatgtgctgacaaagcagcagatgttaatatcatgcgtacaaaggattctgatgaataggcggttacagcagcagtataaccagcagcagcagcagcaaatgacttatcagcaggccactttggggcatttgatgatgcccaagccgcctaatctcattatgaatccttcaaactaccaacagatcgacatgcgtgggatgtatcagcccgtggctggcggaatgcagcccccacccttgcagcgagcgccacctccgatgcgatcgaagaaccccggaccgtctcaaggcaaatctatgtag

SEQ ID NO: 13812 - DNA, 7365 bp, synthetic construct
  misc_feature 1..7365: note = Description of Artificial Sequence: Synthetic coding sequence
  source 1..7365: mol_type = other DNA
atgacagctgagccaatgtctgagtctaaactgaacacacttgtgcagaagttgcacgactttttagcccatagttctgaagaaagcgaggaaacttcaagccccccacgactcgctatgaaccagaacactgacaaaatcagtgggtctgggtcaaacagtgatatgatggagaactccaaggaagagggcactagttcttccgaaaagtccaagtcttccggatctagcaggagtaagcggaaacccagcattgttacaaagtatgttgaaagtgacgacgaaaaaccgctggacgatgaaaccgtgaacgaggatgcctctaacgaaaattcagagaacgacatcacaatgcagtcccttcctaaagaggacggcctgcatggtatcgtcagttgcacagcatgtggccagcaggtcaatcactttcaaaaagattccatttatcggcatcccagtctccaagtgctgatttgcaaaaattgttttaaatactacatgtctgacgatatctccagggacagcgacgggatggatgagcagtgccgatggtgcgccgagggcggcaacctgatttgctgcgatttctgccataatgcgttttgcaagaaatgtattctaagaaatttaggccgaaaggagctcagtacaattatggacgagaacaatcagtggtactgctacatttgtcatccggaaccattgctggaccttgtgacagcctgtaactctgtgttcgagaatcttgagcagcttttacagcaaaacaagaagaaaataaaagtggactctgaaaagtcaaacaaggtttacgagcacacatctagatttagtcctaagaaaacctcctccaactgcaatggtgaggaaaaaaaacttgatgatagttgcagcggtagcgtgacctattcctactccgccctcattgtaccaaaggagatgataaagaaagcaaagaagcttatcgagacgactgcaaacatgaacagctcgtatgttaaattcctgaagcaggccaccgacaactcagaaatcagtagtgcaactaagctgcgacaattgaaggcttttaagtccgttctcgccgatatcaaaaaggcgcatttagccctcgaagaggacctcaactccgagttcagggcgatggacgccgtcaataaggagaagaacacgaaagagcataaagtcatagacgcaaaatttgaaactaaggcgagaaagggtgagaagccctgcgctctggaaaaaaaagacatcagtaagagtgaggccaaactgagcaggaagcaggtcgacagcgaacacatgcaccagaatgtccccacagaagagcaacgcactaataagagtaccgggggggaacacaaaaagtccgacaggaaggaggaaccccagtacgaacccgccaatacatcggaagatctggacatggatatcgtgtcagtaccctcctccgtacctgaggacattttcgaaaatctcgaaacggctatggaggtgcagtcatctgtcgaccaccagggggacggctcctctggcacagagcaggaggttgagtcatcttccgtgaagctgaatatcagtagtaaagacaataggggagggataaagtcgaaaaccaccgctaaggtgaccaaagaactgtatgttaagctgacacctgtttccctttccaattcgcccattaagggagccgactgccaggaggtaccccaagacaaagatggatacaagagttgcggcctgaacccaaagctggagaagtgtggccttggccaagaaaacagcgacaatgagcaccttgtggagaacgaggtctctctgctgctggaagagtcagacctgcgtagatctcccagagtcaagaccacgcccctccgacggccaacagaaactaaccctgtgactagcaattccgatgaggagtgtaatgaaacagtgaaggaaaagcagaagctcagcgtgccggtccggaagaaggacaagcgcaattcaagtgacagcgccatcgataatcctaaacctaataaactgcctaaaagcaaacaaagcgaaaccgtagatcagaacagcgattctgatgagatgcttgccattctcaaagaggtcagcaggatgtcccatagttcgtcctcagataccgatattaacgaaattcataccaatcacaagacactatacgatctgaagacacaagcaggtaaggatgataaaggaaaacgaaaacgcaaatcaagcacttccggcagcgactttgataccaagaagggcaagtccgcgaaatctagcattatttctaagaagaaacgtcagacccaatccgaaagctctaattacgacagcgagctggagaaggaaattaaatcaatgagtaagatcggagccgcacgcaccaccaagaagaggattcccaacacaaaggatttcgattcctccgaagacgaaaaacattctaaaaagggtatggataaccaaggtcataaaaatttgaagaccagccaggaggggtctagcgatgacgcagagcgcaagcaagagcgggagaccttctcgagtgctgaaggcacagtcgacaaggataccactatcatggagctccgtgataggctgccgaagaagcagcaagcctcagcttcaacagacggcgtggataaattatcaggcaaggagcagtcttttacaagtctggaggtgcggaaggtcgctgaaactaaagaaaagtcaaaacacctgaagactaaaacatgcaagaaagtgcaagacgggctttccgatatcgcggaaaagtttttgaagaaagaccaaagcgacgagaccagcgaagacgacaagaaacaaagtaaaaaggggactgaggaaaagaagaagccaagcgattttaagaaaaaggtgataaagatggagcaacagtacgagagttcctctgacggtactgagaagttgcctgaacgcgaggagatttgccattttcccaaaggtatcaagcagattaaaaatgggaccacagacggcgaaaaaaagtcaaaaaaaattagagacaaaacaagtaaaaagaaggacgagcttagtgactacgctgagaaatcaactggtaagggcgacagttgcgattcctcagaagacaaaaagtctaaaaatggggcctatggccgcgaaaagaagaggtgcaagctcctgggtaaaagttcaagaaaacggcaggattgcagttccagtgacacggaaaagtattcgatgaaggaggatggctgcaatagctctgacaagcggctgaagcgaattgagctgagagagcggagaaacctgtcgtccaagagaaacaccaaggagattcagtccgggtcgtccagctccgatgcagaggaatcaagcgaggataataaaaagaaaaagcagcggacgagctctaaaaagaaggctgtgatcgtgaaggagaagaagcggaactctcttagaacatccactaaacgaaagcaggcggacataacatccagcagttcctcagacatcgaagatgatgatcagaattctataggagagggatcatctgatgaacagaagataaagcctgttacagagaatctggtcctgtcatctcacactggcttctgtcagtcttcaggcgacgaggccctgagcaaatccgtgcccgttaccgtagacgatgacgatgacgacaacgacccagagaaccgtatcgccaaaaagatgctccttgaggagataaaagcgaacttgtcatctgatgaggatggctcaagcgatgatgaacccgaggagggaaaaaagcgaaccgggaaacagaacgaagagaatcctggagacgaggaggcaaaaaaccaggtgaatagcgagtctgattccgatagcgaggagtctaagaagccgaggtacagacaccggctcctcaggcataaattaaccgttagcgatggagagagcggagaagaaaagaagaccaagcctaaggagcataaagaggttaaaggccgtaacaggcgcaaggtatcttcagaggactccgaggacagtgacttccaagagtctggggtgtccgaagaagtgagcgagagcgaggatgagcagcgcccgcgtacccgcagcgccaaaaaagctgagcttgaagaaaaccaacgttcttataagcagaagaaaaaaaggaggcgcattaaggtgcaagaagattcatcctccgagaacaagtcgaacagtgaagaagaggaggaggagaaagaggaggaagaagaagaggaagaggaagaggaggaggaggaagaagacgaaaatgacgattcaaaaagccccggtaagggccgcaaaaagatcagaaagattttaaaggatgacaaattgcggaccgagacccaaaacgccttaaaggaggaggaggagagacgtaaacgcatcgcagagcgggagcgggaacgagagaaattgcgcgaggttatcgagatcgaggacgcgtcccccactaagtgccccatcaccactaaactcgtgctggatgaagatgaggagacaaaggagcccttagtccaggtgcacagaaatatggtcatcaagctcaagcctcaccaggtcgatggcgtgcaattcatgtgggactgttgctgcgaatcggtcaaaaaaaccaaaaaatctcccggctccggatgcatcctggcgcactgtatggggttaggcaaaacactgcaggtcgtgagcttcctccatacggtgctcttgtgtgataaactggacttttccacagctctcgtcgtttgtcctttgaacacagcattaaattggatgaatgagttcgagaagtggcaagaaggacttaaagacgatgaaaagctggaggtctccgagctagctaccgtcaagaggccacaggagcgatcatatatgctgcagcgctggcaggaggatggcggggttatgattattgggtacgaaatgtatcgtaatttagcccaggggcgaaacgtcaagagcagaaagctgaaggaaattttcaacaaggcgttggtcgatccagggcccgacttcgtggtatgcgatgaggggcatattctgaaaaacgaggcatcggctgtgtctaaggcaatgaatagtattcggagcagaaggagaatcatcctcactggcacgcctctccagaataacctcatcgaatatcattgcatggtgaatttcataaaggaaaaccttctcggttccataaaagagttccgcaaccgattcataaatccaatacaaaatggacagtgcgctgattctaccatggtcgatgtgcgtgttatgaagaaacgcgcccacattctgtatgaaatgctcgctggctgtgttcagcgtaaggattatacagctttgaccaagttcttgccacccaagcacgaatatgttttggcagtgaggatgaccagcatacagtgcaagctctatcagtactaccttgatcacttaactggcgtggggaataatagcgagggtgggcgggggaaagccggcgccaagctgtttcaggactttcagatgctcagcagaatatggacccacccctggtgcctgcagctagattatatctcgaaagagaacaagggttacttcgatgaggactctatggatgagtttatcgccagcgactccgacgaaacttctatgagtctcagcagcgatgactacacgaaaaagaagaaaaagggcaagaaggggaaaaaggattcaagttcatctggatccggcagtgataatgatgtggaggtaatcaaagtctggaatagccggtcccgcggagggggggagggtaatgtagacgagacagggaacaacccgtcagtttccctgaagctggaagaatccaaggcaactagctccagtaatccaagcagcccagctcctgattggtacaaggatttcgtgactgacgccgatgcggaagtgctcgagcactctgggaaaatggtcttattattcgagatcttgcggatggcggaagagattggcgacaaggtgttggtgttttcacagtccctaattagtctggaccttatcgaagattttctagaactggcgtcccgggagaaaacagaggataaggacaaaccactgatatacaagggagaggggaagtggctgcggaatatcgattattatcgcctagacggatcaaccacagcgcaatcacgcaagaaatgggccgaagaatttaatgacgaaacaaatgttagagggcgattatttatcatatctacgaaggccgggtcactcggtatcaatctcgtcgccgccaaccgcgtgatcatcttcgatgcaagctggaatccttcatatgatatccaatctatcttcagggtgtatcggtttgggcagacaaaacctgtgtacgtttacaggttcctggcacagggaaccatggaagataagatctacgataggcaggtcactaagcagtcactctcctttcgcgtggtggaccagcaacaagtggaaaggcatttcacaatgaacgagttgacagaactgtatacattcgaaccagatctgctggatgaccccaattccgaaaaaaagaagaagagggacactccaatgttaccgaaagacaccatcctcgcggagctgctgcagatccataaagagcacattgtcggctaccacgaacacgacagtttattggatcacaaagaggaggaggagctgacagaggaggaacggaaagccgcgtgggctgaatacgaagctgagaaaaagggactgactatgaggtttaacatcccaacaggcactaatctgccacccgtctcctttaattcccaaacgccatatataccatttaatttgggagcactaagtgccatgagtaaccaacagcttgaagacctcatcaaccaaggccgcgagaaggtggtcgaggccacgaattctgtgaccgctgtaaggatccagcctctggaagacattatcagtgctgtctggaaggaaaacatgaatttgagcgaagcccaggtgcaggctctcgcactctcaaggcaagctagccaggaactggacgttaaaaggagagaagccatctacaatgacgtgctcaccaagcagcagatgctcatttcatgcgtccaacgaatcttgatgaatcgacgtctccagcagcagtacaaccagcaacagcaacagcaaatgacatatcagcaggccacattgggccaccttatgatgcctaagcctccaaatttgattatgaatccgagtaattatcagcaaatcgacatgagaggaatgtaccagccagtcgctggagggatgcagccaccaccactacagagagcaccaccccctatgcgtagtaagaaccctggaccatcccaggggaagtccatgtag

SEQ ID NO: 13813 - DNA, 369 bp, synthetic construct
  misc_feature 1..369: note = Description of Artificial Sequence: Synthetic coding sequence
  source 1..369: mol_type = other DNA
atcaactataatcgtgacaagatcagcgggagcggcagcaactctgatatgatggaaaacagcaaggaagagggcactagctcctccgaaaaatccaaatctagtggcagttctaggtctaaaaggaaaccatccatcgtgacaaaatatgtggaaagtgacgatgagaagcctctggatgatgagaccgtaaatgaggacgccagcaacgagaatagcgaaaacgacatcactatgcagtcccttccaaaaggcactgtgatcgtgcaacccgaacccgtgctaaatgaagacaaggacgatttcaaaggccctgagtttcgatcaagatcaaagatgaaaactgaaaatttgaagaaacgcggctag

SEQ ID NO: 13814 - DNA, 4038 bp, synthetic construct
  misc_feature 1..4038: note = Description of Artificial Sequence: Synthetic coding sequence
  source 1..4038: mol_type = other DNA
atgtcagagtccaagttgaatacacttgtccagaagttgcatgactttcttgcgcattcatcagaagaatctgaagagacaagttcgcctccccgactggctatgaatcagaataccgataaaatttcaggctcaggttccaactcggacatgatggaaaacagtaaagaggaaggcacgtcgtcttccgagaaatctaagtcctccgggtcatcccgcagtaagcgcaagccttctatcgtcactaagtacgtggagagcgacgatgaaaagccattggacgatgagacagtgaacgaagatgcctccaacgagaattcagaaaacgacataaccatgcagagcctgcccaaagacggactccatgggatcgtctcatgcacggcatgcggtcaacaggtgaatcactttcaaaaggattctatttatcggcatccatcccttcaggtattgatttgtaaaaactgcttcaaatactacatgagcgacgacatttcacgggattctgacgggatggacgagcagtgccgatggtgtgctgagggagggaatttaatctgctgcgacttctgccacaacgctttttgtaaaaaatgcattctaagaaatctcgggaggaaggagttgagcacaatcatggacgaaaataatcagtggtactgttatatctgtcatccggaaccgctcctggacctcgtcacagcctgcaattctgtgttcgaaaacctcgaacagctgctccagcagaataaaaagaagatcaaggtcgattccgaaaagtcgaacaaggtctatgagcataccagtcgcttctcgccaaagaaaactagcagcaactgcaacggtgaggagaaaaagctggacgactcttgcagtggttccgtaacctactcatactctgccctgattgttcccaaagagatgatcaagaaagcaaaaaagctgatcgaaactacagctaacatgaacagctcttacgtgaaatttctcaagcaggcaacggacaacagcgagatttcaagcgcgactaaactcagacagctgaaagctttcaagagtgtcctggccgatatcaaaaaagcacacttagccctggaagaagacctgaatagtgagtttagagctatggacgcagtcaataaagaaaaaaacaccaaggagcacaaagtgattgatgccaagtttgaaaccaaggcgcgcaaaggcgagaaaccgtgcgccctggagaaaaaagatatctccaagagcgaggccaagctgagccgcaagcaggtagacagcgaacacatgcaccagaacgttccgaccgaggagcaacgtacgaataaaagtacaggcggggagcataagaagtctgaccggaaagaagagccccagtacgaacccgccaacacgtctgaagacctcgacatggatattgtatctgtgccaagttcagtgcctgaggacatctttgaaaatctggagaccgccatggaggttcagtcatctgttgaccaccagggagatggctcttccggcactgaacaggaggttgagtcaagcagcgtcaaactgaacatctcttcgaaggacaatcgtggcggggccgactgtcaggaggtgcctcaagacaaggatggttacaagagctgtgggcttaaccccaagttagagaagtgcggcctgggacaagaaaactcagacaacgagcacctcgtggaaaatgaggtgtctcttctgcttgaggaatcagacctgaggagatcgccccgggtcaagactacgcccctgcggaggccaactgagaccaaccccgttacttccaacagcgatgaggaatgtaacgagactgtgaaggagaagcaaaagctaagtgttccggtccggaaaaaggataaacgaaacagctccgattctgctatcgataaccccaaacccaataaactgcccaaaagcaaacagagcgagaccgtggaccagaactctgactcggacgaaatgctcgctatactgaaggaggtctcacgtatgagtcactcgtctagtagtgatacagacataaacgagattcataccaaccataagaccctgtatgacctcaaaacacaggcgggcaaggatgacaaaggtaaacgcaagaggaagtcttctaccagtggatcggactttgacacaaaaaaagggaaaagcgctaagagttccattatcagcaagaagaagcggcagacacaaagtgaaagctccaactatgacagtgagctcgagaaggagattaagtccatgtccaaaattggggccgcaaggacgaccaaaaagcggatccccaataccaaagactttgattcatccgaggatgagaagcactcaaagaagggcatggacaaccagggtcacaagaatctgaagactagccaggaggggagttctgatgacgccgaacgtaaacaggaacgagaaacattcagttctgccgaggggacagtggataaggataccactattatggagctgagagatcgtctgccaaagaagcagcaagccagcgcctctaccgacggcgttgacaagctgtccggaaaggagcaatcatttacttctctcgaagtccgtaaagtggccgagacaaaggaaaaaagtaaacatttaaaaacaaagacgtgcaaaaaagtgcaggacgggctgtcagatatcgccgagaaatttctgaaaaaggaccagagtgatgagacgtctgaggatgacaaaaaacagagtaaaaaggggactgaggagaaaaaaaagccttctgacttcaagaagaaagttattaagatggaacagcagtacgagtcttcctcagacggaactgagaaactcccagaacgggaagagatttgccactttccgaaagggatcaagcagatcaagaacggcaccaccgacggggaaaagaaatcgaagaaaatacgggacaaaacaagcaaaaaaaaagatgagttgtcggactacgccgaaaagtccacaggtaaaggagactcctgcgattccagcgaggacaagaagtctaagaacggggcctatggccgagaaaagaagagatgcaaactcctgggcaagagttcccggaagcggcaggattgctcaagctcggacaccgagaagtattcaatgaaagaagatggctgcaatagttccgacaaacgcctgaagcggattgagcttcgagagcgtaggaatctgtcatctaaacggaatacaaaagaaattcagtctggttcctcttcttcggacgcagaagagagcagtgaggacaacaaaaagaaaaagcagcgcacttcttcgaaaaaaaaggccgttatcgtgaaggaaaagaagagaaacagtctccgtaccagtaccaagcgcaagcaagccgatatcactagcagtagcagctctgacatcgaggacgatgaccaaaactctatcggagaaggaagctctgatgagcagaagatcaagccggtcactgagaatcttgtcttaagttcccacaccggattctgtcagagctctggcgatgaagctctttccaagagcgtcccagtgaccgtggatgatgacgacgacgataacgatccagaaaaccgtatagcaaagaaaatgctgcttgaggagattaaggcaaacttgtcgagtgatgaggacggctcatccgacgatgagcccgaagaaggcaaaaaacggacagggaaacaaaacgaggaaaacccgggcgacgaagaggcaaagaaccaggtgaactctgaatccgactcagattccgaagagagtaagaagcctagatatcgtcaccggcttctgcgccataagctcaccgtgtcagatggtgaatctggcgaggaaaagaaaacaaaacctaaggaacataaggaggtaaagggccgaaatagacggaaagtgagcagcgaggactcggaagacagcgactttcaggaatccggcgtgagcgaagaggtgagcgagtccgaagacgaacagaggcctaggacccgcagtgccaagaaggcagagctcgaagaaaaccaacggtcttag

SEQ ID NO: 13815 - DNA, 483 bp, synthetic construct
  misc_feature 1..483: note = Description of Artificial Sequence: Synthetic coding sequence
  source 1..483: mol_type = other DNA
taaccagacttcgttgtctgcgacgagggccatattctgaagaacgaggccagtgccgtgtcaaaggcaatgaacagcattaggagccggcgcagaatcattctgacaggcactccactacaaaacaatctgatagagtatcactgtatggtgaacttcattaaggagaacctgctagggtccataaaagagttccgtaatagattcattaacccaatacagaacggccagtgcgctgatagtaccatggttgatgtacgcgtgatgaaaaagcgggcccacatattgtatgagatgctggcaggttgcgtgcaacgaaaagactacacagcgctgacaaagtttctgcccccaaagcatgaatatgtgctcgctgtgcgcatgacatccatccagtgtaaactgtatcagtattacctggaccacctcacagtactgcaccttaacaagatgggaatgctgaaaagcatcaagtacttctag

SEQ ID NO: 13816 - DNA, 2514 bp, synthetic construct
  misc_feature 1..2514: note = Description of Artificial Sequence: Synthetic coding sequence
  source 1..2514: mol_type = other DNA
atgaatcatttggagggctctgcggaggtggaggtgaccgatgaggctgctggcggggaggttaatgagtcagtggaggccgatctggaacaccccgaagtggaagaagaacaacaacagccgcctcaacaacagcactatgtggggcggcaccagcgcggccgagccttggaggacctgcgcgcacagctcgggcaagaggaagaagagcggggagaatgcttagccaggtctgccagcacagaatcaggcttccacaaccatactgacactgcagagggagatgtgatcgctgctgccagagacggttacgatgccgagcgggcccaggatcccgaagacgagagcgcttatgcagttcagtacagacctgaggcagaagagtacaccgaacaggccgaagctgagcatgccgaggcgacacaccggcgcgctctgcccaaccacctgcatttccacagcctggaacatgaggaggctatgaacgcggcttacagcggttatgtgtatactcacagattgtttcaccggggtgaggatgagccctactccgagccatatgcagattatgggggactgcaggagcacgtgtatgaggaaatcggcgacgcgcccgagctcgatgctcgggatggcctgcggctctatgagcaagaacgcgatgaggccgccgcctatagacaggaggccttgggtgcgaggctccatcattatgacgaaaggtcagacggagagtctgatagccccgagaaggaggcagaatttgcaccttacccgcgcatggattcctacgagcaggaggaggacattgaccaaatcgtggcagaagtgaagcagtcgatgtctagccaaagccttgataaggccgccgaggacatgccggaggctgaacaggatctcgaacgaccgcccacccctgccgggggtagacctgacagtcccgggctgcaagctcctgctgggcagcagagggccgtcgggcccgccggaggtggcgaggcaggacagcgatacagcaaggagaagagggatgctatctctctggccattaaagatattaaggaggcaatcgaggaagtgaaaactcgaaccattcggtctccctacaccccagatgagcccaaagaacccatctgggtaatgagacaagacatatccccgacccgggattgtgatgaccaacggccaatggacggggatagcccttcacccgggagcagtagccctctgggcgccgaatccagctccacaagtctgcacccgtcagaccctgttgaagcatccaccaataaagaaagccgcaaaagcctggcaagttttcctacctacgtggaggtccccggtccgtgtgaccctgaagatctgattgacggcattattttcgccgctaactatctcggctcaacgcagctgctgtccgataagacaccaagtaagaacgttcgcatgatgcaagcacaggaggcagtttctcggattaaaatggctcagaagctcgctaagtcccgaaaaaaggcccccgagggtgagtcccagcccatgactgaggtagacttattcatttcaacacagaggatcaaagttctgaatgccgacactcaggagacaatgatggaccatcccctcaggacgatctcctacatagccgatatcgggaacattgttgtactcatggcccggcgtagaatgccacggtcaaattcgcaagagaacgtggaggccagtcatccttctcaggacggaaaacgccagtacaaaatgatatgccacgtgttcgaatcagaagatgcccaactcattgcccagtctattggtcaggctttctcagtagcataccaagagtttctgcgtgccaatggcattaatcccgaggatctgagtcagaaggaatattccgatctccttaacacgcaggacatgtacaacgacgacctgattcatttctctaaaagtgaaaattgcaaagatgtgttcattgagaagcaaaagggtgaaattttaggtgtcgtcatcgttgagtctggctgggggtctatcctgcctaccgtcatcattgccaatatgatgcatggcgggcctgccgaaaaatccggcaaactgaatatcggcgatcagatcatgtcaatcaacggaacctcgttggttgggctcccattatccacatgtcaatcgattatcaaaggcctaaagaaccagagcagggtcaagctgaatattgtgcggtgtccgccagtaaccaccgtgctgatacggcggccagacctgcggtatcagcttggcttctcggtgcaaaacggaatcatctgtagtttaatgcgcggaggcatcgcagaacgaggaggagtccgggtcggccacagaataattgaaatcaatggccagagtgtcgtggctaccccccatgagaaaattgtgcatatcctctcaaatgcagttggcgagattcatatgaaaacaatgcccgccgccatgtatcgactgctgaccgcccaggaacaaccggtttacatctag

SEQ ID NO: 13817 - DNA, 2469 bp, synthetic construct
  misc_feature 1..2469: note = Description of Artificial Sequence: Synthetic coding sequence
  source 1..2469: mol_type = other DNA
atggccgctgcggtggtggtagcggaaggagacagtgattctagaccaggccaggagctcttggtggcatggaataccgttagcacaggtttagtccctccagccgccctgggactagtgtcttctcggacatccggtgccgtgccacccaaggaagaggagctgcgggccgctgttgaggttctgcgcggccacggcctgcacagcgttttagaggagtggtttgtggaagtgctgcagaatgacctgcaggcaaatatttcccccgaattctggaacgccatctctcagtgtgagaactcagctgatgagcctcaatgtctgcttcttctgcttgacgccttcggcctgcttgaatcacgtctggatccataccttaggagcttggagctgctggagaagtggacgcgactaggactgctcatgggcacaggtgcccagggtcttcgcgaggaggtgcacactatgctgcgaggggtgttatttttcagcacacctaggacctttcaggaaatgatccagcggctatatgggtgttttctcagagtctacatgcaatccaagcggaagggagagggtggtacagacccagagcttgagggagaactcgattcaagatacgcccgacgtcgctactaccggctgctccaaagtcctctgtgtgctggttgttccagcgacaagcagcaatgctggtgtcggcaggctctggagcagtttcatcaactgtcccaggttcttcaccgactgtctcttttggaaagagtgtctgctgaagccgtcactactactttacatcaagtcacccgagagcggatggaggacagatgcaggggcgagtacgagcgcagttttctcagggagttccacaaatggattgagcgagtcgttggatggttaggaaaggtctttctgcaggacggccccgctcggccagcttcgccagaggcgggaaatacattaaggaggtggaggtgccacgtgcagaggttcttttatcgcatatacgctagcctcagaatcgaggagctcttctccatcgtgcgtgatttcccagacagccggccagcgatcgaggaccttaaatattgcttagagcgtaccgatcagcgtcagcaattacttgtctccctcaaggcggcccttgagacccgtttgctgcatcctggcgtgaacacctgcgacattatcaccctgtatatctctgctattaaagctctgcgggtgctcgatcccagtatggtcatccttgaagtcgcctgcgagcccatcagacgctaccttcgtactagggaggacacggtgcgtcagattgtggctggacttacgggggactcggacggcactggcgacttggctgtcgagctttcaaaaacagatccagctagcctggaaactggacaagattccgaagacgatagtggggaacccgaggattgggtacctgacccagtagatgccgaccctggtaaaagctcgtccaaaagaagatcctctgatataataagcctgctcgtgtccatttatggttctaaggacctcttcatcaacgagtaccgtagccttctcgctgaccgattactgcaccagttctcgttcagcccggaacgtgaaattcgtaatgtggaactgcttaagcttaggttcggcgaggcccccatgcatttctgcgaggttatgctcaaagatatggctgatagtcgccgaatcaacgcaaatatccgcgaggaggacgagaagagaccagccgaagagcagcccccgttcggggtctacgcggtaattctgagcagcgagttctggcctccattcaaagacgagaaactggaagtgccagaggacatacgagcagccttggaggcatattgcaagaaatatgagcaactgaaagctatgcgcactctctcttggaagcataccctgggattagtgaccatggacgtcgaactggctgacagaaccctcagtgtggccgtgaccccagtccaagccgtgattttgctgtactttcaggatcaggcctcttggaccctggaggagctgagtaaagccgttaaaatgcccgtggctctccttcgccgtcggatgtccgtttggctgcagcaaggggttttgagggaggaaccaccaggcacctttagcgtcatagaggaggagcgcccccaagatcgcgacaatatggtccttattgacagcgatgatgagagcgattccggcatggctagccaggctgatcagaaagaggaggagctgctgttattctggacgtatattcaggccatgctgacgaacctggagagcctctcactggatcgcatttataacatgctgaggatgtttgttgtgaccggaccggctttggccgagattgacctgcaggagctgcaaggctacctccagaaaaaggtgcgagaccagcagctggtgtactccgccggagtataccggctcccaaagaactgctcctag

SEQ ID NO: 13818 - DNA, 4863 bp, synthetic construct
  misc_feature 1..4863: note = Description of Artificial Sequence: Synthetic coding sequence
  source 1..4863: mol_type = other DNA
atgggggccatcgggttgttgtggttactgccacttctcctgagcaccgccgcagtcgggtccggcatggggacaggacagcgcgccggcagtccggcagcaggcccacccctccagcccagagagccgttaagctacagtcggctgcagcgtaagagtctggctgtcgatttcgttgtcccttctttgttcagggtctacgctagggatttgcttcttcccccttctagtagcgaactgaaagctgggcgtcccgaggcaagaggctccctggcattggattgtgccccactactaaggttacttggccctgcaccaggagtaagctggaccgccggtagtccagcacctgctgaggccaggacactgagccgggtactgaaagggggcagtgtaagaaagttgaggcgagccaaacagctggtcctggaactcggcgaggaagctatcctggaggggtgcgttgggccacccggggaggccgccgtgggacttcttcagtttaatctctccgagctatttagttggtggatccggcagggcgaaggccgactgcggatccgtctgatgccagagaaaaaagcgagcgaagtgggaagagaagggcggctctccgctgctatccgggcctcccaaccacggctgctctttcagattttcgggaccgggcattccagcctggagagtcctacgaatatgccttcaccgtcccctgattactttacatggaatctgacatggattatgaaggatagcttcccctttctgtctcaccggtcgcgatatgggttagaatgtagtttcgacttcccatgtgagctggaatactctccgccactccatgatttgagaaatcaatcatggtcttggcgccggatacctagcgaggaggcatcgcagatggacttgctagatggcccaggcgcggagcgaagtaaggagatgcctcgtgggtccttccttctgttaaatacttccgcagattccaaacatactatcctctctccctggatgcgtagcagctctgagcattgcactctcgctgtcagcgtgcatcgccacttgcagccctccgggcgctacatcgcccagctcctgccacacaatgaggcagcgcgggaaatcctgctgatgccaacacccggcaaacacggttggacagtgctgcagggtagaattggcagacctgataaccctttccgggtagcactggaatacatatcctcagggaacagatctcttagcgctgtggactttttcgctcttaaaaactgttcagaaggtacctcaccaggttctaagatggcactccagtcctctttcacatgctggaacggaaccgtacttcagctgggccaggcttgtgacttccaccaagattgtgcccaaggggaagacgaatcgcaaatgtgccgcaagctgccagtgggcttctactgcaacttcgaggacggattttgcggatggacacaaggaaccctttcgccgcatacgcctcagtggcaggttcgcacgctcaaagatgctcgattccaggatcaccaggaccacgccctgctgctctctacaacggatgttcctgcatccgagtcagccacagtgacttccgctacttttcctgcacccataaaaagctcgccctgtgagctgcgaatgagctggttaatccggggggtactgagggggaacgtgagcctggtgctcgtggaaaataaaacaggaaaggagcaggggaggatggtgtggcacgtggctgcctatgagggcttgtccctgtggcagtggatggtgttacccctactggacgttagtgaccgattttggctccagatggtggcttggtggggccaggggagtcgcgccattgtggcgttcgacaacatttccatatccctcgactgttatctgactatctctggagaagacaagattctgcaaaacactgctccaaagagccgtaatctgtttgagagaaaccctaacaaagaactgaagcccggagaaaattcccccaggcagacacccattttcgaccctaccgttcactggctctttactacttgcggtgcaagcgggccgcacggccctacacaagcacagtgcaacaacgcttatcagaattctaatttatcggtcgaggtgggatctgaaggaccattgaagggcatacagatctggaaagttcctgcaaccgacacatacagcatcagcggatacggtgctgccggaggaaagggaggcaaaaatacaatgatgagatcacatggcgtcagcgtactaggcatctttaatctggaaaaggatgacatgctttatatcctggtgggtcagcaaggagaggatgcctgtccctcaactaaccagctgattcaaaaggtttgtattggagagaataatgtgatcgaggaggagattcgtgtcaatcggagtgtgcacgaatgggccgggggggggggcggagggggcggcgccacatacgtgtttaagatgaaggacggagtgccagttcctctcatcatagcagccggggggggaggccgggcttacggcgcaaaaacagatacctttcaccctgaacgcctggagaataatagcagcgtgctcggactgaatgggaatagcggcgctgctggtggtggtggtggttggaatgataacaccagtcttctctgggccggaaaaagtctgcaagaaggcgcaaccggcggccatagttgccctcaggctatgaagaagtgggggtgggaaactcggggcggttttggtggcggtgggggcgggtgctcttctggcgggggcggggggggctatataggaggaaatgcagctagtaacaacgacccagagatggacggggaggatggcgtctcgttcatctctcctctggggatcctctacacccctgccctgaaggtgatggaaggacacggggaggtgaacataaagcattacctgaattgctctcactgcgaggtcgacgaatgtcacatggaccctgagagccacaaagttatttgcttctgcgaccacgggactgtgctcgccgaagacggggtttcttgcatcgtttcacccaccccagagccgcacctgcctctctccctgattctctccgtggtgacatcggccctggtcgcggccctggtgctcgctttctcaggcatcatgatagtgtatcgccggaaacaccaggaactgcaggctatgcaaatggaattgcagagccctgagtacaagctgtcaaaactgagaacaagtacgattatgacggactataaccccaattattgcttcgcggggaaaacgtcaagtatcagtgacttgaaggaagtcccccgcaagaatataacactcatcagggggcttggccacggtgcctttggggaggtttacgaaggccaggtttcagggatgccgaatgatccatcccccctccaggttgcggtgaaaacattgcccgaggtgtgcagtgagcaggacgaattggacttcctgatggaagccctgatcatttcaaagtttaaccaccagaatatagtgagatgtatcggagtctctctacagagcctcccacgctttatcctactcgaactcatggccgggggcgacctcaagtcatttttaagagagactcggccaaggcccagccagcccagctccctagctatgctggatttgttgcacgtcgctcgggacatcgcgtgcggttgtcagtacctggaggagaatcattttatccatcgagatatagccgcacgaaactgtttgttgacctgtcccgggcccggccgggtcgcgaagatcggggactttgggatggcgcgggacatctaccgggcatcctattacaggaaagggggctgtgctatgctacctgttaagtggatgccccctgaagccttcatggaaggaatcttcacaagcaaaaccgatacatggtcttttggcgtgctgttatgggagatatttagcctcggttatatgccatacccatcgaagtccaaccaagaagtgctggaatttgtgacaagtggcggacgtatggatccaccaaagaactgtccggggcccgtataccggatcatgacacagtgctggcagcaccagcctgaagataggcctaacttcgcaatcatactagagcgaattgagtattgcactcaggaccctgacgtcattaacactgccctgcctattgaatatgggccattggttgaagaggaggagaaggtacccgttcggccaaaggacccagagggagtccctcccttgttagtctcccagcaagccaaacgggaggaggaacgttcccctgccgctccccctcctcttccaacaacgtcctctggaaaggccgccaagaagcccactgccgctgagatttccgtgcgggttccaagaggccctgccgtggaggggggacatgtaaacatggctttcagtcaatcgaaccccccatccgagctgcacaaagtccacggctcgcggaataagcccacttccctatggaatcccacctacggcagctggtttaccgagaagcccacaaaaaaaaacaatcccatcgctaaaaaggagcctcacgaccggggcaatctggggttagagggatcctgcaccgtgccccccaatgtcgccaccgggagacttcccggtgcctcactgctccttgagcctagcagcctcacagcaaacatgaaggaggtccccttgttccgcctccggcacttcccgtgcggaaatgtgaattatggataccagcagcagggcctgccactggaagcagctaccgcacccggtgcaggccattatgaggacacgatacttaagtccaagaatagcatgaaccaacccggcccgtag

SEQ ID NO: 13819 - DNA, 1353 bp, synthetic construct
  misc_feature 1..1353: note = Description of Artificial Sequence: Synthetic coding sequence
  source 1..1353: mol_type = other DNA
atgggcgcaattggactactgtggcttctaccactcctgctgagcacagcagcagtgggttccggtatgggtacgggacagcgggctggtagtccagccgctggacctcctctgcaacctcgggaacctctgagctactctcgcctccaacgtaaaagtttagcggtggactttgtggttccttctctgtttcgggtgtatgcacgagatttactgctacccccgtcaagttcggagttgaaagccgggagaccggaagcccgtggctctttggcgctggactgcgcacccctgctgcgattattgggacccgcacctggagttagttggacggccggaagccctgctccagcagaagcgaggactctttctagagtgctgaagggtggatcggtgcggaagctcaggcgggctaagcagctggtgctcgaactcggtgaggaggcaatcctagagggctgcgtggggccacctggagaggcggccgtggggttactgcagttcaacctatcagagctgttctcttggtggatccgacagggtgaaggacgtcttagaatccggcttatgccggaaaagaaggcgtccgaagttggtagagagggcagactgtcggccgccatcagagcctctcaaccaagacttctcttccagatttttgggactgggcactcctcactggaatctcccactaatatgcctagcccttctcccgattattttacttggaatttgacttggatcatgaaggacagctttcctttcttatctcataggtccagatatggcaaggagaggtctcccgcggcaccaccccctctcccaactactagttcggggaaagccgctaaaaagccgacagctgccgagattagcgtccgcgtgccacgaggaccagctgtcgagggtggccacgtgaatatggcctttagtcagtcaaatccaccatccgaacttcataaagtgcatggatcccggaacaaacctacctccctgtggaaccccacatacggctcatggttcacagagaagccgacaaagaagaacaacccaatagccaaaaaggagcctcatgaccgaggaaaccttgggctggagggaagttgtacagtcccaccgaacgtcgcgaccggcagactaccaggcgcttccctgctgcttgaaccatcaagcctcactgccaatatgaaggaggttccactatttagattgagacatttcccttgcggcaacgtgaattacggataccagcaacagggattgccgctggaagctgccactgctccaggagccggacattacgaggacaccattctgaagagtaaaaactccatgaatcagccaggaccctag

SEQ ID NO: 13820 - DNA, 1935 bp, synthetic construct
  misc_feature 1..1935: note = Description of Artificial Sequence: Synthetic coding sequence
  source 1..1935: mol_type = other DNA
atggaagtccaacttggcctgggccgggtgtacccaagacctccttctaagacctatcgaggtgcattccaaaaccttttccagtccgtgcgcgaggtcattcagaatccagggcccaggcatcctgaagccgcttctgctgccccccccggggcttcactcctgctgttacagcagcagcagcaacagcagcaacaacagcagcaacagcagcagcagcagcagcaacagcagcagcaggagacttcccctagacagcaacagcaacaacagggcgaggacggcagcccgcaagctcacaggagaggaccaacaggttacctggtgcttgatgaagaacagcagccgtcgcaaccccagagcgcgctagaatgtcatcctgaaaggggatgcgtccccgaaccaggggccgcagtggctgcatcaaagggactcccccagcagctgcccgctccgccagatgaagatgactccgctgccccctccacattgtccctgctcggccccacctttcctgggttgtcctcatgttcggccgacctcaaggatatcttatctgaggccagtacaatgcaactgctgcagcagcaacaacaggaggcggtgagcgaaggaagctcttctggaagggctagagaggctagcggcgcacctacatcctctaaagacaactacctgggtggtacctccaccatatcagataacgctaaagagctctgtaaggccgtgtctgttagcatgggtcttggggtggaagctctggaacatctgtcacccggcgaacagctgcgcggggattgtatgtacgctcccctgctgggagttccgccggcagtgcgcccaaccccatgcgcaccgttggctgaatgcaagggaagtctcctcgacgattccgcaggaaagtccacagaggacaccgccgagtactctccatttaaaggaggatataccaagggcttagaaggggaatccttgggctgtagcggtagcgccgctgctggctcttccggaactctagagttgccttcaacactcagcctgtataaatctggcgctttagatgaggccgccgcgtatcagagtcgggactattacaactttccactggcccttgccgggccacctcccccaccacccccgcctcaccctcatgcaaggattaaattagagaatcccctggactatgggtctgcctgggcagctgccgctgctcagtgtcgatacggggatttggcaagtcttcacggagctggtgctgctggaccaggatcaggcagtccgtctgctgctgcctcctcctcttggcacacacttttcactgctgaggaaggccagctgtacggtccgtgcggaggaggagggggaggcggggggggcggcgggggtggaggaggcggcggcggagggggcggcggcggggaggccggtgccgttgctccttacggctacacacgtcctccgcaggggctggccggacaggaatccgactttacagctcctgatgtctggtatccgggtggaatggtaagtcgcgtgccctatcctagtcctacctgtgtgaagtccgaaatgggaccgtggatggacagttatagcggaccttatggagatatgcgactggagaccgcccgtgatcacgtgttgcccatcgactattattttccaccccagaagacatgtctcatctgcggagatgaagccagcggctgtcactacggcgcactgacctgtggttcctgcaaagtgttctttaaacgggccgctgaaggcaaacagaaatacctctgtgcaagcaggaatgattgcactattgataagttccggaggaagaattgtccttcttgccgccttagaaaatgctacgaggcaggcatgacactcggggagaagttcagagtggggaattgtaaacacctgaaaatgactagaccatag

SEQ ID NO: 13821 - DNA, 1803 bp, synthetic construct
  misc_feature 1..1803: note = Description of Artificial Sequence: Synthetic coding sequence
  source 1..1803: mol_type = other DNA
atggaagtccagctgggcctggggagggtttaccctcgaccccctagcaagacatatcgaggcgcctttcagaatctcttccaatcagtgcgcgaggtaattcagaatccaggtcctaggcacccagaagctgcttcggcagcaccaccgggagcctctctgcttctcttgcagcagcagcagcagcagcagcagcaacagcagcagcagcaacagcagcagcagcagcaacagcaacaggaaacttcacctcgtcagcagcaacagcagcaaggggaagacggctccccacaagcccatcgccgtggccctacagggtacctcgtgctggatgaggaacaacagccatctcaaccccagtccgctctggagtgtcaccctgaacgcggctgcgtgcccgagccaggcgcagctgtggctgccagcaaagggttacctcagcagcttccagcccctcccgatgaagacgactctgccgcaccatcgactttatctctcttgggaccaacgttccctggtctctcttcctgctcagccgacttaaaggatattctttccgaggctagtacaatgcagctgcttcagcagcagcagcaggaggccgtgtctgagggctcctcttccggcagagccagggaggcctctggcgccccgacgagcagcaaggataattatcttggcgggacgtccactataagcgacaacgcaaaagagctctgcaaagccgtcagtgtttccatgggattaggcgtggaggcgctggaacacctaagccccggggagcagttgaggggggattgcatgtatgcccctttgttaggtgtgcctcccgcagtgcggccgactccttgtgccccacttgccgagtgcaaggggagcctcttggacgattccgccggaaagagtactgaagacacagccgaatattctccatttaaagggggctatactaagggcctggaaggcgagagccttggctgctcaggctctgccgcagccgggagctctggtacgctagaattgccaagcacacttagcctgtataagagcggcgcattggacgaggcagctgcctaccaatcgcgggactactacaatttcccattggcattggccggccctcctcccccacccccgccaccccatccgcacgcccggatcaagctggaaaaccccctcgactatggcagtgcttgggctgccgccgctgcacagtgcaggtacggggacctggcgagcctccatggagctggtgcggctggaccgggttcgggtagtcctagcgccgcagcctctagcagttggcacaccctgtttactgctgaggagggccagctgtacggcccgtgtggaggtggtggtggcgggggaggcggcggtggcggagggggcggcggtgggggcggaggggggggaggagaggccggtgccgtggctccttacgggtacacacgtccaccccagggactggcggggcaggagtccgatttcacggcaccagatgtgtggtatcctggggggatggtgtcgagagtcccatacccctccccaacctgcgtgaaaagcgagatgggcccctggatggacagttatagcgggccttacggggatatgagactcgaaaccgcaagagaccatgtgttgccaatcgactattatttccctccacagaaaacgtgcctcatctgtggggacgaggcatcagggtgccactacggtgcactgacctgtgggagttgcaaggtcttctttaagagagccgccgagggattcttcagaatgaataaactcaaggagagttag

SEQ ID NO: 13822 - DNA, 444 bp, synthetic construct
  misc_feature 1..444: note = Description of Artificial Sequence: Synthetic coding sequence
  source 1..444: mol_type = other DNA
atggtcatgggcctcggcgttctgttactggtctttgtactgggactaggcctgacaccaccgaccctggcccaggacaacagccggtatacacatttcctgacacagcactacgacgccaagccacaggggcgggacgatcggtattgtgagtctatcatgcggcggcgaggcctgacctcaccttgcaaggacatcaacacctttattcacggaaataagcgaagtataaaggccatctgtgagaacaagaacgggaatcctcacagagaaaaccttaggattagtaaaagttccttccaggttacaacctgtaagcttcatggaggttccccttggcctccgtgtcagtatagagctaccgccgggttccggaatgtggtcgtcgcgtgtgaaaatggattacccgtgcacctggaccaaagcatatttcgacgaccatag

SEQ ID NO: 13823 - DNA, 444 bp, synthetic construct
  misc_feature 1..444: note = Description of Artificial Sequence: Synthetic coding sequence
  source 1..444: mol_type = other DNA
atggtgatgggtctcggagtgttattactggtgttcgtgctgggcctggggctgactcctcctaccctcgctcaggataattctcggtatacacattttttgactcagcactatgatgcaaagccacagggtcgagatgatcggtattgcgagtccatcatgagacggcgtggcctgacatccccatgcaaggacattaacactttcatccatgggaacaaacgcagcattaaggccatctgcgaaaacaaaaacggcaaccctcatagggagaacttgaggatctcaaagagttctttccaggtgacaacctgcaaactgcacgggggctctccctggccgccatgtcaatacagggcaacagccggatttaggaatgttgtggtggcctgtgagaatggactcccggtccacttggatcaatccatttttcggcgaccttag

SEQ ID NO: 13824 - DNA, 1494 bp, synthetic construct
  misc_feature 1..1494: note = Description of Artificial Sequence: Synthetic coding sequence
  source 1..1494: mol_type = other DNA
atgaccgtgtttctttcattcgcattcctggcagccatactcacccatatcggatgtagcaaccagaggcggagccccgagaactccggaaggcgctataataggattcagcatggtcagtgtgcgtatacattcatcctgccggaacacgatggcaactgtcgtgaatcgacaacagaccagtacaacacaaatgcactgcaaagagacgcgccacacgtggagccagatttcagctcccaaaagctgcaacacctcgagcacgtgatggagaactacacccaatggctacagaaattagaaaattatatcgtggagaatatgaaaagcgagatggcacagattcagcagaatgccgttcagaaccatacggcgactatgttggagatcggcacatccttgctctcacagacagccgaacagacaaggaagctcacagacgttgagacacaagtgctaaatcagacttcacgtctggagatacagctcctggagaacagtctatctacttacaaacttgaaaaacagctgctacagcagacaaatgaaatcctgaagattcacgagaagaattcgctgttggagcataagattctcgagatggaaggaaagcataaagaggagcttgacactctgaaagaagaaaaagagaatctccagggactcgtcacacgtcaaacctacataattcaagaactggaaaaacaactcaaccgggccaccaccaacaacagcgtactccagaaacagcagctggaacttatggacacagtccacaacctggttaacctgtgtaccaaggaggtcctgctaaaaggcggcaagagggaagaggagaagccttttagggactgtgccgatgtgtaccaggcaggcttcaacaagtcaggcatctacacaatctacataaataacatgcccgaacccaaaaaggtgttttgcaacatggatgtgaatgggggaggctggactgtaattcagcatcgggaagatggtagtctggattttcaaaggggttggaaggaatacaagatggggtttggcaacccgtctggtgagtactggctaggaaatgagttcattttcgctatcacaagccagcggcagtacatgctgcgcatagaactgatggactgggaggggaacagggcctactcccaatacgaccggtttcatatcgggaacgaaaaacaaaactatcgcctctatctgaaagggcatacaggaactgcgggcaaacagtctagcctgatactacatggagccgacttttctacaaaggatgccgataatgataattgcatgtgcaagtgcgccctgatgttgacgggcggatggtggtttgacgcttgtggcccttctaaccttaatggcatgttctacaccgcggggcagaatcacggtaaactcaacggaatcaaatggcattatttcaagggaccctcgtattccctgaggtctactacaatgatgatcagacctctagacttttag

SEQ ID NO: 13825 - DNA, 459 bp, synthetic construct
  misc_feature 1..459: note = Description of Artificial Sequence: Synthetic coding sequence
  source 1..459: mol_type = other DNA
actgtttcaaatcttctggagcataagatattggagatggaaggcaaacacaaggaggaattagataccctcaaagaagaaaaagaaaatctgcagggacttgttacaagacagacttacattatccaggagctggagaaacaactcaatcgcgccaccaccaacaatagcgttttgcagaaacaacagttggagttgatggacactgtgcacaacttagtcaatttgtgtacaaaggaaggagtgctgctcaaaggggggaaacgcgaggaagaaaagccttttcgggactgtgccgacgtctatcaggctggctttaacaaatctggcatctatacaatctacattaataatatgccggagcctaagaaggtgttctgcaatatggacgttaacgggggaggctggaccgtgattcaacaccgggaggacgggtcattggatttccaacggggctag

SEQ ID NO: 13826 - DNA, 1497 bp, synthetic construct
  misc_feature 1..1497: note = Description of Artificial Sequence: Synthetic coding sequence
  source 1..1497: mol_type = other DNA
atgaccgtgttcctctcctttgcatttctcgcagcaattctgactcacatcgggtgtagtaatcagaggcgcagccccgaaaactccggccgcagatacaacagaattcagcacgggcagtgcgcctacactttcatattgcccgagcacgacggcaattgcagagagagcaccacggaccaatataacaccaatgcccttcagcgggacgcgcctcacgtggagcctgacttttcttcacagaaacttcagcacttagagcatgtcatggagaactacactcagtggttgcagaaactcgagaattacatcgtggaaaacatgaagtctgagatggcccagattcagcagaacgctgtgcagaatcatacagcaactatgcttgaaattggcaccagtttgctttctcagaccgccgaacagactcgaaagttgacggacgttgaaacccaagtcctgaaccagacgtcccgcctagaaatccagctgctggagaatagcctgtctacatataaactagagaagcagcttctgcagcaaacaaatgaaattctcaaaatccacgaaaagaactctcttttggagcataagatcctcgagatggagggtaagcacaaagaggaactcgacacgcttaaggaagagaaagaaaatcttcaggggctggtgacgagacagacatacattatccaggagttagagaagcagcttaatagagccactacaaataacagcgtgctgcagaagcaacagctggagcttatggataccgtccacaacctcgttaatctctgtaccaaagaaggcgtgctgctcaagggtggcaagcgggaggaggagaagcccttcagggactgtgcggacgtttatcaggccggcttcaataagtccggaatctataccatttatattaataatatgcccgagccaaaaaaggtgttttgtaacatggatgtgaatggggggggatggaccgtgattcagcaccgggaggatggctccctagattttcagagaggttggaaagagtacaaaatgggtttcggtaacccttcaggtgaatattggttagggaatgagtttattttcgccatcacctcacagcggcaatatatgttacggatcgagctgatggattgggaggggaatcgcgcttattcccaatacgataggttccacattggtaatgagaagcaaaattatcgcctctatctcaaaggccatacagggactgccgggaagcagtcctctcttatcctgcatggcgcggatttcagcaccaaggacgcagataacgacaactgtatgtgtaagtgcgccttgatgctaacagggggatggtggttcgatgcttgtggtccctcaaacctgaacggtatgttctatacggccggccagaatcacgggaagttgaatggcatcaagtggcactacttcaagggcccatcatactctcttcgctcaacaacaatgatgatacggcccttggatttctag

SEQ ID NO: 13827 - DNA, 894 bp, synthetic construct
  misc_feature 1..894: note = Description of Artificial Sequence: Synthetic coding sequence
  source 1..894: mol_type = other DNA
atggaaggaaagcataaggaagaactggacacgttgaaagaagaaaaggaaaacctgcaaggccttgttacgcgacagacctatattatccaggaactagaaaaacaactgaacagggcaaccaccaacaatagcgttttgcagaaacagcagctggaactgatggacacagtgcacaatctggtgaatctttgcactaaggaggtgctcctgaagggggggaagagggaggaggagaaacctttcagggactgcgccgacgtctaccaggccggatttaataagtcagggatatatactatttacattaacaacatgccagaaccaaagaaagtgttttgcaacatggacgttaatggcgggggatggaccgtcatccagcacagggaggatgggagcctcgattttcagcgaggctggaaggaatacaagatgggcttcggcaacccaagcggagagtattggctgggaaatgagttcatcttcgccatcacttctcaacggcagtacatgcttcgtatagagctcatggactgggagggaaacagagcctatagccagtatgaccggttccacataggaaacgagaagcagaattacagactctatctgaagggacatacaggcacagcagggaaacaatccagcctcatactgcatggagccgacttctctaccaaagacgcagacaatgataattgcatgtgcaagtgtgctctgatgctcacgggcggctggtggttcgatgcatgcggcccaagcaacctgaacggtatgttctatactgccggccaaaaccacggtaagctcaacggtattaagtggcactattttaaaggcccctcctattcgctgaggtctacaacgatgatgatcaggccacttgatttttag

SEQ ID NO: 13828 - DNA, 897 bp, synthetic construct
  misc_feature 1..897: note = Description of Artificial Sequence: Synthetic coding sequence
  source 1..897: mol_type = other DNA
atggagggaaaacataaagaagaactggatactctgaaagaagagaaagagaatttgcagggcctcgtgacaagacaaacctacattatccaggaattagagaagcaattgaatcgcgccacaacaaacaatagcgtgctacagaaacagcagctcgaactgatggatacagtccacaatcttgtgaatctgtgtactaaagagggagtgctgctcaaggggggcaagcgagaggaagagaaaccattcagagactgtgccgacgtgtaccaggccgggtttaataagtcggggatttatactatttacatcaacaacatgcctgagccaaagaaagtcttctgcaacatggatgttaacggtggcggatggaccgtgatacagcaccgggaagatgggagtttggacttccagcgcggatggaaagaatataaaatggggttcggcaaccccagtggagagtactggcttggaaacgaatttattttcgccattacatcgcaacggcagtatatgttacggatcgagctaatggattgggaaggaaacagagcatatagtcagtacgacagatttcatataggcaatgaaaagcaaaactaccgactatacctgaaggggcacaccggaaccgcgggcaaacagagctctctgatccttcacggagccgacttctccaccaaggacgctgacaacgataactgcatgtgcaagtgcgcactgatgctgactggcggctggtggttcgatgcttgcgggcccagtaatcttaacggaatgttctataccgccgggcagaaccatgggaaacttaacggcataaaatggcactacttcaagggcccatcctacagcctgaggtcaacaaccatgatgattcgcccgcttgacttctag

SEQ ID NO: 13829 - DNA, 1491 bp, synthetic construct
  misc_feature 1..1491: note = Description of Artificial Sequence: Synthetic coding sequence
  source 1..1491: mol_type = other DNA
atgtggcagatcgtgtttttcacacttagctgcgacctggtgctggctgctgcatataacaatttccgtaagagcatggactcaatcggaaaaaaacagtaccaagtgcaacatggttcatgttcttacacatttctgctgccagagatggataactgtcggtcatcatcatccccgtacgtgagcaatgccgtgcagagggatgcgcctctagagtacgatgattccgtgcaacgacttcaggtcctcgagaatatcatggagaacaacacacagtggctgatgaagctggagaattacatacaagataatatgaagaaggaaatggttgagattcagcagaacgctgtgcagaatcagacagctgtcatgattgagatcgggaccaatttactgaaccagacagcagaacagacacggaagcttactgacgtggaggcgcaggttttaaaccaaaccacacgacttgagctccaactacttgagcacagtctcagcacaaataaattagaaaagcagatcttagaccaaactagtgagatcaataagctacaagacaagaactctttcttggagaagaaagtgctggcaatggaggacaagcatattattcagctccagagtataaaagaagagaaggatcagcttcaggtcctggtttctaagcagaattcaatcatagaggagctggaaaaaaaaatcgtaacagcaaccgtaaataatagcgttctgcaaaagcagcagcacgatctgatggagactgttaataatctcttaacaatgatgtccacatcgaacagtgctaaggaccccactgtcgcaaaagaagaacagatctcattcagagactgcgcagaagtgttcaagtcgggacatacgacaaacggtatatatacgctcaccttccccaactccacggaagagatcaaggcttactgtgatatggaagctggtggcggagggtggacaataattcagcggagagaagacggctccgtggattttcagcggacttggaaagagtacaaagtaggtttcggaaatccctcaggtgagtactggcttgggaatgaattcgtgtctcagctgacaaaccagcagcgttacgtgctgaagattcatttgaaagattgggagggcaatgaggcctatagtctgtacgagcatttctatttgtccagcgaagaactcaactacagaattcatctcaagggcctgactggcaccgcaggtaaaatctctagcatctctcagcctggcaatgactttagcacaaaggatggggataatgataaatgtatatgcaagtgcagtcagatgctgacgggcgggtggtggtttgatgcatgcggtcccagtaatctgaatgggatgtattatccacagagacagaatacaaacaagttcaatggtattaaatggtattactggaagggcagcggttactcattgaaagctactactatgatgattagacctgcagacttttag

SEQ ID NO: 13830 - DNA, 1488 bp, synthetic construct
  misc_feature 1..1488: note = Description of Artificial Sequence: Synthetic coding sequence
  source 1..1488: mol_type = other DNA
atgtggcagattgtgttctttacactgagttgcgacctcgtgcttgccgccgcctataacaattttagaaagagcatggactccatcggcaagaaacaatatcaggtacaacacgggtcctgttcctacacctttctgctccccgaaatggataactgtcgtagctcttcctctccatatgtaagcaatgcagtacaaagagatgcccccctggaatacgatgatagcgttcagcggttacaagtccttgaaaacataatggaaaataacacgcaatggctcatgaagctcgaaaactacatccaggacaatatgaaaaaggaaatggtagagatacagcaaaacgccgtgcaaaaccagacagcggtcatgattgagatcggcaccaacctgcttaatcagactgctgagcagacacggaaacttactgatgtagaagcacaagttttaaaccaaaccaccagattagagcttcagctcctggaacattcactaagcacaaataagctggagaaacagatcctggaccaaacttctgaaattaataaactccaagacaaaaactcatttcttgagaagaaggtgttggctatggaggataagcacatcatccagctgcagtcaattaaggaggaaaaagaccagctgcaggtcctggtgagcaaacagaattccatcatagaggaactggaaaaaaaaattgtgaccgcaactgttaataattccgtgcttcaaaaacagcagcacgacctcatggaaactgtcaacaacctgctgaccatgatgagtacatctaacagcaaggatcccaccgtagccaaagaagagcagattagctttagagactgtgctgaagtcttcaaatctgggcacacaaccaacggcatctacactcttacgttccctaattcaactgaggagattaaggcgtactgcgacatggaggcaggtggtggcgggtggaccattattcaacgacgcgaggacggtagcgtcgatttccagagaacctggaaagaatacaaagtgggcttcggaaacccgtccggcgaatactggctcggtaatgaatttgtgtctcagctcaccaatcagcagcggtatgtgctcaagattcatctgaaggattgggaggggaacgaggcatactccctttacgagcatttttacttatcatctgaggaactgaactatcgcatacacttgaagggactgactggcacagcgggaaagatttcctcaatcagccagcccggaaatgacttctcaactaaggatggcgataacgacaagtgtatctgtaagtgttctcagatgctgacaggcggttggtggtttgacgcttgcggccctagcaatctcaacggcatgtactacccccaaaggcaaaacacgaacaagttcaatggtattaaatggtattattggaaaggaagtggttacagcctaaaagctaccactatgatgatcagaccggctgatttctag

SEQ ID NO: 13831 - DNA, 1335 bp, synthetic construct
  misc_feature 1..1335: note = Description of Artificial Sequence: Synthetic coding sequence
  source 1..1335: mol_type = other DNA
atgtggcagattgtgtttttcactttaagttgcgatctggtcctggccgccgcctacaataactttcgcaagtcaatggacagtattggcaagaaacagtatcaggttcagcatggaagttgctcatacaccttcttgctccccgaaatggacaattgtcggagctcatctagtccttacgtgtccaacgcagttcaaagagacgccccactagaatacgacgattcagttcagagactccaagtgctggagaatatcatggaaaacaacacgcagtggctgatgaaagtcttaaatcagaccacacgactggaactgcagttactggagcatagtctcagtacgaacaaattggaaaaacagatcctcgatcagaccagcgagattaataagcttcaggacaaaaattcgttcctggagaagaaggtgctcgccatggaggataagcatatcatacagctgcaaagcataaaggaggagaaagaccaattgcaggtactggtgagtaagcagaactccatcattgaggagctagaaaaaaaaatcgttaccgccaccgttaataatagcgtcctgcagaaacagcagcatgatctaatggagacagtgaacaacctgctaaccatgatgagtaccagcaactcggcaaaagaccctacagtggccaaggaggagcagattagcttccgagactgcgctgaggtcttcaaaagcggacatactacaaatggcatatatactctgacgttccctaactccacggaagaaatcaaagcctactgcgatatggaggctgggggtgggggctggaccattatccaacgcagagaagacgggtccgtggattttcagaggacatggaaggagtacaaggtggggtttggaaacccctccggcgaatactggctagggaatgagttcgtatcacagctgactaaccaacaacgttacgttctgaaaattcatctcaaggactgggagggcaatgaggcgtattcactgtacgagcatttctatctatcctcagaagagctgaattacagaatccacctgaagggcttaacaggtacagcgggtaagatttctagcatctctcagccagggaatgacttcagcacaaaagatggggacaatgataagtgcatttgtaagtgttctcagatgcttactggcggttggtggtttgatgcgtgtggcccgagcaatctgaatggaatgtactacccacagcgtcagaataccaacaagtttaacggcatcaagtggtactactggaaaggctctggctactccctcaaagcgactactatgatgatccggcccgcagacttctag

SEQ ID NO: 13832 - DNA, 1221 bp, synthetic construct
  misc_feature 1..1221: note = Description of Artificial Sequence: Synthetic coding sequence
  source 1..1221: mol_type = other DNA
atgagtggcgcacctaccgccggcgccgctctcatgctttgcgctgcgaccgccgtgctgctcagcgcacagggcggtcccgtacaaagcaagtccccacgatttgcctcctgggatgagatgaacgtactcgcacacggcctgctgcagcttggacagggcttgcgtgagcacgcagagcgcactcggagccagctgagcgctctggagcgccgactgagcgcctgtggatccgcgtgccaaggcacagaaggcagtactgacttgcccttggccccggaatctcgggtagatccggaagtgctacactcattgcagactcagctaaaggcccagaatagtcgcattcagcagctgtttcataaggtagcgcagcagcagagacacctggaaaagcaacacttacggattcaacatctccagtctcagttcggtcttcttgatcacaagcatcttgaccacgaggtagccaagcccgcaagacgcaagaggctcccggaaatggcccagcctgtggacccagcgcataatgttagccgtctccaccgactccctagggactgccaagaactgtttcaggtgggtgagagacaatccgggcttttcgagatacagccccagggctctcctccctttctggtaaattgtaagatgacaagcgatggagggtggaccgttatccagcggcgtcacgacggtagcgttgatttcaaccggccttgggaggcctacaaggccggctttggcgacccacatggcgaattctggctcggactcgagaaagtgcattctataactggggaccgtaactcccggcttgcagtccaattgcgggattgggacggcaacgccgaactgctccaattctcagtccatttgggaggagaagacacagcgtacagtctccagctgaccgctccagtagccggacagcttggcgcgaccaccgttccaccatcgggcctgagcgttccgttttccacatgggaccaggaccacgatctccgccgagacaaaaattgcgcaaaaagcttgagcgggggctggtggttcggaacttgttcccacagtaacctaaatgggcaatatttccgatctataccccagcagagacagaagctaaagaagggcatcttctggaagacttggagagggcgatactaccctttgcaggctacaacaatgctaatccagcccatggcagcagaggccgcatcctag

SEQ ID NO: 13833 - DNA, 1107 bp, synthetic construct
  misc_feature 1..1107: note = Description of Artificial Sequence: Synthetic coding sequence
  source 1..1107: mol_type = other DNA
atgagtggggcacctaccgccggagccgcacttatgctgtgtgcagcaacagctgtgcttctgtccgctcaggggggtccagtgcagtctaaaagtccgcgctttgcgtcgtgggatgagatgaatgtgctggcccacggactcctgcagttgggccaaggactgcgcgagcatgccgaacggacacgcagtcagctgtccgcacttgaaaggaggttgtctgcctgtggaagtgcctgccagggtactgagggcagtacagatctgccactcgcgccagagagccgcgtggatcctgaggtgctgcatagtctccagacacagctgaaggcccagaattctcgaatccagcagctcttccataaagtggctcaacaacagcgacatttggagaaacagcatctgcgcatccagcatctgcagagccaatttggcttgttagaccacaagcacctggaccacgaagtggccaagcctgccagaaggaagcgactccctgaaatggcccaacctgtggatcccgctcacaacgtgtcaagattgcaccacgggggctggaccgtcattcagagacgccatgacggttcagttgattttaataggccatgggaagcgtataaggccggcttcggggaccctcatggtgaattttggttgggtttggagaaggtgcacagtattacgggtgatcgcaactcacgccttgcagtgcagctcagagattgggacggcaacgccgagcttctgcagtttagcgtacatctaggtggcgaagatactgcttactcactccagctgacagctccagtagcaggccagttgggagctaccaccgtacctccttcgggactttccgtacctttttctacttgggatcaggaccacgatttgagacgtgacaaaaattgtgccaaatccctctccggtggttggtggttcggcacttgctctcattccaatctgaacgggcaatatttcagatcgattccgcagcagaggcaaaagctgaagaagggcatattctggaagacatggagaggtcggtattatcccttacaggcgaccaccatgctcatccagcctatggcagcagaggccgcctcctag

SEQ ID NO: 13834 - DNA, 720 bp, synthetic construct
  misc_feature 1..720: note = Description of Artificial Sequence: Synthetic coding sequence
  source 1..720: mol_type = other DNA
atggcgcaacctgtggacccggctcataatgtgtcacgactacaccgcctgcctagggactgccaagagctgttccaggtgggcgagaggcaaagcggactgtttgagatacagccccagggctcccctcctttcctagttaactgcaaaatgacctccgatgggggttggaccgtgatccagcggagacacgacgggagtgtggatttcaatcggccctgggaagcctacaaagcgggctttggcgaccctcatggggagttttggctggggctggaaaaggtccattccatcaccggcgacaggaattctagacttgctgtgcagcttcgtgactgggatggtaatgcagagctgctgcagttttctgtgcacctgggcggagaagacactgcttattctttgcaactgacagctccggtcgcaggccaactcggcgccactaccgtgcctcccagcggcttgagtgtgcctttctctacctgggaccaggaccatgacctccggcgagataagaactgcgccaaaagcctttctgggggctggtggttcgggacttgtagtcattcgaacctgaatggccaatatttccgctcgatcccccaacagagacagaagttgaaaaaggggatcttttggaagacttggcggggacgctactatccgctccaggcaactaccatgctgattcagcccatggcagcagaagccgcctcgtag

SEQ ID NO: 13835 - DNA, 837 bp, synthetic construct
  misc_feature 1..837: note = Description of Artificial Sequence: Synthetic coding sequence
  source 1..837: mol_type = other DNA
atggagccaagggcagccgatggatgctttttgggtgacgtgggtttttgggtcgagagaacacctgtgcatgaggctgcgcagcggggcgagagcctccaactacagcaactcatcgaaagcggggcttgcgtaaatcaagttaccgtggactctattacaccgttacacgctgcatccctccagggtcaggcccgatgtgtacagttattgctcgccgctggcgctcaggtggatgctcggaacatagatgggtcaacacctctgtgtgatgcctgtgctagcggaagtatagagtgtgtcaaactcttgctcagttacggagccaaagtcaacccccctctctacacagcatcacctctgcacgaggcgtgtatgagcggctcatctgaatgcgtgcgtctcctgatagacgttggggctaatttagaggcccacgattgtcactttggcactcctctacatgttgcatgcgccagggagcatcttgactgcgtgaaggtgctgctgaacgctggcgccaatgttaatgcggccaagctccacgagacagcactccaccatgctgccaaggtcaaaaatgtagacctcatcgaaatgctgatcgagtttggcggaaatatttatgccagggataatagaggaaaaaaaccctctgattatacatggtcttcttccgctcctgcgaagtgtttcgagtactacgagaaaacgcccctgaccctgagccagctctgcagagtcaatctgcgcaaagccacaggagttcggggcctcgagaaaattgcaaagctgaacatcccaccccgcctgattgactacctcagctataactag

SEQ ID NO: 13836 - DNA, 396 bp, synthetic construct
  misc_feature 1..396: note = Description of Artificial Sequence: Synthetic coding sequence
  source 1..396: mol_type = other DNA
atggagaagatacctgtgagtgcattccttcttctcgtggctctgtcctataccttagcccgggacaccaccgtgaaaccaggtgccaaaaaagacacaaaggatagccggccaaaattacctcagaccttgtcaaggggctggggggaccagttaatttggactcagacttacgaagaagctttatataaaagcaagacctctaataagccacttatgatcatccaccaccttgacgaatgccctcactcacaggccctcaagaaggtgttcgctgaaaacaaagagatccagaagttggccgaacagtttgttctcctaaacttggtgtatgaaaccaccgacaagcatttatcccccgacgggcagtatgtgccacggataatgttcgtctag

SEQ ID NO: 13837 - DNA, 528 bp, synthetic construct
  misc_feature 1..528: note = Description of Artificial Sequence: Synthetic coding sequence
  source 1..528: mol_type = other DNA
atggaaaaaattcccgtgagcgcattccttctgcttgtggcactcagctataccctggccagagatacaacagttaagcctggcgctaagaaagatacaaaggatagccgcccgaagctcccacagaccctaagccggggctggggggaccagctcatatggacccaaacctatgaagaggccctctacaagtccaagacttcgaacaaacccctgatgattatccaccacctcgacgaatgccctcatagccaggccctgaagaaggtgttcgcagaaaataaagaaattcagaaactggcggagcagttcgtcctgctcaatctggtctatgagacaaccgacaaacacctgtcacccgatgggcagtacgtgccaaggatcatgtttgtagatccctcgctgaccgtccgtgcagacatcactgggcgctactccaacaggttatacgcctatgagcccgcggacaccgctctcctcttagacaacatgaaaaaggcgttgaaactactgaaaacagaactgtag

SEQ ID NO: 13838 - DNA, 588 bp, synthetic construct
  misc_feature 1..588: note = Description of Artificial Sequence: Synthetic coding sequence
  source 1..588: mol_type = other DNA
atgtctaactataccgacgccgaaagtagctttagcaagcaggagatcataagggttgcgatggagaagattcccgtctctgccttcttgttactcgtcgcgctctcttacactttggcccgtgacacaactgttaaacccggagccaagaaggacactaaagattcccgtcctaaacttccacagactctttccaggggatggggggatcaattaatctggacccagacctacgaggaagctttatacaaatctaagaccagtaataagcccctaatgatcatccaccacctagacgagtgcccccactctcaggctctcaagaaggtcttcgccgaaaataaagagatacagaagctcgccgagcaatttgttctcttgaatctggtgtacgagactactgataaacacctgtcccccgacggccagtacgttcctagaatcatgtttgtggatccttctctgacggtgcgagctgatatcaccgggcgatacagcaaccgactttacgcatatgagcctgcagatacggccctgctgctcgataacatgaagaaagcactcaaacttttgaagaccgaactgtag

SEQ ID NO: 13839 - DNA, 1251 bp, synthetic construct
  misc_feature 1..1251: note = Description of Artificial Sequence: Synthetic coding sequence
  source 1..1251: mol_type = other DNA
atgtggccaaccagacggcttgtaaccatcaagagatcaggtgtggacggtccgcactttcccttgtccctgtccacttgtctgttcggacgatatgaaaatgagtcactgcagaacggccgaaagagtacagagttccctcggaaaattcgggagcaggagcccgcacgtagagttagtcgcagttccttcagctccgaccccgacgaatcggaagggatacccctgaaacggcgccgtgtcagtttcggcggccatttgaggccggaattatttgacgagaatctaccccccaacacccccctgaaaagaggtgaagcaccaacaaagcgcaaatctctggtgatgcacaccccgccagtactaaaaaagatcattaaagagcagccacagccatccggaaagcaggagtccggatccgaaatacacgttgaggttaaggctcagtcactggtgataagtccacctgcgcctagcccccgaaagacccctgtcgcttccgatcaacggcgacgctcatgcaaaactgcgcccgcatcgtcgtcgaagtcccaaaccgaggtaccaaagcgcggggggaggaaaagcgggaatcttccctccaaacgcgtgagcatctctaggtctcagcacgacattcttcaaatgatctgtagcaagagaagatctggagcatcagaggctaacctgatcgtggcaaaaagctgggccgatgtggtgaaactgggggctaagcagactcaaactaaagtaattaaacatggcccacagagaagcatgaataagcgccagcggcggcctgccaccccaaagaagccagtgggggaggtccatagtcagttctccactggacacgctaactccccttgcaccataatcatcggcaaggcccacacagagaaggttcacgtaccagccagaccttatcgggtcctgaataactttatttctaaccaaaagatggatttcaaagaggatctctcgggcattgcagaaatgttcaaaacaccggtaaaagaacaacctcagctgactagtacttgtcatatcgccatatccaattccgagaatctgctgggaaaacaattccaaggcacagacagcggtgaggagccgttgctgccaaccagtgaatctttcggaggcaatgtcttcttctccgctcagaacgccgcgaaacagccgtctgataagtgctcggcttcaccccctcttcggagacaatgcattagggagaacgggaacgtttag

SEQ ID NO: 13840 - DNA, 8691 bp, synthetic construct
  misc_feature 1..8691: note = Description of Artificial Sequence: Synthetic coding sequence
  source 1..8691: mol_type = other DNA
atgtggcccactaggagactggtgaccatcaagcgttcaggtgtcgacggcccccattttccattgagtttgtctacttgcctttttgggcgcggtatcgagtgcgacattcgcattcagctacccgtcgtatcaaagcagcactgcaaaattgagattcatgagcaggaagctattttgcataactttagctcaactaatcccacacaggtaaatggtagcgtgatcgacgagccggtgcgcctgaagcacggtgatgtcattaccattatcgaccgatcattccgatacgaaaatgagtctctccagaatgggagaaagtcgaccgaatttcctagaaagattagggaacaggaaccagcgcgaagggtttcacgcagctcttttagctccgacccagacgagtccgagggaattccacttaaacggcgtcgggtctcctttggcgggcatttgcggcctgaacttttcgatgagaaccttcccccaaacacgccacttaaacggggtgaggcgcccacgaaacgcaagtctttagtaatgcatacccctcctgtactgaaaaagatcattaaagaacagccacagccatctggcaaacaggagtccggctctgagatacatgtcgaagttaaggctcaatctcttgttatatctcccccagccccatctccgagaaagactcctgtggctagcgatcagcgccgaaggtcttgcaaaacagcaccagcgagctcctcgaagagccagacggaggttcccaagagagggggcaggaaatctggcaatctgccaagcaagagggtaagcatctcccgttctcagcacgacatcctgcagatgatctgtagcaaacgccgatccggtgcgagtgaagccaacctgattgtggcaaaatcttgggctgacgttgtgaaactgggagcgaaacagactcagactaaggttatcaagcatgggccccaacggtcaatgaacaaaagacagagacggcccgcaactccaaagaagcctgtgggagaagtgcactctcagttcagcaccggccacgctaactctccttgtactatcatcataggtaaggcccatactgagaaggttcacgtgccagcacgcccctacagggtgctgaataactttatttcaaaccagaagatggatttcaaggaagacctatcagggatcgccgaaatgtttaagacccctgtcaaggagcagccacagcttaccagtacatgtcatatcgcaatttctaattcggaaaacttactgggtaagcagttccagggcacagactccggagaagaacctctcctgcccacatcagagtcttttggcggcaatgtatttttcagcgctcagaatgctgcaaaacaacccagcgacaagtgcagcgcctcccctccactgcggagacagtgtattagagaaaatggcaacgtagccaagaccccacggaacacctacaaaatgacctctcttgagaccaaaacctctgatactgagaccgaaccctctaagactgtctctactgcaaatcgatcagggagaagcaccgaattccgtaacatacagaagctgcctgtggaatcaaagagtgaagagacaaatactgaaattgtcgagtgtatcctcaagagagggcagaaagctaccctgctccagcagagacgcgaaggagagatgaaagagatcgagcgaccatttgagacctacaaggaaaacatcgagctaaaggaaaacgatgaaaagatgaaggccatgaagcggtccagaacttggggtcaaaagtgcgctccaatgtctgacctcaccgacctgaaaagcctgccagacacagaactaatgaaggacacggctcgcggccagaacctgctgcagactcaggaccatgcaaaggcaccaaaaagcgagaagggcaagatcacgaaaatgccttgtcaaagcctacagcctgagcctatcaatactccaacccataccaagcagcagctgaaggctagcctgggcaaagtcggtgtgaaggaagagctgctcgccgtgggaaaattcacacggacgtccggagagaccactcacactcatcgagaacccgctggcgacggaaaatcaattcgtacattcaaagagtcccccaagcagattctggatccagcagcccgggtcacaggaatgaagaaatggcctcggacacctaaagaggaagcgcagtcgctcgaggaccttgccggctttaaagagctgttccagacccccggcccctctgaagaaagtatgaccgatgagaagacaaccaagattgcctgtaagagtccccccccggaaagcgtcgacacaccaaccagcactaaacagtggcctaagagatctcttaggaaggccgacgtggaggaggagtttctcgcgctgagaaagctcacaccctcagcgggtaaggctatgcttacccccaaaccggcaggtggcgatgaaaaggatattaaggcatttatgggtaccccggtgcagaaactagatttggcaggaaccctgccgggcagcaagcgccagctgcaaactccaaaagagaaagctcaagctcttgaggacctggcgggtttcaaagagctgttccagacccccggacacactgaagaactggtggcggcggggaaaacaacaaagataccgtgtgattctcctcagtcagacccagttgatacccccaccagtactaagcagaggcccaagcgctccatacggaaggccgatgtcgagggagagttacttgcttgtagaaatctgatgcctagtgctgggaaagccatgcacacacccaaaccatcagtcggtgaggagaaggatatcatcatatttgttggaacaccagtgcagaaactggacttgaccgagaatctaaccggctccaagagacggcctcagacccccaaagaggaggctcaggctctggaggaccttacagggttcaaagaattgttccagactccaggacatacagaggaggccgtggccgccgggaaaacaacaaagatgccctgcgagagttccccacctgagagtgcagacacgcccacttctacgcgccgacagccgaaaactcccttagaaaagcgggatgtacagaaagaactgtctgctctgaagaaactgactcagacttccggtgaaacaacgcataccgataaggttccaggcggcgaggacaagtccattaacgctttcagggaaaccgccaagcagaaattggaccccgctgcatccgtcaccggtagcaaaagacaccctaagacaaaagaaaaagctcaaccacttgaggacctggctggactgaaggaactttttcagacgcctgtgtgtacagacaagcccacgacccacgaaaagactacgaagatcgcatgccggtcccaacccgatcccgtggatacccccacttcatcaaaaccgcagagcaagcgatccctgaggaaagttgatgtcgaggaagagttctttgcccttcgtaaaaggacgccctctgccggcaaagcgatgcatactcctaagcctgctgtttccggcgagaagaacatctatgccttcatgggaacaccggtccagaaactagatctgaccgagaatttaaccggtagtaaacgaaggctgcaaacgcccaaagaaaaggcccaggctctggaagacctggcggggttcaaagagctctttcagaccaggggccatacagaagagagcatgacaaacgacaagaccgctaaggtcgcctgtaagagttcacaacctgacccggacaagaatcccgcaagtagcaagaggcgtctgaagacgtccctgggcaaagtcggtgttaaggaggagctccttgctgtcgggaagctaacacagacatccggagaaacaactcatacacatacggagcccacaggggacgggaagagtatgaaggcattcatggagtcccccaaacagattctggattcggctgcttcacttaccggttcgaaacgtcagctcagaactccaaaaggtaagtccgaagttcctgaagatctagccgggtttatagagctgtttcagactcctagccacaccaaggagagcatgaccaatgaaaaaacaaccaaagtgagctaccgggcctcccagcccgacttggtagataccccaactagctctaagcctcagccgaaaaggagtctgcggaaagcggacaccgaggaggaatttctcgcattccgcaagcaaactccatccgccggcaaggctatgcacacacctaaacccgccgtgggcgaggaaaaagatattaatactttcctggggacccctgtgcaaaagctggaccaaccaggaaatcttccagggagcaataggcgactccaaaccagaaaggagaaggcccaggcccttgaagaacttactggattcagggagctgtttcaaacaccatgtactgataacccaacaactgatgagaagaccacaaagaagatcttgtgcaaaagtccacagagcgacccagccgatactcctactaacacaaaacagcggcctaaacgaagcctgaagaaagctgacgtggaggaggagtttctcgcctttcgaaaattgactccatcggcaggtaaagccatgcacactcccaaggccgcagttggagaggagaaggatatcaatactttcgtaggaacacctgtcgagaagctggatcttcttgggaatctgcctgggtccaagaggaggccccaaactcctaaggaaaaagcaaaggctctggaggatctcgccggattcaaggaactgttccagacaccgggacacacagaagagtctatgacagatgacaaaatcaccgaggtaagttgcaaatccccccagcccgatcccgtgaagactcctacaagctccaagcagaggttgaagatctccctcggcaaggtgggcgtcaaggaggaggtcttacctgttgggaaactgacccagacatctggtaaaactacacagacgcaccgtgaaacagcaggcgatggcaagagcataaaggccttcaaggagagtgccaagcagatgctcgatccagcaaactatggcaccgggatggaacgctggcccaggactcctaaagaggaggctcagagtcttgaggacctggcaggctttaaggagctgtttcagactccggatcatactgaagagagcacaactgacgacaagacgaccaagattgcctgtaagtcaccccccccagaatccatggacacccctacatcgaccaggcgtcgtccaaagacaccccttggcaagcgcgatatcgtggaggagctgagcgccctgaagcaactgacccaaaccacccacactgataaagtgcccggcgacgaagacaaggggattaatgtctttagggaaaccgctaagcagaagctggatccagcggccagcgttactggttccaaaaggcaacctcgcacaccaaaaggaaaggcccagccactggaggatcttgcaggcctcaaggagctgtttcagacccctatttgtaccgacaaacctacgacccacgaaaaaacaaccaaaatcgcttgtagatccccccaacccgatccggttggaactccaactattttcaaaccgcaatcaaagaggtctctgcgcaaagccgacgtcgaagaggaatctctggcactgagaaagcggaccccctccgtgggaaaggcgatggacacccccaaacctgcgggcggcgatgagaaggatatgaaggcttttatgggaactcctgtgcaaaagctcgatttgccagggaacctgcctggcagtaagcgctggccacaaacaccaaaagaaaaggcccaagccctggaagacctggcgggattcaaagagctgtttcagacaccggggaccgacaagccaacaaccgatgaaaagactaccaagatcgcctgcaaatcccctcagccagatcccgtcgatacccctgcctctacgaaacaacgccctaagcggaacttacgtaaggctgacgtcgaggaagaatttctcgcgctccgcaagaggacgcctagcgccggaaaggcgatggatacaccgaaacctgcggtatcggacgaaaaaaatatcaacaccttcgtggaaacccctgtgcaaaaactagacctgctgggtaacttacctggctccaagcggcagccccaaacccccaaagaaaaggctgaggcactggaagacctagtcggtttcaaggagctgtttcaaacacccgggcatacggaagaatccatgactgacgacaaaatcactgaggtttcatgcaaatcccctcaacctgagagctttaagaccagtaggtccagcaagcaaagactgaagattccactggtcaaagtcgatatgaaggaggagcctctcgctgtgagtaagttaacccggacctccggagaaactactcagactcacaccgaacctacaggggatagcaagtccattaaagcctttaaagagtcgccaaagcagattctcgaccccgctgcttctgtgacaggctctcgacggcagctgaggaccagaaaggaaaaggcaagagcactggaagatctcgtcgacttcaaggaactcttctccgccccaggtcacacggaggaaagtatgactattgacaagaataccaagattccctgcaaaagtcctcccccagagctgacagacacggccacatcaaccaaaaggtgtccaaagactcgtccccggaaagaagttaaagaggagctcagcgccgttgagcgactcacccagactagcgggcaatctacacatacacacaaagagccagcatccggcgacgaggggatcaaggtccttaaacagagagccaagaaaaagcccaacccggtagaggaagaaccctcaaggcgcagaccacgtgcacccaaagaaaaagcccaacctctcgaggacctggccggcttcacagaactgagcgaaacttcaggtcacactcaggaatcactcaccgcggggaaggccaccaaaatcccttgtgagagtccaccactggaggtggtcgacaccaccgcctccaccaagcggcaccttcgaaccagagtacagaaggtgcaggtgaaggaggaaccatcagcagttaaattcactcaaacttcgggagagaccaccgacgccgacaaagagcccgctggggaagacaagggaattaaggcactgaaggaatccgcgaaacagacacctgcacccgcggcatcagtcactggatcccggcgaagaccaagagcccccagggagtctgcccaggcaattgaagacttggcggggttcaaagaccccgctgctggacacactgaggagagtatgaccgacgacaaaaccactaaaatcccatgcaagtccagtcccgagctggaagatacggcaaccagttccaagaggagaccccgcaccagagctcagaaggtggaagtgaaggaggagctgctggctgtcggcaagctgactcagacaagcggagagacgacacacacagacaaggagcccgtgggtgaagggaagggtacaaaagcttttaagcagcccgcgaaacggaagcttgacgctgaggatgtcatcgggtctcgccgtcaaccccgggcccctaaagaaaaggcccagccactggaagacctagcttcttttcaggagctgtcccagacgcccggccacaccgaagagttggccaatggcgctgccgattcattcacctcggctccaaaacagaccccagattcggggaagcccctaaagataagtagacgagttttgagggcgcctaaagtggagccagtcggcgacgtcgtctctacaagggaccccgtgaaatcacaatccaaatctaataccagcttgcctcctctccccttcaaaaggggcggtgggaaggacgggagtgtcaccgggacaaagaggttgcgctgtatgcccgctcccgaggagattgtcgaggagctgcccgcatcgaagaaacagcgggtggcgccacgcgcccgaggaaaaagctccgagccagtggtgattatgaagagaagcttacgtacaagtgcaaagaggatagaacccgctgaggagctcaatagcaacgatatgaagactaacaaagaggagcataagcttcaggacagcgtgcccgagaataagggaatatcactgagatcgaggagacagaacaagacagaggccgaacagcagataaccgaagtattcgtgttggccgagaggatagagattaatcgtaatgagaaaaaacctatgaagactagtcccgagatggatatccagaaccccgacgatggcgcaaggaagccgatcccacgagataaggttactgagaacaaacgctgtctcagatccgctcgacagaatgaatctagccaaccgaaagtagcggaggagagcggaggacagaaatcagcaaaggtcctgatgcagaaccagaagggaaagggtgaagccggcaattcagactctatgtgtctccggtcgaggaaaaccaagagtcagccagccgcctcaacattagagagcaagagcgtgcaaagggtgaccagaagtgtgaagaggtgtgctgaaaacccaaagaaggccgaagataacgtatgtgtcaagaaaattcggaccagaagccatcgggacagcgaagacatctag

SEQ ID NO: 13841 - DNA, 9771 bp, synthetic construct
  misc_feature 1..9771: note = Description of Artificial Sequence: Synthetic coding sequence
  source 1..9771: mol_type = other DNA
atgtggccaactaggcgactggtgacaataaagaggtcaggggtggatggaccccattttcctctctccctaagtacctgtctgttcggccgggggatcgaatgcgatatccggattcagcttcctgtggtgtcaaaacaacactgcaagatcgaaattcacgagcaggaagccatcctgcacaactttagttccaccaatccaactcaggtcaatggctccgtcatagatgaaccagtgaggcttaagcatggggatgtcataacgataatcgaccgctctttcagatacgagaatgagtcgcttcagaacggccgtaaatccaccgagtttcccagaaaaattcgggagcaggagcctgctcgcagggtgtcaaggtcttccttctcttcagaccccgacgaaaaggcccaagattctaaagcttacagcaagatcaccgagggcaaagtctcaggtaatccacaggtgcacattaaaaacgtcaaggaggactcaacggctgacgactccaaggactctgtagcccagggaaccacaaatgtgcactcttctgaacatgcaggtcgtaacggccgcaatgcagctgaccctatttctggggacttcaaggagatctcaagtgtcaaattagtatctcgctatggggaactcaagtcagtgccgacaactcagtgcctggataatagtaagaagaatgagagtccattctggaaactctatgaatctgtgaagaaggaactcgatgttaagtcccagaaagaaaatgtgctgcaatactgcagaaaaagcgggttgcagacagattatgctacagaaaaagaaagtgccgatggcctacagggggaaacacagcttctcgtgtcacgcaaaagccgtccgaaatccggggggtctgggcacgcggttgcagaaccagcctcaccggaacaggagctggaccagaacaagggaaaaggaagggacgtggaatccgtacagaccccaagcaaggccgtgggcgctagttttcctctgtacgaacctgccaaaatgaaaaccccagtgcagtacagccaacaacagaattctccccaaaagcataaaaacaaggacctgtataccactggacggcgcgagtctgttaatttgggtaagtctgaaggattcaaagctggggacaaaacactgaccccacgcaagctgtctacccgtaatcgaactcctgccaaagtggaggatgctgccgacagcgcaactaagccagaaaacttgagctcaaagacccgcggatccatccccaccgatgttgaggtcctgcctactgaaaccgagatccacaacgagccatttctcacactgtggctaacgcaggtcgagcggaagatccaaaaagactctctgtcaaagcccgaaaagctaggcacaaccgctggccagatgtgcagcggcctgcctgggctgtcctcagtggatatcaacaactttggtgattccatcaatgaatccgagggaatcccattaaaacggcgcagggtctcatttggtggtcaccttcgaccagagctgtttgatgagaaccttccccctaatacacccctgaagcgcggggaggcaccaacaaagagaaaatctttagtgatgcataccccacccgtgctcaagaaaattatcaaggaacaacctcagccttccgggaagcaggagtcaggctcggagatccacgttgaagttaaggctcagtctttggtgatctccccaccggccccgtccccccggaaaaccccggtggcttctgatcagcggcgtcggagctgcaagactgctcctgccagctccagtaaaagtcaaacggaggttcccaagagaggaggcagaaaatccggaaacctgccctccaagcgcgtttctatttctcgcagccagcacgatatcctccagatgatctgtagtaaaaggcgcagcggagcttctgaagccaaccttatcgtcgccaaatcatgggctgatgttgtgaagcttggtgctaaacagacgcagactaaggtcatcaaacatggcccccagcggtccatgaataaacggcagaggaggccagccacgccgaagaagcctgttggggaggttcactcccagttctcaactggccatgccaactcaccttgcactatcatcatcggcaaggcccacaccgagaaggtgcacgtccccgccaggccttacagagtgctgaacaactttatctcaaaccagaagatggacttcaaagaggacctgagcggtatcgccgaaatgtttaaaacacctgtcaaagaacagcctcagctgaccagcacatgccacatcgccatttccaactctgagaatcttctggggaaacagtttcaggggacagattccggggaggagcccctgcttcccacctccgaaagcttcggtggtaacgtcttcttcagcgcccaaaacgctgccaaacagccatccgacaagtgttctgctagcccacctctgcgacgccaatgcattcgggagaacggtaatgtagccaagacaccccggaacacatataaaatgacgtcactcgaaacaaagacttctgacactgagactgaaccatccaagacagtgagtactgcaaacaggtccggacggagtaccgaatttagaaacatccagaaactgcccgttgagtccaaaagtgaggagaccaatacagagatagtcgaatgtatcctgaaacgagggcagaaggcgaccctcctgcaacagcggagagaaggcgagatgaaagaaattgagagacctttcgaaacatataaagagaatatcgaactgaaagagaacgatgagaagatgaaagccatgaagcgtagtagaacgtggggacagaaatgtgcgcctatgagcgacctcacagacctgaagtctctgcctgacactgagctcatgaaggacacggcccgcggacagaatctgctgcagacccaggatcatgctaaagcccccaaaagcgaaaaggggaagataacgaagatgccgtgtcagagtctgcaacccgaacccattaacacccccacccatacgaaacagcagctgaaggcatccctgggcaaagtgggagtaaaggaggagctgttagcggtgggcaagttcacacggacaagcggcgagaccactcacactcaccgggagccagcaggggatggcaaaagcattaggacattcaaagagtcccccaagcagatcctcgaccctgctgcccgagtgactggtatgaaaaagtggcctagaacacctaaagaggaggcccaaagcttagaggatctggccggattcaaagagctcttccagacaccaggcccctctgaagagtctatgaccgatgaaaaaaccactaaaattgcgtgtaaatccccccccccggagtcagtagatacgccaacatccaccaaacagtggccaaagcgctcgctgcgcaaagctgacgtggaagaagaattcctggcgctacgaaagttaaccccatcagccggcaaggctatgttaacaccaaaacctgctggcggggatgagaaggacataaaagcatttatgggcaccccggttcaaaaattggaccttgcagggacgctgcccggctccaagcggcaacttcagacacctaaagaaaaggctcaggcactggaagaccttgcaggattcaaagagctgttccagacccccggacacacagaggaactcgtggccgccggtaaaacgaccaaaattccgtgcgattcccctcagagtgacccagtggataccccgacaagcaccaaacagagacccaaacggtcgattcgtaaggcagacgtggagggtgaactgctggcctgccgcaacctcatgccgagcgccgggaaggctatgcacaccccgaaaccttcagttggtgaggagaaggacataatcatctttgtggggacaccagtgcagaaactcgatttgacagagaacttgactgggagtaagcggcggcctcagacacccaaggaggaggcacaggcccttgaggacttaacgggttttaaagagcttttccaaaccccgggacacaccgaagaagcagtggctgcaggaaagacaacaaaaatgccttgtgaatcttcaccaccagagtctgccgatactcccacaagtacccggagacagcctaaaactccgctcgagaagagagatgtgcagaaagagctctccgctctgaaaaaactgacccagacgtcgggcgaaacaacacataccgacaaggtgcctgggggagaggataaaagcatcaatgcattcagggagacggctaagcagaaactggacccagcagcctcagtgaccgggtctaagagacatcccaaaacaaaagaaaaagcgcaacccctggaggatctggctgggctcaaagagctctttcagactcctgtgtgcaccgacaagcctactacacacgaaaagaccactaaaatcgcctgtcgatcacaaccggatcctgtggatacccccacatctagcaagccacagtccaaaaggagtttgcggaaggtggatgttgaagaggaattttttgccctgcgcaaaaggaccccttctgccggcaaagcaatgcacacaccaaaaccagctgtgagcggtgagaagaacatctacgccttcatgggaacaccggtccaaaagttagatctgaccgagaacctgacaggaagtaagaggaggttgcaaacccctaaggaaaaagctcaagccctggaagatctcgctgggtttaaggagctgttccagacacgaggccacactgaagaatctatgactaacgataagacagccaaagtcgcatgtaagagctcccaaccagaccccgataaaaatcctgcctcatctaagaggagattgaaaaccagtctgggcaaagtaggagttaaggaggaactgttggcagtgggtaaattgacccagaccagcggcgaaacaactcatacccacacagagcccactggagatggaaagagcatgaaagcgtttatggaatcccccaagcagattctggactctgcggctagccttaccggtagcaagcgacaactacggacccctaagggaaaaagtgaggtccccgaagacttagctgggttcatcgagctttttcagacgccctcccacactaaggagagcatgacaaacgaaaagacaacaaaagttagctacagagcctctcagcccgacctggtggacacccccacaagtagtaagcctcaaccgaagcggtctctgcggaaagcggacactgaagaggaattccttgcctttaggaagcaaacaccaagcgctgggaaggctatgcatacgcccaagcctgccgttggcgaagagaaagacattaacaccttcctcggcaccccagtgcaaaaactggaccagcccggcaacctgccaggatccaatagacgtctgcaaacacggaaagagaaggcgcaagctctggaggagctcaccgggtttcgcgagctgttccaaaccccatgcaccgacaatccaacaacagatgagaagaccacgaagaaaatattatgcaagagtcctcagagtgaccctgcagacacaccgactaatactaaacagagaccaaagaggtccctgaagaaggcagatgtcgaggaagaattcctcgctttccgaaagcttaccccctcagctgggaaggccatgcacacacctaaagccgctgtgggggaagagaaagatatcaacacattcgtcggcacccccgtggagaagctcgatctcctgggcaaccttccaggtagtaaacgcagaccccagacccccaaggagaaggctaaagcccttgaggacctagctggcttcaaggagctgttccagacacccgggcacacagaggagagtatgaccgatgacaaaattaccgaagtttcctgcaagtctccacagcccgaccctgtcaagacacccaccagcagcaagcaaaggctaaagatttctctcggaaaggtgggtgtgaaggaagaagtgctccctgtcgggaagctgacgcagacctcaggtaagaccactcaaacccatagagagacagccggcgatggcaagtccattaaggcatttaaagagtcggccaaacagatgctggacccggccaactacggaactggaatggagagatggccccgtactcccaaagaagaagctcaatcactggaggatctggccggatttaaggagctatttcagacgcctgatcatacagaggaatcaacaactgacgacaaaacgactaagatcgcctgtaagtcccccccaccggagtctatggataccccgactagtacgcgcaggagacccaagacaccgctaggaaaacgggatattgtggaagagctatctgcgttgaaacagctgacgcaaaccacccacaccgacaaggtgccaggtgacgaagataaaggcatcaatgtattccgtgagacagcgaaacaaaaactggatcccgccgccagcgtgacaggtagcaaacgccagcctcgcacccccaagggcaaagctcagccactcgaggaccttgcaggcctgaaagagctttttcagacgcccatttgcaccgataagccaaccacccatgagaagacaaccaagatcgcttgtaggagccctcagccagatccagtcgggactcctaccatcttcaaaccacagtccaagcgatcccttagaaaagcagacgtcgaggaggagagtctcgccctcaggaaaagaacaccctccgtcggcaaggccatggatacccccaagcccgctggaggtgatgagaaagatatgaaagcttttatgggaactccagtgcagaaacttgatctccctggaaacctccccggcagcaagagatggccacagacccccaaagagaaggcccaggcactggaagacctggctggcttcaaggaattgttccagactcccgggacagataagcctaccactgatgagaagacaacaaagatagcctgtaagtcaccccagcccgacccagttgacaccccagctagcaccaagcagagacctaagaggaatttgaggaaggctgacgtggaagaagagttccttgcactcagaaaacgcactccctccgcaggtaaagccatggatacaccaaaaccggccgtcagcgacgagaagaacattaacaccttcgtggagaccccagttcagaagctggatctgctcggtaacctccccggctccaaacgccagccccagacgccaaaggagaaggcagaagctcttgaagacctcgtggggtttaaagagctgttccagacccccggtcatacagaggaatcaatgaccgacgataagattaccgaagtgagttgtaagtccccacagcctgaatcatttaagacttcaagatcttccaagcagcggctgaagattcccctagtgaaggtggacatgaaagaggaaccgttggctgtgtctaagctgaccaggacaagcggagaaacaactcagacccacacagagcccaccggcgatagtaaatcaatcaaagcattcaaggagtcaccaaagcagatcctcgaccccgctgccagcgtgacagggtccaggcggcagctacggacaagaaaagaaaaagcccgcgctctcgaggatcttgtagacttcaaggaactattttccgcccctggacatacagaggaatcgatgactatcgataagaacacgaagataccctgcaagagcccgccacctgaattaactgatactgctacaagtaccaagcgttgtcccaaaacccggcccaggaaggaagtgaaggaagaactgagcgccgttgagcgcctcacccagacttcagggcagagcactcatacacacaaagaacctgcaagcggagatgagggaatcaaagtgctcaaacagcgtgccaagaagaagccgaatcccgtggaggaggagcctagtaggcgacgaccaagagctcctaaagagaaagcgcaacctctggaagaccttgctggattcaccgagctgtcagagactagtggacacacccaggagtctctcaccgccggtaaggcaacaaagattccctgcgaaagcccaccactggaagttgtcgacaccactgccagcaccaaaagacaccttaggacccgggtacagaaggtccaagtgaaggaagagccgtccgcagtgaagttcacccagacaagcggtgagaccacggacgcagacaaagagcctgcgggggaggacaaagggatcaaggcgttaaaggagtccgctaaacagacccctgcccccgctgcttctgtgaccgggtccaggcgccgaccacgcgccccacgcgagtcagcacaggccatcgaagatctcgccggctttaaggatcccgccgccggacataccgaggaaagtatgaccgacgataaaacaactaagataccatgcaagagctcgccagagcttgaggacacagcgacatcgtcaaagcggcgacctagaaccagggcgcagaaggtggaggtaaaggaagaactgcttgcagttggaaagctcacacaaacttctggcgaaacgacccatacagacaaagagccagtgggcgagggcaagggcaccaaagcctttaaacagcccgcaaagaggaaactagacgcggaggacgtgatcggttctcggagacagcctagggccccgaaggagaaagcccagcctctggaggacctagcatccttccaagaactttcccaaacaccagggcacacggaagaattggctaacggtgccgctgatagctttacaagcgcaccgaaacagacaccagacagtggcaagccgctgaaaatttcgcgccgcgtgttacgggcacctaaggttgaaccggttggagacgtggtgtccactagggatcctgttaaatcccagagtaagtctaacaccagtcttccacccctgccatttaaaagagggggcgggaaggacggcagcgtgactggaaccaagcgcttgagatgcatgcctgcacccgaggagatcgttgaggagctcccagccagcaagaaacaacgggtggcgccaagagccagaggcaaatccagcgaacccgtcgtcattatgaagcgttctctgaggaccagcgcgaaacggattgaaccagctgaggaactaaacagcaatgatatgaaaaccaataaggaggaacacaaactgcaggattcagtgcccgaaaataagggaatcagcctgcgttccaggagacagaataagactgaagccgagcagcagattacagaagtcttcgttctcgccgagagaattgagatcaatcggaacgagaagaagccaatgaagaccagcccagagatggacatccaaaatcctgacgatggagcgagaaagccaataccgagagataaagtgacagaaaataagcggtgcctgcgtagcgccaggcagaacgagagtagccaaccgaaagttgctgaagaatcaggtggacagaaatccgctaaggtgctgatgcagaaccagaaaggtaaaggcgaagccggtaattctgattcaatgtgcctgcggtctagaaaaaccaaaagccagcccgcggccagcaccctcgaatcaaagagtgtccagcgggtcactaggtccgttaaacggtgtgccgagaatccaaaaaaggcggaagacaatgtctgtgtcaaaaagattagaacaaggagccatcgcgactctgaggatatttag

SEQ ID NO: 13842 - DNA, 9768 bp, synthetic construct
  misc_feature 1..9768: note = Description of Artificial Sequence: Synthetic coding sequence
  source 1..9768: mol_type = other DNA
atgtggccaactaggagactggtcactatcaagcgatcaggggtcgatgggccccatttcccgctgtctctgtctacgtgtctcttcgggagaggcatcgagtgcgatatccgtatccaattgccagttgtaagcaagcagcactgcaaaatcgagattcatgagcaagaggccatactgcacaatttttcgagtacgaaccctactcaggttaatggatctgtcattgacgaacctgtgaggctgaaacacggagacgtgataaccatcattgatagatcttttaggtacgaaaacgagagtcttcagaatggcaggaaaagtaccgagtttccgcggaagattcgggagcaggagccggcccgccgggtcagtaggtccagtttttcatctgacccagatgaaaaagcgcaggactctaaagcctactcaaagattactgagggtaaggtgtcaggtaacccgcaagtgcacatcaagaatgttaaggaggattccaccgcagacgactcgaaagattcagtggcccaggggactaccaacgtacatagcagtgagcacgcaggacgaaatggtcggaacgccgccgatccgatttcaggcgattttaaggaaatttcttcagtcaagcttgtgtccaggtacggcgagttgaaatctgtccccacgacgcagtgtctagacaatagtaagaagaacgagtctccattttggaaactgtacgagtctgtgaagaaggaactggacgttaagtcccagaaggaaaatgtactgcagtattgccggaaatccggactccagactgactatgccaccgaaaaagagtccgccgacggtttacaaggggagacccaactgctcgtcagtagaaagtcaagaccaaagtccggaggcagcggccacgctgttgccgagcctgcctctccagaacaggaattggatcaaaataagggtaagggccgcgatgtggagtcagtccagacgccctctaaagcagtgggggctagcttccctctgtacgagcccgccaagatgaagactcctgttcagtatagccagcaacagaatagcccacaaaaacataaaaacaaggatctgtacacaacaggccggcgcgagtccgtgaacttgggaaagtcagaggggtttaaggctggcgataaaactctaaccccaaggaagctgtccacgcgaaatcgcactcctgctaaggttgaggatgccgcagactcggccacgaagccggaaaacctgtcctccaaaacacgcggtagtattcctacagatgtggaggtgcttcctacagaaaccgaaatacacaacgaaccattccttacactatggctcacacaggttgaacggaagatccagaaggactccctgtcaaagcccgagaaactgggaacaacagctggccagatgtgcagcggactgcctgggttgtcttccgtcgatattaacaactttggggacagcattaatgaaagtgagggtatcccactaaaacgccgtagggtttctttcggcggccatctacggcctgaactgtttgacgagaatcttccacccaataccccactcaagaggggggaagcgccgacaaaaaggaagagcctggttatgcacacaccgccagtactgaaaaaaattattaaggaacagccccaacccagcggcaagcaggagtcaggatccgaaatccacgtagaggtaaaagcccagtccctcgtcatcagcccacctgcgcccagcccccggaagacacctgttgccagcgatcaaaggcggagaagctgcaagactgccccagcttcgtcctctaagagtcaaaccgaagtccctaaacggggcggcgaaagggttgcaacatgtttgcagagggtctcaatttcgcggtctcagcatgacattcttcagatgatatgctcaaaaagaaggagcggagcatctgaagccaacctgatcgtcgctaaaagctgggctgacgttgtcaagctaggtgcaaagcaaactcagacgaaggtcataaagcatggcccacaacgcagtatgaataaacgacagcgaaggcccgccactccaaagaaaccggttggagaggtccactcacagttctctaccggacacgctaattcgccgtgtacaatcatcattggaaaggcccatacggagaaagttcacgttcccgccagaccctaccgggttctgaacaatttcatttcaaatcaaaaaatggactttaaggaggatctgagcggcatcgccgagatgtttaagacacctgtaaaggagcagccccagctcacttctacttgccacatagcgattagcaattctgaaaatttgcttggcaagcagttccagggaactgactctggcgaagagccccttctgcccacttctgaatcattcggggggaacgtgttcttcagtgctcagaacgccgccaagcagccaagtgacaaatgcagcgcatcacctcccctgagacggcagtgtatccgcgaaaatggcaacgtggccaagactcccagaaacacatacaagatgacctcactggagactaaaacaagcgataccgagacagagcctagcaagacagtcagcaccgctaatcgcagtgggcgttctaccgaatttagaaatatccagaaactccctgtggaatctaagtccgaagagaccaacacagaaatcgtcgagtgtatcctgaaacgtggccaaaaagccactctgctgcagcagcgacgcgagggagaaatgaaggagatcgaaagaccttttgagacttataaagagaacattgaactaaaagagaatgacgaaaagatgaaggctatgaagagatcaagaacttgggggcagaaatgcgccccaatgtccgacctcaccgatctaaagagccttccagataccgagctgatgaaggacacagcccgggggcagaatttgctgcagacccaggatcatgctaaggcacctaaaagcgagaaggggaaaattaccaaaatgccctgtcagtccctgcagcccgaacccatcaatactcccacacacaccaaacagcagttaaaggccagcctaggcaaggtcggcgtgaaagaggagctgcttgcagtcggcaagttcacgagaacttccggagaaaccactcacacccaccgtgaacccgccggtgacggaaaatctattcgcacttttaaggagagtccaaaacagattttagatcctgccgccagggtcactggtatgaaaaaatggccgcgtaccccgaaggaggaggcccagagcttggaagatctcgccgggttcaaggaactatttcagacaccggggccgagcgaggagtccatgactgacgaaaagacaactaaaatcgcttgcaaatctcctccccccgagtctgtcgatacacccacgtctacaaagcagtggcctaagcggtctctcagaaaggctgacgttgaggaagagttcctggctttacgcaagttgacaccttctgccggaaaggccatgctgactcctaagcccgccggcggagatgaaaaagatattaaagcattcatggggactcccgtccagaaactggaccttgccggaacactgcctggttcaaagcggcaacttcagactcctaaagaaaaggctcaggctctggaagatctggcaggatttaaggagctgtttcagactcctgggcatacggaggagctggtggcggctggaaaaactactaaaataccatgtgacagtccacagtccgatcccgtggacactcccacctctactaaacagcgccccaaaagaagcatacggaaggcagacgtggagggcgagctcttggcatgcaggaacctgatgccatctgccgggaaggctatgcatacacccaaaccctcggttggagaggaaaaggacatcattattttcgtaggtaccccggtgcagaagttagacctgaccgaaaatttgacagggtccaagcgaagacctcaaactcccaaggaggaggcgcaagctttggaggatctgaccgggtttaaagaattgttccagacgccgggtcatacggaggaggccgtggctgccggaaaaaccactaagatgccttgcgagtctagtccgcccgagtcagctgatacacccaccagtaccagaagacaaccaaaaacacctttggagaagagagatgtgcagaaggaattgagcgctctcaagaagctgacacaaactagtggagaaacaacacatactgacaaggtacccggtggggaagacaagtccattaatgcattccgcgagaccgcaaagcaaaaactggacccagcagcttcagtgacagggtctaaacgccaccccaagactaaggaaaaagcacagcccctggaggacctggccggcctgaaagagctgttccagacacctgtgtgcacggacaaaccaacaactcacgagaagaccacgaagatcgcatgtcgctcccaaccagatccagtcgacactccaacgtcttccaagcctcagtcaaagcggtctctgcgaaaggtcgatgtcgaggaggaatttttcgctctgcgcaagagaaccccatctgctggcaaggcaatgcatacacccaaaccagcagttagtggggagaaaaacatctacgcatttatgggtaccccagtccaaaaactggatttgacggagaacctgacaggttctaaacgacgactccaaacaccaaaagagaaagctcaggcgctcgaggacctggccggattcaaggaactattccaaactagaggccatactgaggagtccatgactaacgacaaaaccgcaaaagtggcttgtaagtcttcacagcctgacccagacaaaaatcctgccagtagcaaacgccggttgaagaccagtctaggtaaggtgggcgtgaaggaggaactgcttgcagtaggaaagctcacgcagacaagtggggagaccacacacactcatactgaacccacaggggacggtaagtctatgaaagcatttatggagagtcccaagcagattctggattccgcagcttccctgaccgggtccaagagacagctgaggacgcccaagggaaagagtgaagttcccgaggatctggctgggttcatcgaattgttccagacaccgtctcatacaaaggaatctatgacaaatgagaaaaccaccaaagtctcgtatcgcgccagtcagcctgacttagtcgatactccaacatcctctaaaccccagccaaagaggtcactcagaaaagctgataccgaggaagagttcctggcttttaggaagcagactcctagtgccggcaaagccatgcatacgcctaaacctgccgtgggcgaggagaaagacattaacactttcctcggcacaccggtgcagaaattggaccagccaggcaacttgcccggaagcaaccgacgcctccagactagaaaggagaaagcccaagccctggaagagttgaccggattccgggagttatttcagaccccttgcacagataaccccacgactgatgaaaagacaaccaaaaagatactgtgcaaatcaccccagagcgatccagccgacacccccactaacactaagcagcgcccaaagcggtctttgaagaaggctgacgtggaggaagaattcttggcatttcgcaagttgactccatccgctggcaaggcaatgcataccccaaaagccgccgtgggagaagaaaaggatatcaataccttcgttggaaccccagttgagaagctggacctgctcggaaatctgccaggctcaaaaaggaggccacagacacccaaggagaaagctaaagcccttgaagacctcgcaggtttcaaagaattgtttcagaccccaggtcacactgaagagagtatgaccgatgacaagattacagaagtgtcctgcaagtcgcctcagcccgaccctgtgaagacccccaccagttcgaagcagcgactgaaaatttctctagggaaagttggagtcaaagaggaagtgttgcccgtcggaaagctgactcagactagcggtaagaccacccagacacacagggagacagcaggagacggtaaatctatcaaggccttcaaggagtctgctaagcagatgctcgatcctgctaactatggtacgggaatggagcgctggccccgcactccaaaggaggaggctcaaagtctggaggatctcgcaggctttaaggagctcttccagacccccgatcacactgaagaatctaccacggacgacaagaccaccaagattgcctgtaaatcccctcctccagaatcaatggacactccaacctcaacacggcgccggccgaaaaccccactgggcaaacgggatatagtggaggagctctctgccctcaagcagttgacccagactacccacacggataaagtacctggagacgaggacaagggaataaacgtttttagggaaactgccaaacagaagctcgatccagccgccagtgttaccggatccaagcggcagccaaggacgcccaaagggaaagcccagccactcgaggacctcgcaggccttaaagagctcttccagaccccgatatgtaccgataaacctaccacccatgagaagaccacaaaaattgcgtgccggtcccctcagccagatccagtcggcacccctaccatatttaaaccccagagcaagagatctctccggaaagccgatgtggaggaagaatcactcgcacttcggaaaaggactcctagcgtcggaaaagcaatggacacccccaaacctgctggcggagatgaaaaggacatgaaggccttcatggggacacccgtgcaaaagctcgatttgcctggtaacctgcccgggtcaaagagatggccccagacccctaaagagaaggcccaggcgctggaagacctggcaggtttcaaagagctctttcaaactccgggaacagataagccaacgactgatgagaagacaacaaaaatcgcctgtaagtctccacagcctgacccagtggatacacctgcttccacaaaacaaaggccaaaacggaatcttcgcaaagcggatgttgaggaggaatttctcgctctgcggaagcggaccccttcagccggtaaggccatggacactcctaagcctgctgtatcagatgagaagaatatcaatacattcgtcgaaacaccagtccaaaaactggacctgttaggaaacctacctggatctaagcgtcaaccacagactccaaaagaaaaggctgaggccctagaagacctcgttggcttcaaggagttgttccagacccccggacacacagaggagagcatgaccgacgataagattacagaggtgtcatgcaagtctccccagcccgaatcctttaaaacatctcggtcatcaaagcagcggttaaagattcctctggtaaaggttgacatgaaggaagaacctctcgccgtgtcaaaactaacccggacctcaggcgaaactacgcaaactcataccgagccaaccggtgactcaaaaagcattaaggccttcaaagagtcccccaagcaaatactggacccagcagcctctgtcacagggtcgaggcggcagctaagaacacggaaagagaaggcccgggccttggaggacttggtggattttaaagaactgttctccgcaccaggtcacacagaggagtctatgacgatagacaagaacaccaaaatcccctgtaaaagtcccccgcctgaattgacggacaccgcaactagtactaaaaggtgcccgaagactcgacctagaaaagaggtaaaggaggagctgtctgccgtcgagcggctgacgcagaccagcggtcaatctactcacactcacaaagagcctgcctcaggcgacgaggggattaaggtgttgaagcaacgggcgaagaagaaaccaaatccggttgaagaagaaccatcccgccggcgacctagggccccgaaggagaaggcccagcccctggaagatctcgccggatttactgaactgagcgagacatccggccatacccaagaatccctaacggccggcaaagccactaaaattccatgtgagtctcctcctctagaagtggtggatacaaccgcgtccaccaaacgccacctgcgcacacgcgtgcagaaggtgcaagttaaggaagagcccagcgccgtgaagtttacgcagacatccggcgagactaccgacgcagacaaagagcctgctggagaggacaaaggaataaaggcactgaaggagtccgccaagcagactccggctccggcagcctcggtaacaggaagccgacgcagaccacgggcccccagggagagcgcccaagctatagaagacctagccggctttaaggatcctgctgccggccacaccgaggagagcatgaccgatgacaaaacgacaaagatcccttgcaagtcctcacctgaactcgaagacactgctaccagttctaaaagacgcccacgtacacgtgctcaaaaggtcgaggtgaaggaggaactgttggccgtggggaagctgacacagacctctggtgagactactcacacggacaaagaaccagtcggggaaggaaagggaaccaaagccttcaagcaaccagccaagcgtaaactggacgctgaagacgtgataggaagcaggcggcagcctcgagctcccaaggaaaaggctcaaccgctggaagatctggcctccttccaggagctatctcagacgcctggacacacagaggagctcgccaacggggctgccgactcatttacatccgcacctaaacagacacctgactccgggaagcctctgaagatctcacggagagtgctgagagccccaaaagtggagccagtcggggacgtggtgtcaactagagatcccgttaagagccagagcaagtctaacacaagcctacctcctttgcctttcaagcggggtggaggcaaagacggcagcgttacgggcactaagcgtttgcggtgtatgcccgcgccagaagaaattgtcgaagaactgcctgccagtaagaagcagcgcgtcgcacccagagcccggggtaagtctagtgaacctgttgtcatcatgaagaggtccctgagaacctctgccaagaggatcgaaccggcagaggagctgaactctaacgatatgaagactaataaggaagaacataagttgcaagattcagtgccagagaacaagggaattagcctacgtagtaggcgacagaacaagacggaggcagagcagcagatcaccgaggtttttgtgctcgctgagagaattgagataaatcgtaacgaaaagaagcccatgaagacaagtcccgaaatggatattcagaatcctgacgatggggcacgcaaacctatccctagggacaaggttactgagaacaaacgttgtcttcgctcagcacgccagaacgaatcctcgcagccaaaagtggcagaagagtccgggggacagaagtccgcgaaagtgctgatgcagaaccaaaaaggcaagggtgaagccggcaacagcgatagtatgtgtctccggagtaggaaaaccaagtcccagccagcggctagtactctggaaagcaaatccgttcagagagtcacccggagcgttaagcgttgtgccgagaatcctaagaaggctgaggacaatgtgtgtgtgaaaaagattaggaccagatcccatagggattcggaagatatctag

SEQ ID NO: 13843 - DNA, 141 bp, synthetic construct
  misc_feature 1..141: note = Description of Artificial Sequence: Synthetic coding sequence
  source 1..141: mol_type = other DNA
atgtggcctaccagaagactggtgaccatcaagcggagcggagtagacggcccgcatttcccccttagtctcagcacatgtctctttggacgacggaaatgtgtgcttcagtgcaccgagtgctccaaaacggctatttag

SEQ ID NO: 13844 - DNA, 1557 bp, synthetic construct
  misc_feature 1..1557: note = Description of Artificial Sequence: Synthetic coding sequence
  source 1..1557: mol_type = other DNA
atgttgcgggtggtgtcctggaatataaatggtatcaggagacctctgcaaggagtagcaaaccaggagcctagcaattgtgccgccgtggccgtagggcgcattctggatgagctggatgctgacatcgtgtgcctgcaggagaccaaggtgacacgggacgcccttactgagccgctcgctattgtggagggttacaattcgtatttcagcttttctaggaaccggtccggatactccggagtcgctacgttttgcaaggacaacgctacacccgtcgcagcagaggagggactgagtgggctgttcgctacccagaacggagatgtgggatgctacggaaatatggatgagttcacgcaggaagagttgagagccctggattctgagggccgcgctctcctgacacagcataaaattaggacctgggagggaaaagagaaaacgttaacgcttatcaatgtgtactgccctcacgccgatcccggccgtcccgagcgtctggtcttcaagatgagattttaccgcttgctccagatccgggctgaggctctgctggcagcagggtctcatgtgattatccttggagatttaaataccgcgcatcgacccattgatcactgggacgctgtgaatttggaatgttttgaagaggatccgggacggaagtggatggatagcctactcagcaatcttggttgccagtctgcctcacacgttggccccttcattgattcataccgatgttttcagcctaagcaggaaggggcctttacatgctggagtgcggttacaggcgctagacatctgaattacgggtctcgattggattatgtgctgggagaccgaacgctagtgatcgacacgtttcaagccagttttcttctgcctgaggtgatggggagcgaccactgtcccgtgggagcagtcctctcagtaagcagtgtgcccgcaaaacagtgcccaccactgtgtacaagatttcttcccgagtttgccggtacccagcttaagatactgaggtttctggtgcccctggaacaatctccagtcctggaacagagcaccttgcagcacaataaccagactcgggtacaaacctgccagaataaagcccaggtgcggtccacgaggcctcagccttcccaggtgggcagtagccgagggcaaaagaatcttaagagctacttccagcccagtccgtcctgcccacaggccagccccgacattgaactaccaagcttaccccttatgagtgccctgatgacacctaaaactcccgaagagaaggccgtggcaaaggtagttaagggccaagctaagacctcagaagcaaaggatgagaaggaacttaggacttccttctggaaatcagtgctggccggacctctcaggactcccctttgcggcggtcatagagagccctgcgtcatgaggaccgtgaagaagccaggcccaaacctagggcgaagattttacatgtgcgctaggccccgcggacccccaacagatccttcttcccgctgcaattttttcctttggagcaggccgagctag

SEQ ID NO: 13845 - DNA, 1191 bp, synthetic construct
  misc_feature 1..1191: note = Description of Artificial Sequence: Synthetic coding sequence
  source 1..1191: mol_type = other DNA
atgcctagagtcaaggctgcccaagcaggccggcagagctcggctaagaggcacttggccgaacaattcgcagtgggcgagatcatcacagatatggctaaaaaggagtggaaggtaggtctcccaatagggcagggcggatttggctgcatttacctagcagacatgaactcaagtgagtcagtgggttcagatgctccttgtgtggtcaaagtggaaccctcagacaacggccctttgttcaccgaactcaagttctaccaacgagccgcaaagccagaacagattcagaaatggataagaactcgcaaactgaaatatttgggggtaccgaaatactggggaagtggattgcacgacaaaaacgggaaatcgtatcgctttatgatcatggaccggttcgggtctgacttgcaaaagatctatgaagcgaatgctaaaaggttttctaggaagacagtgctgcaactgtctctgaggatactggatatacttgaatacattcacgagcatgaatacgttcacggcgacatcaaggcaagcaaccttttgctgaattacaagaacccagatcaggtttacctggtggactatggtctggcatatcgctactgccccgagggcgttcacaaggagtacaaggaggaccccaagcgatgccatgatggcactatagaatttacttctatcgatgcccataacggcgtggctcccagccgtcggggcgatctagaaatcctgggatattgcatgattcagtggctaacagggcatctgccttgggaggacaacctgaaggaccccaagtacgtcagggacagcaaaatccgataccgagagaacatcgccagtctgatggacaagtgttttcccgagaagaacaaacccggtgagatcgccaagtacatggagaccgtgaagctgttggattataccgaaaagccactgtatgagaacctcagggatatcttgctccagggattaaaggctattggatccaaggatgacggaaagcttgacctctccgtggtggagaatggaggattaaaagccaaaaccatcactaagaagcggaagaaggaaatcgaagaatctaaagaacctggagtcgaagacacagaatggtctaacactcagaccgaggaggccattcagacccgctcacgaacgagaaaaagagtgcagaaatag

SEQ ID NO: 13846 - DNA, 957 bp, synthetic construct
  misc_feature 1..957: note = Description of Artificial Sequence: Synthetic coding sequence
  source 1..957: mol_type = other DNA
atgccaaagcgcggaaaaaaaggtgctgtggccgaggatggagatgagcttcgaactgaacctgaagccaagaagtcaaagactgctgcgaagaagaacgacaaagaagccgcaggtgagggccccgccctttacgaagatccccccgaccagaaaacctctccatctggaaagcctgccacactgaaaatttgttcctggaatgtggacggcctccgcgcctggattaaaaagaagggactggattgggtgaaggaggaggctcccgatatcttgtgtttacaggaaactaaatgcagcgaaaacaagttgcctgcggagctccaggagctaccggggctcagccaccagtattggagcgcccccagcgacaaagaaggctatagtggggtcgggctcctgtcacggcagtgtcccttaaaagtgtcttacggcatcggcgacgaggagcatgatcaggaaggtcgggtaattgtcgcggagtttgatagcttcgtgctggtgactgcctacgtgcctaatgccgggaggggtctagttaggttagagtatagacagagatgggatgaagcgtttaggaaatttctgaaaggcctcgcctcacggaaacctttggtgctgtgtggggatctgaacgtggctcacgaagagatcgaccttcggaatcccaagggaaataaaaaaaacgcaggcttcactccacaagaacggcagggatttggagagctgctgcaggccgtaccgttggcagactccttccgacacctctatcccaataccccttatgcttacaccttttggacttatatgatgaacgcaaggtccaagaatgtgggttggcgcctggattactttcttctgtcccactccctgctgcccgctctttgcgacagcaagatccggagtaaggcactgggtagcgatcactgtcccattaccctatacctcgctctctag

SEQ ID NO: 13847 - DNA, 792 bp, synthetic construct
  misc_feature 1..792: note = Description of Artificial Sequence: Synthetic coding sequence
  source 1..792: mol_type = other DNA
atgccaaaaaggggaaagaaaggagccgttgctgaggacggtgacgaactgcggactgagccggaggccaagaaatcgaagaccgccgctaaaaaaaacgacaaggaagctgctggggaggggccggctttgtatgaagacccccccgatcagaaaactagtcccagcgggaagcccgcaaccctgaagatttgctcatggaatgtggacggcctcagagcttggatcaaaaaaaagggcctagactgggtgaaagaggaggcacctgacatactgtgtctgcaggaaacaaagtgttcagagaacaagctcccggcagaattgcaggaacttccaggtctgagtcaccagtattggagcgctccttccgacaaagagggttactccggagtcggcctactgtccaggcagtgtccgctgaaggtttcctatggcataggcgatgaggagcacgaccaagaggggcgcgttatcgtggcagaatttgattcttttgtcctcgtgaccgcctatgtgcctaatgctggacggggcctcgtgaggcttgagtatcggcagcggtgggatgaggctttcagaaaatttctgaaggggttggcctccaggaagccactggtcctgtgcggagacctgaacgtagcacacgaggagatcgatctcagaaatcccaaaggcaacaagaagaatgcaggcttcaccccacaggagcggcagggctttggtgagttgctccaggccgtgccacttgcagacagctttcggcacctttatcctaacacgccatacgcctag

SEQ ID NO: 13848 - DNA, 957 bp, synthetic construct
  misc_feature 1..957: note = Description of Artificial Sequence: Synthetic coding sequence
  source 1..957: mol_type = other DNA
atgccaaaacgcggtaagaagggggcagtcgccgaagacggagatgagcttcgcacagagcctgaagcgaaaaaaagcaaaaccgcagcgaagaagaacgataaggaggcagccggagaaggaccagcgttgtatgaggatcctccagatcagaaaaccagccctagcggcaaaccagcgacgctcaagatctgttcctggaatgtggacggtcttagggcctggataaaaaagaagggcttggattgggtcaaagaagaggctcctgacatcctgtgcctgcaagaaactaagtgctccgagaataaattacctgccgagttgcaagagctgcccgggctgtctcaccagtattggtcagcaccaagcgacaaggaaggatattccggtgtcggcctcctctcaagacaatgtcctctcaaggtcagttacggtattggcgacgaggagcacgaccaggagggtcgagtcattgtggccgaattcgattcctttgtacttgtgacagcatacgtcccaaatgctgggcgcggacttgtccgcctcgagtaccgccagcggtgggatgaggcttttaggaagtttttgaaggggcttgcctctcggaagccccttgtgctgtgcggggacctgaatgtggcacacgaagagatagatctgcgaaatcccaagggcaacaagaagaacgcgggttttacaccccaggagcggcagggctttggggagttgcttcaagctgtcccactggccgactcttttaggcacctgtatcctaacactccatacgcctataccttctggacatatatgatgaacgcaagatccaaaaacgtaggatggcggctggattatttcttattgtctcatagtctgctgccggcactgtgtgactcaaagatcagaagcaaggcacttggtagtgatcactgcccaattacactgtatctagccctgtag

SEQ ID NO: 13849 - DNA, 525 bp, synthetic construct
  misc_feature 1..525: note = Description of Artificial Sequence: Synthetic coding sequence
  source 1..525: mol_type = other DNA
atgccaaaaaggggcaagaaaggtgccgtggcagaagacggagatgagctacgaaccgaaccagaagccaaaaagtctaagacggccgcgaaaaagaatgacaaagaggccgctggcgaaggacctgccttgtatgaggatcctcccgaccagaaaacctccccatctggcaaacccgcgaccctcaaaatctgttcttggaatgtggatggcttgcgagcttggattaagaagaaagggctggactgggtgaaagaagaagcccccgatattctttgtcttcaagaaaccaaatgctctgaaaacaagctcccagcggagttgcaggagttgcctgggcttagccaccagtactggtctgctccgagcgacaaggaaggctacagtggagtaggactgctgagccgtcagtgtccactgaaggtgtcatatggaatcggcgacgaagaacatgaccaagagggtcgagtcatagtagcggaattcgatagcttcgtgctcgtaaccgcttacgtcccaaattag

SEQ ID NO: 13850 - DNA, 327 bp, synthetic construct
  misc_feature 1..327: note = Description of Artificial Sequence: Synthetic coding sequence
  source 1..327: mol_type = other DNA
atgcccaagagggggaagaaaggtgcagttgcagaagatggggatgagctgcggaccgaacccgaggccaagaagtcgaaaaccgcggcaaagaagaatgataaggaggccgcgggtgaaggtcccgcactgtacgaggatccaccagatcagaaaacaagcccatccggcaagcccgctacactcaagatctgcagctggaatgtggacggcctgagggcttggattaaaaaaaaaggtcttgactgggtcaaagaagaggcacccgatatactatgtctgcaggagaccaagtgttctgagaacaagttgcctgcggagttgtag

SEQ ID NO: 13851 - DNA, 441 bp, synthetic construct
  misc_feature 1..441: note = Description of Artificial Sequence: Synthetic coding sequence
  source 1..441: mol_type = other DNA
atgcccaagagagggaagaagggcgcagtcgccgaagacggggatgagcttagaactgagcccgaggccaaaaaatcaaaaactgcagcaaaaaagaatgacaaggaagctgctggcgaagggcctgctctctatgaggaccctcccgatcagaaaacaagtcctagcggaaaaccggcaactttaaagatttgcagctggaatgttgacggacttcgtgcatggataaaaaaaaagggcctggactgggtcaaagaggaggcacccgacattctgtgccttcaagagacaaaatgctctgagaataagctcccagcagagctgcaggaactccctggcttgtcccatcagtactggagcgctccatctgataaggaagggtacagcggagtgggcctgctcagtcgccagtgtcccctgaaggtctcttacggcatttag

SEQ ID NO: 13852 - DNA, 975 bp, synthetic construct
  misc_feature 1..975: note = Description of Artificial Sequence: Synthetic coding sequence
  source 1..975: mol_type = other DNA
atgtttcgctgtgggggacttgccgccggggccttgaaacagaagttggtgccactggtaaggaccgtgtgtgtgagatccccgcggcagcgcaatagactgcccggtaacctgtttcagaggtggcacgtgcccctggagttacagatgacccggcagatggccagttctggagcttccggaggaaaaatagataattccgtgctggtcctaatcgtcgggctgtcaaccgtgggcgcaggggcttacgcctacaagacgatgaaggaggatgaaaagaggtataatgaacgaatctctggcttaggacttactcctgaacagaaacaaaagaaagctgccctaagtgcctccgagggagaggaagtgcctcaggataaggcaccttcacacgtcccgtttctcctcataggcggaggaaccgctgcgttcgcggccgcccgctccatccgggcaagagatccgggcgctagggttcttatcgtgagcgaagacccggagttgccctacatgcggccaccactttccaaagagctttggttctcggacgaccccaacgtgactaaaactctgcgcttcaagcagtggaatggaaaagaaaggtctatctatttccagcccccttccttttatgtgtctgcccaggatctgccccacatcgagaacggtggcgtagccgtgttgacgggaaaaaaagtcgtccaactggatgttagggacaacatggtgaaactcaacgacgggtcccagattacctatgagaaatgtctaattgccacaggtggcaccccacgttctctctccgccattgaccgggccggggccgaagtgaagtcccgcacaacgttattccggaaaataggggacttccggtccctggaaaaaatttcccgcgaagttaagagtattaccatcattggcggaggattcctcgggagcgaactcgcttgtgcactcggaaggaaagatatctag

SEQ ID NO: 13853 - DNA, 1842 bp, synthetic construct
  misc_feature 1..1842: note = Description of Artificial Sequence: Synthetic coding sequence
  source 1..1842: mol_type = other DNA
atgttcagatgtggtggcctagccgcaggcgccttaaagcaaaaacttgtgcctctcgtgcgcacagtgtgcgttcgctcaccccgtcagaggaacaggctccctggtaacctgttccagagatggcacgtgccacttgagttgcaaatgaccaggcagatggcgtcttcgggtgcctctggcgggaagatcgacaacagtgtgttggtgctgattgtggggctgagtacagtgggcgccggtgcctacgcctacaaaaccatgaaggaggatgaaaagagatacaacgaaagaatttcaggcctggggttaacacctgagcagaagcagaaaaaagcagccttgtccgcctccgagggggaagaggttcctcaagataaagcccctagccacgtgccatttctgttgattggaggaggtacagctgcctttgcggcagcacgctctattcgcgcgagggatcctggtgccagggtactgatcgtgtctgaggatccagaacttccatacatgcgaccgcctctcagcaaggagctctggttcagcgacgaccctaatgtcacgaaaacccttcggttcaaacaatggaatggaaaagagcgctcaatctattttcaacctccctccttctatgtgtccgctcaggatctgccacacatcgagaacggaggcgtggccgttctgacgggaaaaaaagtggtccagctggacgtccgagacaacatggtcaaactgaatgacggatctcagataacatatgagaaatgcttgatagctaccggcgggacacctcgttccctgtctgcaatcgatagagccggtgcggaggtgaaaagccgcaccactctgttccgcaagattggtgacttccgtagccttgaaaagatctcacgagaggttaagagcatcaccatcattggcggaggctttctcggctcggaacttgcttgcgctttgggccgcaaggcaagagctctggggacagaggtgatacagctctttccagagaaaggcaatatgggaaaaatacttccagagtacctgagcaactggaccatggaaaaggtaagaagagaaggggtgaaggtcatgcctaacgcgattgtgcagtctgtcggcgtgagctccggaaagcttctgatcaagctaaaagacggacgcaaggttgagaccgaccacattgttgccgcagtgggacttgagcctaatgtggagctggccaagaccgggggactggaaattgatagtgatttcggcggcttccgggtcaacgccgagcttcaggctcgaagtaatatctgggtcgccggggacgccgcatgcttctacgacattaagctgggaagaagacgcgtcgaacatcacgatcatgctgtcgtgtccggtagactggccggggagaacatgactggcgctgcaaagccctactggcaccaaagcatgttttggtcagatctggggcctgacgtaggttatgaagctatcgggcttgttgattcttctctacctaccgtaggagtcttcgccaaggctacagcacaggataaccccaaaagcgcgaccgagcaatctggaacgggaatacgcagcgagagcgaaacagaatcagaggcaagcgagattaccatccctcctagtacaccagctgtgccgcaagcccccgtgcaaggagaagattacggcaagggagtgatattctacctgcgcgacaaagtggtcgttggtatcgtgctatggaatatcttcaataggatgcccatcgcgcgtaagataattaaggatggggagcagcacgaggatctcaacgaagtggccaagttgttcaatatccacgaggattag

SEQ ID NO: 13854 - DNA, 1830 bp, synthetic construct
  misc_feature 1..1830: note = Description of Artificial Sequence: Synthetic coding sequence
  source 1..1830: mol_type = other DNA
atgttcagatgcggcggcctggccgctggcgcgctaaagcagaagttagtaccattagtaaggactgtttgtgtcagatctccaaggcagcgtaacagattaccagtggtccagtctcatcacctgggatcacccagccggtcactggcatctactggagcgtccggcaaagacggctctaatctggtctactttctgatcgttggggccaccgttaccggcgccggggtgtactacgcatataagacaatgaaggaggacgagaaaaggtacaatgaaagaatatctggtttggggctgactcccgagcagaagcagaagaaagccgctttgagtgcctccgagggcgaagaggtcccccaggataaggccccctctcacgtgccgttcctgcttataggcgggggcacagcggcctttgccgccgctcgatctattagagctcgcgatccaggtgcccgggtcctgatcgttagcgaggacccggaattaccttacatgcgtcccccattgagcaaggaactgtggttcagcgatgaccctaacgtgactaagaccttgcgatttaagcagtggaacggcaaagagaggtctatatactttcagccaccctctttctacgtgagtgcccaggacctgccgcacatcgaaaacggaggagtcgcagtccttacaggcaaaaaggtggtgcaactggacgtccgcgataacatggttaaacttaacgatggcagtcagatcacatacgagaagtgccttatagctacgggggggacccctagaagcctctctgccatcgacagggccggagccgaagtgaagtctcgcacgaccctgttcagaaagatcggagattttcgctctctcgagaaaatatcccgtgaggttaaatcaataacaataatcggggggggatttttgggatctgagttggcctgtgccctgggccggaaagctcgggctctgggtacagaggtgatccaactgttccctgaaaagggcaacatgggaaagatcctgccagagtacctgagtaattggaccatggaaaaagtgcgaagagaaggcgtaaaggtcatgcccaacgcgatcgttcagagcgtaggagtttcctccgggaaactccttatcaagttaaaggacgggcggaaggtagagaccgaccacatcgtggctgccgtcgggctcgaacccaacgtggaactggccaagaccggaggtctggagatcgactctgactttggaggctttcgagttaacgctgagctccaggctaggagtaacatttgggtagccggtgatgcggcctgtttttacgacatcaaactggggcgtcggcgtgtcgagcatcacgaccacgccgtggtgtctggacgtctggcaggcgaaaatatgaccggagctgccaagccatattggcatcagagtatgttttggtctgacttgggaccagacgtcggttacgaggctattggcttggtggatagtagcctgcccactgtcggagtatttgctaaggccacagcccaggacaaccctaagtccgccacagaacagagcggcacaggtataaggtccgagagtgaaacggagagtgaagctagtgagataacgatccctccgagcacgccggccgttccccaagcccctgtgcagggggaggattatggaaagggcgtgatcttctacctgagggacaaggttgtggtgggtattgtgctgtggaacatcttcaaccgcatgccaatagcccgtaaaattatcaaggacggcgagcaacacgaagacttaaatgaggttgcaaagcttttcaatatccacgaggactag

SEQ ID NO: 13855 - DNA, 981 bp, synthetic construct
  misc_feature 1..981: note = Description of Artificial Sequence: Synthetic coding sequence
  source 1..981: mol_type = other DNA
atgttcagatgtggtggccttgctgccggcgcactaaaacagaagcttgttcccctggtccggactgtatgcgtgagaagcccacgacagaggaacagacttcctgctagggccttagggaccgaagtgattcagctcttccccgagaaggggaacatggggaagatactcccagagtatctgtctaactggacaatggaaaaggtccggcgtgagggggtcaaggtcatgccaaacgcaatcgtgcagtccgtgggagtgtcttcaggaaaacttcttatcaagctgaaggacgggagaaaagtggagactgatcatatagtcgcagccgtaggacttgagcctaacgtggaattggcgaagactggcggactcgaaatcgacagtgattttgggggatttcgggtgaatgccgagttgcaggcccgcagtaatatatgggtggccggggacgccgcatgcttctacgatatcaagctcggcagaaggcgtgtggaacaccacgaccacgccgtggtctcaggaaggctggccggcgaaaacatgactggcgctgcaaagccctattggcatcaatcaatgttttggtcagatcttgggccagatgtcggatatgaggctattggcctggtggattcttctctgcctaccgtgggtgtgttcgccaaagctaccgcccaggacaatcctaagtctgctactgaacaatcaggcaccggcatccggtctgaaagcgaaacagagagcgaggcgtcggaaatcaccatcccacccagcactcctgcagtcccacaggctcccgtgcagggagaagactatggcaaaggagtcattttctacttacgggacaaggtggtcgtgggaatcgttctgtggaatatcttcaaccgaatgccgatcgctcgcaaaatcatcaaggatggggaacagcatgaggacctgaacgaagtcgcgaagcttttcaacatccacgaagattag

SEQ ID NO: 13856 - DNA, 786 bp, synthetic construct
  misc_feature 1..786: note = Description of Artificial Sequence: Synthetic coding sequence
  source 1..786: mol_type = other DNA
atggaaaaagtgagaagggaaggcgtgaaggtgatgcctaatgcaatagttcagagcgttggagtctcttccggaaagcttcttataaaactgaaagatgggcggaaggtggagactgaccacatagttgcagccgtcggactggaaccgaacgtggagctcgccaaaacgggaggattagagatcgactcagactttggcgggtttcgcgtgaacgctgagttgcaagcacggtctaatatctgggtggcaggggacgccgcctgcttctacgacatcaagttaggccgtcggcgagtggagcaccacgaccatgcagtggtgagcggacgcctggctggcgagaacatgaccggggcagctaaaccatactggcaccagagtatgttctggagtgatttgggacccgatgttggctacgaggcgattgggctggttgacagcagtctacctaccgtgggcgtgttcgccaaggctaccgctcaggataatcctaagagtgcgactgagcaatccggaaccggcatccgatctgagagcgagaccgagagtgaggccagtgaaataacaattccaccatctactcccgctgtgccacaagccccggtccaaggagaagactacggcaaaggggttatcttctacctcagagacaaggtggtcgtcgggatcgttctgtggaacatcttcaaccgaatgcctattgctaggaagattatcaaggacggcgaacagcatgaagacctcaatgaggttgctaaactcttcaatatccatgaggattag

SEQ ID NO: 13857 - DNA, 825 bp, synthetic construct
  misc_feature 1..825: note = Description of Artificial Sequence: Synthetic coding sequence
  source 1..825: mol_type = other DNA
atgggcaagatccttccagaatacttgtccaattggacaatggaaaaagtgcgacgcgagggggtcaaggtcatgcccaacgctatcgtgcaatcggtcggcgtttccagtgggaagttattgattaagttaaaggatgggcggaaagtagaaacagaccacattgtcgctgcagtggggctagagccaaatgtggagttggccaaaacaggggggctagaaatcgactccgattttggcggattcagagtcaatgccgaacttcaggcgcgatctaatatctgggtggctggggatgcagcctgcttttatgatattaaactgggaaggcgcagggtcgagcatcacgatcacgcagttgtgtcaggacgactggcgggcgaaaacatgacaggcgctgcaaaaccatattggcaccagagtatgttttggagcgacttaggacctgacgtcggatatgaagcaatcggcctcgtcgatagttccctgcctacggtgggcgtttttgccaaggcaaccgcccaagataacccaaagtctgccaccgagcaatcaggtaccggaatccgctcagagtcagaaacggagtctgaggcttccgagattaccattcccccatcaaccccagctgtcccgcaagcaccagtgcagggcgaggattatggaaagggagttatcttttaccttcgggataaggtggtggtcggcatcgtgctttggaacatctttaacaggatgcccattgctcgaaagatcataaaagatggggaacagcacgaggatttaaacgaggtggcaaagctgtttaacattcatgaagactag

SEQ ID NO: 13858 - DNA, 714 bp, synthetic construct
  misc_feature 1..714: note = Description of Artificial Sequence: Synthetic coding sequence
  source 1..714: mol_type = other DNA
atgaaggaggatgaaaagcgatataatgaacgcattagcggcctcggactaacccccgaacaaaagcaaaagaaggctgcactgtccgcttcagagggagaggaagtgccccaggataaggctcctagccatgtgccgtttctcctcattggtgggggtactgcggctttcgccgcagcccgcagcataagggcccgggaccccggggctcgcgtcctgattgtgtcggaggaccccgagctgccatacatgagaccgcctttgtccaaagaactctggttctccgacgacccaaatgtcacaaagaccctcaggtttaaacagtggaatggaaaagaaaggtccatttactttcaacctccaagtttctatgtgtctgcacaggacctcccccatattgagaacgggggggtggcagtcctcacagggaagaaagtggtccagctggacgtacgggataatatggtcaagctgaatgatggcagccaaatcacttatgaaaaatgcctcatagccacaggagggactccacgctctctttccgcaatcgatcgtgcaggcgctgaggtgaaatcaagaaccacgttatttcgtaaaatcggggattttcgaagtttggagaaaattagcagagaggtgaagtccatcactatcattggcggagggtttctggggtccgaactcgcgtgtgctcttgggcgcaaggatatctag

SEQ ID NO: 13859 - DNA, 1017 bp, synthetic construct
  misc_feature 1..1017: note = Description of Artificial Sequence: Synthetic coding sequence
  source 1..1017: mol_type = other DNA
atggatgccaaggctcgaaactgtttgttgcagcacagggaggcgctagaaaaagacataaagacatcctatataatggatcatatgatctctgacggttttctgaccatctctgaagaggaaaaagtaagaaatgagcctacccagcagcaacgggccgcaatgctgatcaaaatgatccttaaaaaagacaatgacagctatgtctccttctataacgcacttctgcatgaggggtataaggacttggccgcccttttacatgacggtataccagtggtctcctcatcatccggcaaggacagcgtgtccgggataaccagctatgtgcggacagtgctttgtgaagggggagtgccccagcggcctgtagtgttcgtgacaagaaagaaattagttaacgcaatccaacagaagctgagtaaactgaaaggggagcctggttgggtcactatccacggcatggctggttgtgggaagagtgtgctagccgccgaggccgtgcgggaccactcactcctggaaggctgttttcctggaggggtgcattgggtgtccgtggggaagcaagataagagcggactgctcatgaagctccagaatctctgcacacgattagaccaggatgaatcatttagtcaacgtctgcctttgaacattgaagaggcaaaagatcggctgcggatcctcatgctccggaagcatcctcggtccctgctgatcctggacgatgtgtgggatagttgggtcctgaaggcctttgacagtcaatgccagatactgctgacaacacgagacaaaagcgtaacagattccgtaatgggcccgaagtatgtcgtcccagttgaaagttcgctgggaaaggaaaaagggctggaaatcctgagcctcttcgtcaatatgaaaaaagcagatttacccgagcaggcacactccatcatcaaggaatgcaaagtcgtggaaaggtgtcattgggggatcttaaccgacttacttcacaaatggaatcaaagttag

SEQ ID NO: 13860 - DNA, 3492 bp, synthetic construct
  misc_feature 1..3492: note = Description of Artificial Sequence: Synthetic coding sequence
  source 1..3492: mol_type = other DNA
atggatgccaaggcccggaactgcttgctgcagcaccgcgaagccctggagaaggatattaaaacctcatacataatggatcatatgatttccgatggttttttgacgatcagtgaggaagaaaaggtgcgcaacgagccgacccagcaacagcgcgccgccatgctgatcaagatgatcttgaagaaagacaatgattcatacgtgtccttctataacgctttgctacacgagggatacaaggacctggcagcactgctgcatgatggaatccctgtggtctcctcttcctccggaaaagacagcgtgagtggcatcacttcatatgtgagaactgttctctgcgaaggaggcgtcccgcagagacccgtggtgttcgtgaccaggaagaaattagtcaacgccattcagcaaaagctttcgaaactcaaaggcgaaccagggtgggtcaccatccatgggatggctggatgcggaaaaagcgtcctcgccgccgaagcagtacgagaccactccctgcttgagggctgtttccctggaggagtgcattgggtatcggtagggaagcaggataagtctggcttgctgatgaagttacagaatctgtgtactagactggaccaagacgagagcttctctcagcgactgcctctgaatatcgaggaagccaaagatcggcttcgcatcttaatgctacgcaagcatccaagaagccttctgatactcgatgacgtctgggattcatgggtgttgaaggcatttgactcccagtgccagattctcctcaccacgagagacaagagcgtgactgatagtgtgatggggcctaagtacgtcgtgccggtcgaaagttcccttggcaaagagaagggcctcgaaattcttagtctgttcgtcaacatgaaaaaagcagacctgcccgagcaggcccactcaatcatcaaagaatgcaaggggagcccccttgtggtgagcctgatcggtgccctgttgagggacttccccaacaggtgggaatactacctgaagcagttgcagaataaacagttcaagcgcatcaggaaaagctcatcgtacgactacgaggctctggacgaagcgatgtcaatcagcgttgaaatgcttcgggaggacatcaaggattactacactgatttgtctatactgcagaaagacgtaaaggtgcctacgaaggtgctttgtatactgtgggacatggaaaccgaggaagtcgaggatattctccaagaatttgtgaataagagccttttattttgtgatagaaacggcaaatcctttagatactacctacacgatctgcaagtggatttcctcacggaaaaaaactgcagccagcttcaagacctgcataaaaaaataatcacccagttccagagataccaccagccacacacgctgtcacccgaccaagaagactgcatgtactggtataattttttggcctatcatatggcatcagcaaagatgcacaaagaattgtgtgcactaatgtttagtttggactggattaaagcgaaaactgagctggtcggtccagcacatctgatacacgagttcgttgaatatcgtcatatcttggacgaaaaggactgcgctgttagcgagaattttcaggaatttctatccctaaatggtcatctgttgggccgtcagccctttccaaacattgtgcaacttggcttgtgtgagcctgaaaccagtgaggtctaccaacaggcaaaactgcaggcaaagcaagaggttgacaatgggatgctgtatctggaatggatcaacaagaaaaacatcacaaatctcagtaggctggtcgttcggccccacacggatgcagtctatcatgcatgcttctctgaagacggccagcggatagcaagttgtggcgctgacaaaacactgcaggtatttaaggcagaaacgggagaaaagctactagagattaaagctcacgaagatgaagtcctctgctgcgccttttcaacggacgatagatttatcgccacttgctcagtggataaaaaggtcaaaatctggaatagcatgaccggcgagctggtacacacatatgatgaacattcggagcaagttaactgttgccactttacgaattcctctcaccacctgttactggctactggtagctctgattgcttcctaaaactgtgggatctgaaccagaaggagtgccgtaacaccatgttcggtcataccaatagcgtaaatcattgtcgctttagcccggacgacaagcttctggcttcctgttccgcggatggtaccctaaagttgtgggacgccacttctgctaacgaacggaagtccattaacgtgaagcagtttttcctgaatttggaagacccccaggaagacatggaggttatcgtgaagtgctgctcttggtctgcagacggcgccagaataatggtggccgctaaaaataagatctttctttggaacacggactctaggtccaaagtcgcggattgccgggggcatcttagctgggtgcacggcgtcatgttctcacccgacggttcgagcttcttgaccagtagtgacgaccaaacaattcgcctttgggaaacaaaaaaggtgtgtaagaatagtgcagtcatgctgaagcaggaagtagatgtggtgtttcaggagaacgaagtcatggtgttggccgtagaccatatccggcgtttgcagctgataaatggccggacggggcagatcgattatttgactgaggctcaggtatcttgctgttgtctgtctccacaccttcaatatatcgcttttggcgacgagaatggcgctatcgagatcctcgagctggtaaataatagaatcttccagagtaggttccagcacaagaaaacagtttggcatattcagtttaccgctgacgaaaagactctcatttcctcttctgacgatgctgagatccaagtgtggaattggcaactggataaatgcatcttcctccgcggacatcaggagactgttaaagattttcggttacttaagaacagcagacttttgagttggtcatttgacgggactgtcaaggtttggaacatcattaccgggaacaaggagaaagacttcgtgtgtcaccagggcactgtactttcatgtgatatttcccacgatgccactaaattctcatcaacgagcgctgacaagaccgccaagatttggaatgtgtctaacggggagctcctgcacctttgcgctcctctttcagaagaaggggcggcaactcatggaggatgggtgaccgatctgtgcttctctcctgatggcaaaatgctaattagcgctggcggatacatcaagtggtggaatgtagtaactggtgaaagtagccaaactttctataccaatgggaccaacctaaagaaaatacacgtgtctcccgatttcaaaacatatgtaactgtggacaatctcgggatactttacattctgcagacgctcgagtag

SEQ ID NO: 13861 - DNA, 3618 bp, synthetic construct
  misc_feature 1..3618: note = Description of Artificial Sequence: Synthetic coding sequence
  source 1..3618: mol_type = other DNA
atggacgccaaagcaagaaattgcttgttacagcatagagaggcgctggaaaaagatattaaaaccagttacattatggatcatatgattagtgacggctttctgacaattagcgaggaagaaaaggtccgcaatgagccaacacaacagcagcgggcagcaatgctcattaagatgatccttaagaaagataacgacagctatgtgtccttttacaatgccctgctgcacgaaggttataaagacctagcagctcttctacatgacggaatccccgtggtgtcatcaagttcgggaaaggatagtgtcagcggcatcacctcttacgttcggacagttctttgcgaagggggtgtccctcaaagacccgtggtcttcgtgacccggaagaaactggtaaatgcaatccagcaaaagttaagcaaactgaaaggtgagcccgggtgggtaacgatccatggcatggcaggatgtggaaagagtgtgctcgcagcagaggccgtgagggatcacagtctgcttgagggatgcttcccaggaggcgtgcattgggtgtcagtaggtaagcaggataaatctggcctgctgatgaaacttcaaaacctctgtacaagactggatcaggacgagtctttcagccagcggctaccactcaatattgaagaggctaaggatagactgcgcattctcatgctccgtaaacatccacggagtctccttatactggacgatgtgtgggactcatgggttctgaaggcctttgactcacagtgtcagatactcctgacgacgcgggacaaatctgttactgactcagtaatgggcccgaaatacgtggtacccgtggagagctcactagggaaagagaaaggtctggagatcctctcactatttgtgaatatgaaaaaggctgatctgcccgagcaggctcattctatcattaaagaatgtaaaggaagcccactggtggtctcacttataggcgctctcctccgagactttcccaaccggtgggaatactacctgaagcaactgcagaataagcagtttaagagaatcaggaagagttcttcgtacgattacgaagctctggacgaagcaatgtcgatctctgtcgagatgctccgtgaagacatcaaagactattatacagatcttagcattctccaaaaggacgtcaaagtccccacaaaggttctctgtattctgtgggatatggaaaccgaggaagtcgaggatattcttcaggaatttgtcaataagagtctgttgttctgtgatcggaacggtaagagctttcgatattatctacacgatttacaggtcgatttcctgaccgagaaaaactgctcacaattgcaggatttgcacaagaaaatcattacacagtttcagagatatcaccagccgcacacactgtcacctgaccaggaggattgcatgtactggtataacttcctcgcataccacatggccagcgcgaaaatgcacaaggaactgtgcgccctgatgttttcactagattggattaaggccaaaacagaactggtgggcccagcgcatctgatccatgaatttgtcgaataccggcatattcttgatgaaaaggattgtgctgtctctgaaaattttcaggagttcctgtccttgaacggccacttactcggcaggcagccttttccaaacatcgttcaactgggcttatgtgagcctgagacttccgaggtgtaccagcaggccaagttacaggccaagcaggaggttgacaatggaatgctgtacctggagtggattaataaaaaaaacattactaatctgagccggctcgtggtccgtccacatacggacgccgtttaccacgcctgttttagcgaggatgggcagagaatcgctagctgcggcgcggataagactctgcaagtctttaaggccgagaccggcgagaaactgcttgagatcaaagcccatgaggacgaggtgctttgttgtgctttcagcactgacgatagattcattgctacatgtagtgttgataaaaaggttaagatctggaattccatgaccggggagctggtgcacacgtacgacgagcatagcgagcaggtcaactgctgccactttactaattcaagtcatcacctgcttctcgctacaggcagctccgattgttttcttaagctgtgggatctgaatcagaaggaatgcagaaatacaatgttcggtcacacaaactcagtgaatcactgtcgattcagtccagacgataaactgctggcctcttgctccgccgacgggactctcaagttatgggatgccacttctgccaacgagagaaagtccataaacgtcaagcaatttttcctcaatctagaagatccacaggaggacatggaggtgatagtaaaatgctgctcatggtctgcagacggagctcgtatcatggtggcagcaaaaaacaagatatttttgtggaacaccgacagccggtccaaagtggccgattgtcgggggcatttatcatgggttcacggcgtgatgttttctcccgacgggtctagctttttgacaagctccgacgaccagaccattcgtctgtgggagacaaagaaagtttgcaaaaactctgctgtgatgctcaaacaggaagtagacgtcgtgtttcaagagaacgaagtcatggtactggccgtggatcacattcgccggctccaactcatcaacgggcgaacaggccaaatcgattacctgaccgaggctcaggtctcctgttgttgcctttcaccacacctccagtacatagcgtttggcgacgagaatggagccatagagatcctcgaattggtcaataacagaatctttcagtcacgctttcaacataagaagacagtgtggcacattcagttcactgctgacgaaaaaacactgatttccagttccgatgatgccgaaattcaggtctggaactggcagctagacaaatgtatttttctgcgggggcaccaggagacggttaaagacttccgcttattaaaaaattcgagactactaagctggtcattcgatgggaccgtaaaggtgtggaacattatcactggaaacaaggagaaagatttcgtctgccaccagggcactgtcttgtcttgtgacatcagccatgatgctaccaagttctccagcacatcggccgacaaaacagctaagatctggtcatttgacttactcctgcccttgcatgagctgcgaggccataatggatgcgtaaggtgcagcgccttttccgttgatagtactctgctggcaactggtgatgataacggagagattaggatttggaatgtcagtaacggcgaactgctgcacctatgtgctcctctgtctgaggaaggtgcagccacgcacggcggatgggtgacggacctgtgctttagtcctgacggtaaaatgctgatatcagcaggaggatatattaagtggtggaatgtcgtaaccggcgaaagctcacagactttctatacgaacgggaccaaccttaagaagatccacgtatccccagacttcaagacctatgtgacagtggacaatctggggatactgtacattctgcagactctggagtag

SEQ ID NO: 13862 - DNA, 3585 bp, synthetic construct
  misc_feature 1..3585: note = Description of Artificial Sequence: Synthetic coding sequence
  source 1..3585: mol_type = other DNA
atggacgcaaaggcaagaaactgcctgctccagcaccgtgaggctctcgagaaagacattaagacttcatacatcatggaccacatgatctccgatggctttctgactatatccgaagaggaaaaggttcggaatgagcctacgcagcaacagcgagcggctatgttaattaagatgatcttgaagaaagataatgactcctacgtatctttctataacgcattgctgcacgagggatacaaagacttagccgcactcttgcatgacggaattccggttgtgtcttctagcagcgtacggaccgttttgtgcgaaggcggcgtcccgcagcgtcccgtggtgttcgtgaccagaaagaagttagttaacgctatccagcagaaattgagtaaactaaagggtgagcctggctgggtaactattcacggtatggctggatgcgggaagtcagttctggccgctgaggccgtgcgcgatcattcattgctggaaggatgtttcccaggaggcgtccattgggtgtcagtggggaagcaggataaatccggactactgatgaaactacaaaatctgtgcactagattagaccaggacgagtcattttctcagaggctgcctttaaacattgaagaggccaaggatagactccgaatcctgatgcttagaaagcacccccgctccctcttgatcttggacgatgtttgggattcctgggtgctgaaggctttcgattcacaatgccagatactcctaacgacccgcgacaaaagcgtcaccgatagtgtcatgggccccaagtacgtcgtccccgtcgaaagttctttggggaaagaaaaagggctggagatcttgtctctgttcgtaaacatgaagaaagctgatttgcccgaacaggcacacagcattattaaggagtgcaaagggtcacccctggtcgtctcccttatcggcgcccttctgagggatttcccaaaccgctgggagtactatctaaagcagctgcagaataagcagtttaagagaattcgcaaatcgtcctcctatgactacgaggcattggacgaggcaatgtccatctctgtggagatgctgcgcgaggacattaaggactattataccgatctttcaatcttgcaaaaggatgtgaaagtgccaactaaggttttgtgcatcctgtgggacatggagacggaagaagtagaagatatactgcaggagtttgtcaacaagagtttattgttttgcgatcggaatggcaagagctttaggtattatctgcacgacctgcaagttgatttcctaactgaaaaaaattgtagtcagcttcaggatttgcataagaagatcattacgcagttccagagataccatcagccacatacactcagcccagaccaggaggactgcatgtattggtataacttcctcgcttatcatatggcttctgcgaagatgcataaagagctttgtgctctgatgttctctctcgactggatcaaggccaaaaccgagttggttgggccggcacacttaatccatgaattcgtcgaataccgtcacatcctggacgagaaggactgtgctgtgtctgagaattttcaagaattcctctcactgaacgggcatctgctggggagacaaccatttccaaatatcgttcagctgggcctgtgcgagccggaaacttcagaagtctatcaacaggcgaagttacaagcaaaacaagaagtagataacgggatgctgtatctcgaatggataaacaagaagaatattacaaatctaagcaggctggtggtgaggccgcacacagacgcagtgtatcacgcatgtttctctgaggacgggcagagaatcgccagctgtggagctgacaaaaccctacaagtctttaaagctgagacaggagagaagctactggaaataaaagcccatgaagatgaagtgctgtgttgtgccttttcaaccgacgaccgctttatcgcgacgtgttccgtggacaagaaagtaaaaatatggaactccatgaccggagaattagtccatacctacgatgagcactccgaacaggtgaattgttgccacttcacaaactcctcacaccacttactgctggctaccggttcttccgactgtttcctgaaactgtgggacctgaaccagaaagaatgcagaaacactatgttcggccataccaatagtgtcaaccactgtcgatttagtcctgacgataagctcctcgccagttgtagcgccgatggcacattgaagctgtgggacgcgactagcgccaacgaacggaagagcataaatgttaagcagttctttctaaacctggaagatccccaagaggacatggaagtgatcgttaaatgttgcagctggtctgctgacggcgcccggattatggtggcagccaaaaataagatctttctatggaatacagatagtagatcaaaggttgcggattgcaggggacacctcagttgggtgcatggagtgatgttttcaccggacggttcatctttcctcacaagttctgacgaccagaccataaggctgtgggagacaaagaaagtatgcaaaaactctgcggttatgttaaagcaagaagttgatgtcgtctttcaggaaaatgaagtgatggtgctcgccgtcgaccacatacgaagactgcagctgatcaatggtaggaccggacagatcgactacctcacagaggcccaggtgtcatgttgctgtctgagcccacaccttcagtatatcgcctttggtgatgagaatggcgccatagagatcctcgagctggttaacaacaggatcttccaaagcagatttcaacataagaaaaccgtgtggcatatccaattcacagctgatgaaaagactctcatctccagctcagacgacgccgagatccaggtgtggaactggcaacttgacaaatgtattttcctacgcggtcaccaagagactgtgaaagactttcggctcctgaagaattcacggctcctatcctggtccttcgatggcaccgtgaaggtgtggaatatcattaccggtaacaaagagaaggactttgtgtgccatcagggcacagtgttatcctgcgacatttcccacgatgccaccaaattctctagtactagcgctgacaagaccgccaagatctggagcttcgatcttctccttcccctgcacgagctgagaggccataacggttgcgtccggtgcagcgctttttcagtggactccactttgctggccaccggagatgacaacggtgaaattaggatctggaacgtgagtaacggcgaacttcttcatctttgtgccccactgtcggaagaaggagcagctactcatgggggatgggtgaccgatctgtgttttagtccagacggcaagatgctcatatccgccggcggttacatcaagtggtggaatgtggttactggcgagagttctcagacattttacacaaatggcaccaatcttaaaaaaattcacgtctccccagacttcaaaacatatgtgaccgtcgacaatttgggcatcctgtatattttgcaaacccttgagtag

SEQ ID NO: 13863 - DNA, 3618 bp, synthetic construct
  misc_feature 1..3618: note = Description of Artificial Sequence: Synthetic coding sequence
  source 1..3618: mol_type = other DNA
atggatgcaaaggccagaaattgccttcttcaacacagggaagctttagagaaggacattaaaactagctacattatggaccatatgatctctgatggattcctcacaatatcagaagaggagaaggtaagaaacgagccaactcagcagcagcgggctgctatgctcatcaagatgattctgaagaaagacaacgactcctacgtgtcgttttacaatgccctgctgcatgagggctacaaagacctggccgcccttctgcatgacggcatcccagttgtatctagcagctctgggaaagatagcgtttcagggattacatcctacgtgcggaccgtcctatgtgaaggcggggtacctcagagacccgtggtctttgtcacccgcaaaaaactggtgaatgccatacagcaaaaacttagtaagcttaaaggcgagccgggatgggtgacaatccacgggatggcaggttgtgggaagtctgtgctggccgccgaagccgtccgtgaccattcattgctggaaggatgttttcctgggggtgtacactgggtctctgttgggaagcaggacaagagtggcttactgatgaagcttcagaacctgtgcacccgactcgaccaggacgaaagcttcagccagaggctgccccttaatatcgaagaggccaaggacagattgcggattctcatgcttagaaaacacccaagatccctccttatcctggacgacgtgtgggatagttgggtgctgaaggcatttgactctcaatgccaaatcctactaaccacaagggacaaatcagttacagatagtgtcatggggccgaaatatgtggtgcctgttgaatccagcttaggaaaagagaaaggtcttgaaatcctgtctttgttcgtgaatatgaagaaagccgacctgcctgaacaggcacacagcattattaaggaatgcaaagggagcccgctggtagtaagtctcatcggcgcactcttgcgagacttccctaataggtgggaatactacctgaagcaattgcagaataaacagttcaagaggataagaaagtctagctcctacgattacgaggcactggacgaagcaatgtcaataagcgtggagatgcttcgcgaggatataaaagattactacacggacctgtctattttgcagaaggacgtcaaagtgccaacaaaggttctgtgcattctttgggacatggagacagaggaggtggaagatatactccaagagttcgtaaataagtccctccttttttgtgacagaaacgggaagtctttcagatattacctccacgacctgcaggtggacttcttaacggaaaagaattgttcgcagttgcaggatctgcataagaaaatcattactcagtttcaaagataccatcaacctcataccttaagccccgatcaggaagattgcatgtattggtacaacttccttgcctatcacatggcttctgctaagatgcacaaagaactatgtgctctaatgttttccctcgactggattaaggctaagacagaactggtggggcctgcgcacttaatccacgagtttgtcgagtatagacacatacttgatgagaaagattgcgctgtgagcgagaattttcaggaattcctctctttgaacgggcacctgctgggccgacaaccttttccgaacatcgttcagttaggactttgcgagccagagacttctgaggtttaccagcaggccaaactacaggctaaacaggaggttgacaatggcatgctttatctggaatggattaacaagaagaacatcaccaacctgtcacgccttgtggtcaggccacacacggatgcagtctaccacgcctgtttctccgaagacggccaaagaatcgcaagctgtggggccgataagactttgcaggtttttaaggctgaaacaggtgaaaagttgctagagattaaagcacacgaggatgaggtgttatgctgcgcgttctctaccgatgatcgatttattgcaacgtgctctgtcgacaagaaggtgaaaatttggaactcaatgaccggggagttagtccacacctatgatgagcactccgaacaggttaactgctgccacttcaccaatagctcccaccatttactcttggctactggatcttctgactgtttcctgaaactctgggatctgaatcagaaagagtgccgcaacactatgttcgggcacacaaactctgttaaccactgtcgattctctccagacgataaacttctggcttcctgctctgccgacgggactctgaagttatgggatgccacctcagcaaatgagcgtaagtcaataaatgtgaagcagttttttctcaacctggaagatcctcaggaagacatggaggtgatagttaaatgttgttcgtggtctgctgatggggccagaatcatggtagccgccaaaaacaagatattcctgtggaatacagattctaggagcaaggtggcagactgtagagggcatctctcttgggtgcacggggtgatgtttagccccgatggatccagcttcctgacgagcagtgatgaccaaacaatacgcctctgggagaccaagaaagtgtgtaagaactctgctgtaatgctcaagcaggaagtcgatgtcgtctttcaggaaaatgaggttatggtgttagccgtcgaccacattcgccgcttacagctcataaatggacggacaggccagatcgactacctgactgaggcccaagtttcgtgttgttgtttgagcccacacctacagtacattgccttcggagacgaaaacggcgctatagaaattctcgagctggtaaataaccgaatcttccagtccaggtttcagcacaaaaagactgtctggcatattcagtttaccgctgacgagaaaaccctcatatcatcctcagatgatgcagagattcaagtttggaactggcagctggacaagtgtatcttcctgcgcgggcaccaggagactgtgaaggattttaggctcctcaagaactccaggctgctctcttggtcatttgatgggacggtcaaggtgtggaacatcattacgggcaacaaggagaaggacttcgtgtgccatcagggcactgtgctttcatgcgatatcagccatgacgctactaagttcagctcaacaagcgccgacaaaacagccaaaatctggtcatttgatctgctcctgccgttgcatgagctaagaggccacaatggttgcgtaaggtgtagtgcattcagtgtagacagcacactacttgctacaggggatgataatggagagatccggatctggaatgtgtccaacggtgaactgctgcacttgtgcgcccctctgagcgaggagggagccgccacccacggcgggtgggtcaccgatctttgtttttccccggacggcaagatgctgataagcgcaggcggttacatcaaatggtggaacgtggtcactggggaaagctcccaaacgttctatacaaacggcacaaacctcaagaaaatacatgtgtcgcctgactttaagacctacgtgacggttgacaatttggggatactgtacattctgcagaccctggagtag

SEQ ID NO: 13864 - DNA, 3492 bp, synthetic construct
  misc_feature 1..3492: note = Description of Artificial Sequence: Synthetic coding sequence
  source 1..3492: mol_type = other DNA
atggacgccaaggcccgcaattgcctcctgcagcatcgggaggccctggaaaaggacatcaagacatcatatataatggaccatatgatctctgacggctttttaaccatctcagaggaggaaaaagtgcgaaatgaacctacacaacagcagagagccgctatgcttatcaaaatgatattgaagaaggacaatgactcttacgtctctttttataacgcactgctccatgaaggttataaggacctggcagctctactccacgacggaatcccagtcgtgtcgtcttcatcaggtaaggattctgtgtctggtatcacttcgtatgtgcgcaccgtgttgtgcgaagggggggtcccgcagaggccagtggtgtttgtgacccgcaaaaagttggtgaatgccatccagcaaaagctgagcaagctgaaaggcgaacccggctgggtgaccattcacggtatggccgggtgcgggaagagcgttttagctgccgaggccgtaagggaccacagtcttctcgagggatgcttccccggaggagtacactgggtgtctgtgggcaagcaagacaagtccggccttctgatgaagctgcaaaatctgtgtacaaggttggatcaggacgaatccttcagccagcggctacctctgaatattgaggaagctaaggaccggctgagaatcctgatgcttcgaaagcatccccgctccctcttgatcctggacgatgtgtgggacagctgggttctgaaggccttcgactcccagtgccagatactgctgacgacccgtgataagtcagtgacggactccgtcatgggacctaagtatgtagtccccgtagaaagctcactgggaaaggaaaaaggtcttgaaattctgtctttgtttgtgaacatgaagaaagctgacttacctgagcaggcccacagtatcattaaagaatgcaaggggtcccctttggtcgtgtccctgatcggtgctcttctccgagactttcccaaccgctgggagtattacctgaagcagctgcagaacaagcaatttaaaaggatcaggaaaagcagtagctatgattatgaggcccttgatgaggccatgtccattagtgttgagatgctgcgcgaggatataaaggactactatacggatctctctatactccagaaggacgtaaaagtccccaccaaagtgttgtgcatcctgtgggacatggagacggaggaggtcgaggatattctccaggaatttgtcaataaaagtcttcttttttgtgatcggaatggcaagtccttcagatattacttgcacgacctccaggtggatttcctcacagagaaaaactgttcccagctgcaggacttacataagaaaataattactcaattccagcgataccatcaaccgcacacactctctcccgaccaggaagattgtatgtactggtacaattttttggcctaccatatggcttccgcgaagatgcacaaggagctgtgtgctcttatgtttagcctggattggatcaaagctaaaactgagctggtgggccctgctcacctcatccacgagtttgtcgagtacagacacattctggacgaaaaggactgcgccgttagcgagaacttccaggaatttctctctcttaatgggcatttactgggaagacagccattccccaatattgtgcaactcggactctgcgagcctgaaacttccgaagtgtatcaacaggccaaattacaggcgaagcaggaggtcgataacgggatgctgtacctggaatggataaacaagaagaatatcactaatctgagtcgactggtggtccgcccacacaccgatgctgtgtatcacgcttgcttttctgaggatggacagagaatagcttcctgcggtgcggacaaaaccctgcaggttttcaaagcagaaacaggagaaaaactgcttgagatcaaggcacatgaggacgaagtgctgtgttgtgcattttctactgatgatcgttttattgctacatgcagcgtagataagaaagtaaagatctggaacagcatgacgggagagctcgtacacacctatgacgaacactccgagcaagtcaattgttgtcactttacaaactcctctcatcatttgctgctggcaaccgggtcgagcgactgcttcctgaaactgtgggacctgaatcagaaagagtgtcgtaataccatgtttggacacaccaacagcgtaaaccattgtcgcttctcacccgacgacaagcttcttgcaagctgttccgccgatggtaccctaaagctgtgggatgctactagtgctaacgaaagaaagagtatcaatgtcaagcagttcttcctcaacctagaagatcctcaggaagacatggaagtaatcgtaaaatgctgcagctggtccgctgatggcgccaggattatggtagctgccaagaacaagattttcctgtggaatactgactccagaagcaaggtggctgactgtaggggacacctcagttgggttcatggcgtaatgttctctccagacggttcctcatttctgacatcttcagacgaccagacgatacggctatgggagacaaagaaggtatgcaaaaatagtgcagtaatgctgaagcaggaagtggatgtcgtgttccaggagaacgaggtcatggtcctggctgtcgaccacatccgtcggcttcaactgatcaacggacgaacaggacaaatcgactatctaactgaggcgcaggtttcctgctgttgcttatccccccatctgcagtatattgcctttggtgacgagaacggagctattgagatactcgaactcgtcaacaatcgtatcttccagtcccggtttcagcacaaaaagacagtgtggcacatccagttcacagcagacgaaaagactctgataagctctagcgatgatgctgagattcaagtgtggaactggcaactggataagtgcatttttctgagaggacatcaagaaacagtgaaggactttagacttctgaagaactccaggctgctgagctggtctttcgacggaaccgtcaaagtgtggaatatcattaccggcaataaggagaaagatttcgtgtgtcaccaggggactgtgctaagttgcgacatctcccacgatgcaaccaagttctcttcaacatcagccgacaagacagctaagatctggaatgtttccaacggtgaactgcttcacctttgtgcaccccttagcgaggaaggcgctgccacccacgggggatgggtgaccgacctgtgcttctcgccagatggtaagatgctgatctccgcagggggctacattaaatggtggaacgtcgtgaccggcgagagtagccagacattctacaccaacggaactaacctcaagaagatccatgtcagtcccgattttaagacgtatgtgacagtggacaatttgggtatcctgtacatcctgcagacgcttgagtag

SEQ ID NO: 13865 - DNA, 3714 bp, synthetic construct
  misc_feature 1..3714: note = Description of Artificial Sequence: Synthetic coding sequence
  source 1..3714: mol_type = other DNA
atggacgcgaaagcccggaactgtttgctacagcatagggaagcgctggaaaaggacattaagacctcttacatcatggatcacatgatctccgacggcttcctgacgatttccgaggaggagaaggtgcgcaatgagccgacccagcagcagcgcgccgctatgctgatcaaaatgatcctcaaaaaggacaatgatagttacgtgagcttttacaacgccctgttgcacgaagggtataaggacctggccgctctcctccacgacgggatcccggtcgtgagttcctcgtcagttcgcacagtgttgtgcgaaggcggcgttccgcagaggcctgtagtctttgttacacggaaaaagttggtgaacgccatccagcagaagctgtccaagctcaaaggagagcccggttgggtcactatccacggaatggcagggtgcggcaagagcgttctggccgctgaggctgtgcgagaccacagtctgctggagggctgcttccccggcggtgtacactgggtatccgtggggaagcaggacaagtccggcctgctgatgaaactgcagaacttatgtacccggttagaccaagacgaaagtttctctcagcggttaccgctgaacatcgaggaggcgaaagacaggctaaggatactcatgttacgcaagcacccacgaagcctcctgatcttggacgatgtttgggattcatgggttcttaaagcattcgatagccagtgccagattctgcttactacccgcgataagtctgtcacagacagtgtgatgggtcctaagtatgtcgtccctgtggagtcctctctgggcaaggagaagggcctcgagattctctccttgtttgtcaatatgaaaaaagcggatctgccggagcaggcgcattcaatcattaaggagtgtaaaggcagtccgctggtggtgagtctgattggcgcactactgcgtgactttcccaatcgctgggagtactacctgaagcagctccagaataaacaattcaaaaggatccgcaagtctagctcttacgactacgaggctctggacgaggccatgagcatctcagtagagatgctgcgggaggacatcaaagattattacaccgatctgtctatactgcagaaagatgttaaggtgcccacaaaggtcctctgcatactgtgggatatggagaccgaggaggtagaggatatccttcaagagttcgtgaataaaagcctgctcttttgcgataggaatgggaaatcatttcgctactacctccacgatttacaggtggacttcctgaccgagaaaaactgcagccagctgcaagaccttcacaagaaaatcatcacgcagttccagagataccaccaaccacataccctgagtccagaccaggaagactgcatgtactggtataatttcctcgcataccacatggcgtctgctaaaatgcacaaagaattgtgtgctctgatgttctctctggattggatcaaggctaagactgaattggtcggccccgcacaccttatccatgaattcgttgaatacagacatatcctggacgaaaaagactgcgctgtcagtgagaatttccaggaatttctgtccctgaatggacatctgctgggcagacagccctttccgaatatcgttcaattaggcctttgcgagcccgaaacaagcgaggtctaccagcaggcaaagttgcaggccaagcaggaggtcgataatggaatgctgtacctagagtggattaacaagaaaaacatcaccaatctctcaagactggtcgtcagaccccacaccgatgccgtctaccatgcctgcttcagtgaggatggtcagcgaattgcatcctgcggggcggataagacgctccaagtgttcaaagctgaaaccggagagaaattgctcgagatcaaggcccatgaagacgaagtcctctgctgcgcattctccacggacgaccgcttcatcgccacttgcagcgtcgacaaaaaagtcaaaatctggaacagtatgactggagaactggtgcatacttatgacgagcactctgagcaagtcaactgctgtcactttaccaattcctcacaccacctgttgctggctacaggcagtagtgattgcttcctgaaactctgggacctcaatcaaaaagaatgtaggaatacaatgtttggccacacaaattcagtgaaccattgccgctttagccctgacgataaacttctcgccagctgcagcgccgacggaacccttaagctctgggacgcaaccagcgcaaatgagagaaagagtatcaacgtgaagcagttttttttgaacctcgaggatccacaggaggatatggaagtgatcgtcaagtgctgtagctggtcagcagatggagcccgtataatggtggcagccaagaacaagatattcctctttgatattcacacgagtggcctgctgggagaaatccacacaggacatcacagtactattcaatattgtgatttcagtccacagaaccatctggcggtcgtggcactctctcagtattgtgtggagttatggaatactgactccaggagtaaggtggctgattgtcgcggtcacctatcttgggttcatggcgtgatgtttagccccgacggcagttcctttctcacttcgagcgacgatcagaccatccggctctgggagactaagaaagtctgcaaaaacagtgcagtgatgctgaaacaggaagtcgatgtggtgtttcaggaaaacgaagttatggtgctggcagtggaccatatccgcagattgcagctgatcaatggcagaaccggccagatagactacttgacagaggcccaggtgtcgtgttgttgtctctcgcctcatctccagtacatcgcctttggcgacgaaaatggcgctatagaaattttggagctggttaataaccggattttccagagtcgcttccaacacaagaaaactgtttggcacattcaatttacagctgacgaaaagacacttatttccagctccgacgatgctgaaattcaagtttggaattggcagctggacaaatgcatctttcttcgcggccatcaagagacagtgaaggacttccgcctgctgaagaacagcagactcttatcttggagtttcgacggaacggttaaagtgtggaatatcataaccggcaataaggagaaagacttcgtttgtcaccagggaacagtgctgtcatgtgacatctctcatgacgcgacgaagtttagctccaccagcgccgacaagacagccaaaatttggtccttcgacctcctgctaccacttcatgagctgaggggacacaacggctgtgtcagatgtagcgccttcagcgtggattcgacgctcctcgccactggggacgataatggcgaaattaggatatggaacgttagtaacggagagttactgcacttgtgtgctccgttgtcagaagagggtgcagccacccacggaggttgggtgacagacctgtgtttcagccctgatggcaaaatgttgattagtgccggcggatatataaagtggtggaacgtcgtcacaggggagtcttcacagaccttctacactaacggcaccaatttaaaaaaaattcacgtctcacctgacttcaaaacttacgttactgtcgacaatctgggaatcctatacattctgcagacgctggagtag

SEQ ID NO: 13866 - DNA, 3747 bp, synthetic construct
  misc_feature 1..3747: note = Description of Artificial Sequence: Synthetic coding sequence
  source 1..3747: mol_type = other DNA
atggacgcaaaggcccgcaactgcctgctccaacatagagaagcattggagaaagatatcaaaacaagttacatcatggaccacatgattagcgacggtttcctgaccatcagcgaagaagagaaagtccgaaacgagccaactcaacagcaacgggccgctatgctcattaagatgatactgaaaaaagacaacgactcttacgtgagtttttataacgcgctccttcatgaaggatacaaggacctggccgcgctgttacatgatggcatccccgtcgtgtcttcctcgtcgggtaaggattcagttagcggcatcacatcctacgtcagaaccgtactgtgcgagggcggcgtgccgcagcgtcccgttgtatttgtgacccgcaagaagctagtgaacgctatccagcagaagctctccaagctgaaaggcgaacctggctgggttacaatccatggcatggcgggctgcggtaagtcagtgctggccgccgaggccgtccgtgatcattccttgttggaggggtgttttcccggcggggttcattgggtgtcagtgggcaagcaagacaagtccgggctgttaatgaaactgcagaatctctgcacccgtctggatcaggacgagagcttcagccagagactacctctgaatatcgaagaggccaaggaccggctgaggatcttgatgctgagaaaacacccccggtccctcctgatcctcgatgacgtgtgggacagctgggtcttaaaagcctttgattcccaatgccaaattctgctcaccactagagacaaatcggtcaccgactcagtgatggggcctaagtatgttgttcccgtcgagtccagtcttggtaaagaaaaaggcctggagattctgagcctctttgtgaatatgaaaaaagctgatctccccgaacaggctcactcgataatcaaggaatgcaaaggctcaccactggtggtgtccctgattggcgcacttctccgggactttcccaaccggtgggagtattatttaaagcaacttcagaataagcaatttaaacggatacgcaagtcatcctcctacgattatgaagcattagacgaggctatgagcatctctgtggaaatgctgagggaggacatcaaagattactacactgatctctccattctacagaaggacgtaaaggtaccaactaaagtgttatgcattctatgggatatggagacggaagaggtagaagacatcttacaagagttcgtcaacaaaagcttgctattctgtgataggaacggaaaatcttttcggtattatttacatgatctgcaagtggactttctgactgagaagaattgctcccaactgcaggacctccataagaaaatcatcactcagttccagcgctatcaccagccacacacgctgtctccagaccaggaagactgtatgtattggtacaacttcctggcctatcacatggccagcgcaaagatgcacaaagaattgtgcgccctgatgtttagccttgactggatcaaggctaagactgaattggtcggtccagcccacctgatacatgagttcgtcgaatacagacatatactggatgagaaggactgcgctgtttccgagaatttccaggagtttcttagcctaaatgggcacttgcttgggagacagccattccctaatatcgttcagttaggactgtgcgagcctgaaacatccgaagtgtaccagcaggccaagctgcaggcaaagcaggaagtggataatggaatgctctacctggaatggattaataaaaagaatatcaccaatctctcgagactcgtagttcgccctcacacagacgcagtttaccacgcttgcttctccgaggacggccaacggatcgcttcatgcggggcagataaaacattacaggtttttaaggctgagaccggagaaaaattactggagattaaagctcatgaagacgaggtattatgttgtgcatttagcactgacgatcggttcatcgccacctgttctgtggataagaaagttaagatctggaattccatgactggcgagctggttcacacctacgacgagcattctgagcaggtcaactgttgtcatttcaccaattcttcccatcatctcctcctggctacaggctcttctgactgtttcttaaaactgtgggatctgaaccagaaggaatgcagaaatacaatgtttggacataccaatagcgtgaaccattgcagattcagtcctgatgacaagctgctggccagttgttcagctgatggaaccttaaaactttgggacgcaacctccgcgaatgagaggaaatctattaacgttaagcagtttttcctgaacctagaagacccccaggaagacatggaagtcatcgtgaaatgctgcagctggtccgctgacggagctcggataatggtggcagctaaaaataagatcttcttattcgatattcatacatctggtctgctgggagaaatccacacgggtcaccacagcacaattcaatactgcgacttctcaccccagaaccatctggccgttgtcgctttaagccagtactgtgtggaactgtggaatactgactcaaggtctaaagtagcagactgtcgtggccacctgtcttgggtacacggtgtgatgttttcacccgacggctcttcgtttcttacctccagtgacgatcagacaatccgcctgtgggaaacgaaaaaggtgtgcaagaattccgctgtgatgttgaaacaggaggtggacgtcgtgttccaggaaaatgaggtgatggtactcgccgtcgatcatattcgtaggctgcaacttataaacggacgaacaggccagatcgactacttaacagaggcccaggtctcttgctgctgcctgagtcctcatttgcaatatattgccttcggtgatgaaaacggggccatcgaaattcttgaactggtgaacaaccgtatctttcagagtagatttcaacataagaaaaccgtctggcacatacagttcacggccgatgaaaaaaccctgatcagctcatcagacgatgctgagatccaagtgtggaattggcagctggacaagtgtatatttctccgtggccaccaggagaccgtcaaggattttcgcctgcttaaaaattcgagactgctgtcttggtcattcgatggcaccgtaaaggtgtggaacataatcacaggtaataaagagaaagacttcgtttgccatcagggaactgtgctgtcatgcgacatctcgcatgacgcaacaaagtttagcagtacctcggccgataagaccgcaaagatctggagctttgatctcttgcttcctctccatgagttgaggggacacaacgggtgcgttcggtgcagcgctttcagcgtggatagtaccctcctggccacaggggatgacaacggcgaaatacgcatctggaacgtgtctaacggtgagctgcttcacttgtgcgcccctctttccgaagaaggcgccgctacccatgggggctgggtaacggatctttgtttttccccagatggcaaaatgctgatcagcgctggaggatacatcaagtggtggaacgtggtgactggagaatcaagtcaaacattctacaccaatgggacaaatcttaaaaagatccacgtaagcccagacttcaaaacctacgtgaccgtggacaatctcggcatactgtacatccttcagactctggagtag

SEQ ID NO: 13867 - DNA, 1017 bp, synthetic construct
  misc_feature 1..1017: note = Description of Artificial Sequence: Synthetic coding sequence
  source 1..1017: mol_type = other DNA
atggacgcaaaggcgcgcaactgcctgcttcagcacagggaggcgttagagaaagacatcaaaacctcttacattatggatcatatgatctccgatggtttcctcacgattagcgaagaagaaaaagtgcggaacgagccgacacaacaacagcgcgcggccatgttgatcaaaatgatcctgaaaaaagacaacgactcttacgtgagtttctataatgctcttctgcatgagggctataaagacctcgcggccctgttgcacgatgggatccctgtcgtgtcctcctcttccgggaaggatagcgtgagcggaatcacctcttacgtgagaacggtcctgtgcgagggcggggtgccgcaaagaccagtcgtgtttgtaactaggaagaagctagtgaacgccatccagcaaaaactgtcgaagctcaagggtgaaccagggtgggtaacaatccacggaatggctggttgtggcaaatcggtgttggcagccgaagcggtcagagaccattccctcctggaaggttgttttcctggtggggtgcattgggtttcagtgggtaaacaggacaagagtgggctcctgatgaagctgcagaatctgtgcacccggcttgaccaggacgaaagttttagtcagaggctgcccctgaatatcgaagaggccaaagatcgactgcggatactgatgcttcgcaagcacccgcggtcattgcttatcttggatgatgtgtgggattcttgggttctcaaggcttttgacagtcaatgccagatcctgctgaccacacgcgacaagtctgtgacagacagtgttatgggcccaaaatatgttgtccctgtcgagagctccctgggtaaggagaaagggttagaaatcctgtctctatttgtgaacatgaagaaggccgatttgcccgaacaggcacacagtattataaaggaatgtaaagtagtggaacgatgccactggggcatcctgacagacttgctccataagtggaaccaatcttag

SEQ ID NO: 13868 - DNA, 2025 bp, synthetic construct
  misc_feature 1..2025: note = Description of Artificial Sequence: Synthetic coding sequence
  source 1..2025: mol_type = other DNA
atgccctcatacaccgtgactgtcgctactggatcacagtggtttgctggtacggacgactatatctatctgtctttggttggctctgcaggctgttccgagaagcacttacttgacaagcccttttacaacgatttcgaaagaggtgccgtggatagctatgatgtgacagttgacgaagaattgggcgaaattcagctcgttcggattgagaagcgcaaatattggctgaacgacgattggtaccttaagtacatcacactaaagaccccccacggcgattatattgagttcccatgctatagatggattaccggagatgtggaagtggtgctgagggacggcagagccaagttggcaagggatgaccagatccacatcttgaagcagcaccggcgcaaagaactcgaaacaaggcagaaacagtaccgctggatggaatggaatcctggtttccccttgtcaattgatgcgaagtgtcataaggacctgccacgggacatacagtttgattccgagaaaggcgttgacttcgttctgaactactcaaaggccatggaaaacctgttcattaaccgatttatgcatatgtttcagtcgtcctggaatgattttgcagattttgaaaagatattcgtaaaaatctcaaataccattagtgagagagtgatgaatcactggcaagaggatctcatgttcggctatcagtttctgaacggctgtaatcccgtgcttatcaggcgatgcaccgaactgcctgaaaaactccctgtgacaacagaaatggttgaatgttccttggaacgacagctctcccttgagcaggaggtgcaacagggcaacatttttatcgtggacttcgaactattagacggtatcgacgcgaacaagactgacccatgtaccctccagttcctggccgctcccatatgtcttctgtacaagaacctggccaacaaaatcgtgcctattgccatccaactaaatcagattcccggcgatgagaaccccatcttccttcctagcgatgctaagtacgattggcttctggcaaaaatatgggttagaagctccgactttcacgtgcaccagactattacccacctgttgagaacccatctggtgtcagaggtcttcgggatcgcaatgtataggcagctgcctgccgtgcaccctatttttaaactgctggtggcccacgttcgcttcactattgccatcaataccaaagcacgtgaacagttgatttgcgagtgcggactctttgataaagcaaatgctaccggtggcgggggacatgtgcagatggtacagcgcgccatgaaggaccttacgtacgcatcactctgtttcccagaggcaataaaagcacgggggatggaaagtaaggaggacataccctactacttttatcgagacgatggtctactggtgtgggaagccatacgcacatttacagccgaggttgttgacatctattacgagggagatcaagtcgttgaagaggatccagagctccaggattttgtcaatgacgtttacgtctatgggatgaggggccggaaatcctctggttttccgaagtccgtgaagtcacgggaacagctcagcgaatacttgaccgtggtgatatttacggcctcagcccagcacgccgctgtgaactttggccagtacgactggtgctcctggatccccaatgcaccccccaccatgcgagccccaccacctaccgctaaaggtgttgtgacaattgagcaaattgtcgacacgctccccgacagaggccggtcctgttggcatctcggtgcagtatgggcgctcagccaattccaggagaatgagctgtttcttggcatgtaccccgaggagcactttatcgagaagccagtgaaagaagcgatggctcgattcaggaagaacttggaagctattgtgtcggttatcgcagagcgaaacaaaaagaaacagttgccctactactatttatcacccgacaggatcccgaacagtgttgcgatctag

SEQ ID NO: 13869 - DNA, 1854 bp, synthetic construct
  misc_feature 1..1854: note = Description of Artificial Sequence: Synthetic coding sequence
  source 1..1854: mol_type = other DNA
atgcccagttataccgtgaccgtcgcaacagggtctcagtggttcgcggggaccgacgactatatatatctttcacttgttgggtccgctgggtgtagcgagaagcatcttctcgacaagcctttttacaacgatttcgaaaggggagccgttgactcttatgacgttacagtggacgaagaactcggggaaattcaattggtccgcattgagaagcgtaagtactggttaaacgatgattggtatctcaaatacatcaccttaaagaccccacatggagactacatcgaattcccctgctatagatggatcacgggggatgtggaggtcgtcctgcgagacggtcgggctaaacttgccagggatgaccagattcacattctcaagcaacacaggagaaaggaactggagactcgccagaagcagtaccggtggatggagtggaatcccggcttccctcttagtatcgatgcaaaatgccataaggacttaccacgggatattcagttcgactccgaaaaaggcgtagactttgtacttaactattccaaggcaatggagaatctatttatcaatcgattcatgcacatgttccagtcttcctggaatgatttcgcagactttgagaagatctttgtgaaaatctcaaatactatctctgaacgcgtcatgaaccattggcaagaggatcttatgtttgggtaccagttccttaacggctgcaaccctgtcctgatcagacgatgtaccgagctgcctgaaaagttacccgtgacaaccgagatggtcgagtgttcccttgaaaggcagttgagcctcgaacaggaggttcaacagggcaatatctttatcgtggatttcgaactgcttgacggcatcgacgccaacaagacggatccatgcacattgcagtttctggcggctccaatttgcctgctgtataaaaatcttgcaaataagattgtcccgattgccatccaactgaaccagattcccggagatgagaaccctatttttcttccttcagacgctaaatatgattggctcctcgcaaagatatgggtgcggtcctcggattttcatgtgcaccagaccataacacatctgttgcggacccatttggtcagtgaggtgtttggcattgccatgtatcgccagcttcccgctgtgcatcctatcttcaaattacttgttgctcacgtgagattcaccatcgctatcaatactaaggctcgcgaacagttaatctgtgagtgtggtttatttgacaaggccaacgccactggcggcggaggccacgtgcaaatggtccaaagagccatgaaggatctgacttacgccagcctgtgttttcctgaggccatcaaagcccggggaatggagtctaaggaagatataccctactatttctatcgggatgatggtctacttgtgtgggaggccatcagaaccttcaccgcggaagtggtggatatctactacgagggagaccaggtggtggaggaagacccagagctgcaggattttgtgaatgacgtgtatgtttacggcatgcgtggacgcaaaagcagcggtttccctaagagcgtgaagtcccgggagcaattatcagaatatctcacagtggtgattttcactgcctccgcccagcacgccgcggtgaacttcgggcagttgttcctggggatgtacccagaggagcattttattgaaaaacctgtcaaggaggcaatggcacggttcagaaagaacctcgaggcaattgtgtcagtgatcgccgagagaaataaaaaaaagcagctaccttattattacctctctccagatcggattccaaactccgtggcaatttag

SEQ ID NO: 13870 - DNA, 2511 bp, synthetic construct
  misc_feature 1..2511: note = Description of Artificial Sequence: Synthetic coding sequence
  source 1..2511: mol_type = other DNA
atgcacgcccagcggcagttcgtggtcgccgccgtgcgcgcagaagtacggagacacgaggtggccaagcaagcacttaaccgtctcagaaaactcgctgagcgcgtagacgacccagaattgcaagacagcatccaagcatcactggattctatacgggaagctgttatcaattctcaggagtggaccctctcccgttccatacctgaactacgcttgggcgtcctgggggacgcgcgcagcggcaagagcagcctcattcacagattcctgaccggatcgtaccaagtactggaaaagaccgagagtgagcagtataagaaggagatgctcgtggacggccagacacacctcgttctgattcgggaggaggccggtgcccccgatgccaagttctctggctgggcagacgctgtcatttttgttttcagtctggaggatgagaactccttccaagccgttagtcgcctgcacgggcagctgtcttctctgagaggcgaaggcagaggtggcttggctctggcactcgtcggcacacaagataggatttccgcttccagtccgcgagtcgtgggcgacgcccgagccagagccttatgcgcagatatgaagagatgttcgtattatgagacctgtgctacatatggtctcaatgtggatagagttttccaggaagtcgcacagaaagtcgtaacattacgcaagcaacagcaattactggccgcctgtaaatctttaccatccagcccctctcactccgccgcatcgactccagtggccggccaggccagcaacgggggtcacactagtgattacagctcaagcctgcctagctcccccaatgtgggccaccgtgaattgcgagcagaggctgccgcagtggcgggcttgtcgacccctgggagcctgcatcgtgccgcaaaacggcggacgtccctcttcgccaacagaagaggctcggactcagagaagagatctctggactctagaggcgagaccacgggttctggcagggcaatcccaatcaagcaaagctttttgcttaaaagaagcggaaatagcctgaataaggaatggaaaaaaaaatacgtgacactgagttcgaacggcttcctgctctaccacccaagcattaacgactacattcattccacacacgggaaggagatggatctgcttcgcaccaccgtgaaagtgcccggaaaaagacctccccgggccattagcgcttttggaccctccgcatctataaacggcttggtcaaagatatgtccaccgtgcagatgggggagggactggaggccaccaccccgatgccatcccccagcccctcaccttcctcactgcagccaccccccgaccagacaagcaagcacttactcaagcccgaccgcaacctcgcccgcgctctttccactgactgcaccccttcaggcgatttgtcacctctaagccgggagccccctccatctcccatggtgaagaagcagcggaggaagaagttaaccactccctccaaaactgagggaagcgcaggtcaggccgaggaggagaatttcgaatttctcatcgtaagtagcacaggccagacttggcatttcgaagccgcatcctttgaggaacgagacgcctgggtccaagcaattgagtcacagattctggcatctctgcagtgctgcgaatcatcaaaagtcaaacttagaaccgactcacagtctgaggccgtggcaatccaggccatccgaaatgctaagggcaacagtatttgcgtggattgtggagcacccaatcccacatgggccagtctgaaccttggagcactgatttgtattgaatgtagcggtattcaccgcaatctcggaacgcacctgtcccgtgtgcgaagcctggacttggacgattggccaagagaattgacactggttctgactgcgatcgggaacgacaccgccaacagggtctgggagtccgatactcgcggacgcgcaaagccttccagagattcgagccgcgaagaaagggagtcttggatccgtgccaagtacgaacagctgttgtttctggccccgctttccaccagcgaagaacccttagggcgccagctttgggctgctgtacaggcacaagacgtggccacggtactcttactactggcccacgcgaggcatggacctttggacacctctgtggaagacccccaactgcgatcgcctctgcatttagcggcggaactagctcacgtggtcattacgcagcttctgctgtggtatggcgccgacgtggcagcaagagatgcccaggggaggaccgcccttttctatgcgcgccaggccgggtcgcagctatgcgcagacattctgctgcaacatggttgtcctggagagggtggtagtgcagcaacaactccatcagcagctacaaccccatccataacagccacaccaagtcccagaaggagaagttccgccgcatcggtcggaagggctgatgcacctgtagcacttgtgtag

SEQ ID NO: 13871 - DNA, 3579 bp, synthetic construct
  misc_feature 1..3579: note = Description of Artificial Sequence: Synthetic coding sequence
  source 1..3579: mol_type = other DNA
atgagcaggggggccggtgcactgcaacgacggaccacgacatatttaatttcgttaacgctggtgaagttagagagcgtacctcctcctccaccttccccaagcgccgccgccgccggggccgctggggcacggggttcggaaactggagatccgggttctccacggggggctgaagaacccggcaagaagcgccatgagcgactttttcataggcaagacgcgttatggattagcaccagctccgccggaaccgggggagcggaacctcctgcgctttcgcccgccccagcctcaccagcaaggcctgtgagcccagcaccaggtcgcaggttgtccctctgggcagtgcctccggggccgccactgagcggggggctgtcccccgacccaaaaccgggaggggcacccactagctcaagaaggcccctgctgtctagtccaagttggggcgggcctgagcccgaaggccgcgccggcgggggcattccaggatcttccagtccccatcccggaacgggctcccggcggttgaaggtggcccctcctcctcctgcacctaaaccatgtaagactgtgaccactagcggagccaaagccgggggaggtaaaggcgcaggaagccggctgtcctggccagagtccgaaggcaaaccaagggtaaaaggatctaagtcgtctgccggaactggagcttcagtcagcgcagccgctacagccgcggccgcggggggaggcgggagtactgcatctacctcgggtggtgtaggggcaggcgctggtgctagggggaaactgagccctcgaaaaggcaaaagcaaaacactggacaactctgatctgcatccagggcctccagctggctctcctccccccttaacactgccaccgaccccttcacctgccacagccgtgaccgccgcctctgcccagcctcccggtcctgcccctcccatcaccttggagccccccgcccccggcctgaagaggggccgagagggggggagagcaagcacccgggaccgcaagatgctcaaatttatttctggcatatttaccaaatcaacaggcgggcccccaggctctggtcccttgccaggtcctccctcacttagttctgggagcggcagtagagaactgctcggcgcggaactgcgagcctcacctaaggccgtgatcaactcccaggagtggactttgagcagaagcatccccgaacttaggcttggcgtgcttggagatgcccgcagtgggaaatcttctttgattcaccgattcttgacaggctcgtatcaggtactggagaagacagagtccgagcaatataagaaagagatgttggtggacggtcagacacacctcgtgctgatacgcgaagaggctggtgcccctgatgccaagtttagcgggtgggctgacgccgtcatttttgtcttctctctggaagacgaaaatagctttcaggccgtgagcaggctgcatggacagctctcttctttgagaggagaaggtcgcgggggtttggccttggcactggtgggcacccaggacaggattagtgcttcctccccacgcgttgttggtgacgcgcgtgcgagggcgctgtgtgcggatatgaagcgctgctcatactacgaaacgtgtgccacttacggccttaatgtagacagagtgttccaggaggtggcgcagaaggtggtaactctgaggaaacagcagcaactgctggcggcttgtaagtccctcccctcttctccatcacactccgccgcctcgactcccgtggctggccaagcgtcaaatggcgggcatacaagtgactactcctctagtttgccgagctcacctaatgtgggtcatagagaactgcgcgccgaggcagcggccgtggctgggctctctaccccaggcagcctacatcgagctgccaaacggcgaacctccctctttgccaatagaaggggaagcgacagtgagaagagatcactggatagtaggggcgaaacaacaggaagtgggcgcgccatcccgataaaacaaagtttcctattaaagaggagtggcaattcactgaataaggagtggaagaagaaatatgtgaccctgagttcaaacggcttcctcttatatcatcccagcataaacgactacattcattctacacacggaaaagaaatggatttgctgcgcactaccgtgaaggtgcccggcaaacggcccccaagagcgatttcagccttcggtccatctgcaagtatcaacggactcgtcaaggacatgtcaacagtacaaatgggggaagggttagaagcgacaacccccatgccttcccctagcccatcccctagttccctgcagcccccgcccgaccagacctcaaaacacctgctgaaacccgacaggaacctggcccgtgcactgagcacagactgcacaccatccggagaccttagtcccttgtcaagagagccaccgccttctccaatggtcaaaaaacagaggcgaaaaaagctgacgacaccctccaagactgagggtagcgctggacaggcggaagccaagcgcaaaatgtggaaattgaaatcattcggctcactacgtaacatatacaaagccgaagaaaatttcgagttcctcatcgtgtcaagcacgggtcagacttggcacttcgaggcggcatctttcgaagaacgagacgcatgggtgcaggctatcgagagccaaatactggcttccctgcaatgctgtgaaagctctaaggtgaagcttaggaccgacagtcagagtgaagctgtggccatccaggctatccgaaacgctaagggaaactctatttgtgtcgattgtggggcccctaaccctacttgggccagtttaaacctaggcgcactgatttgcatcgaatgtagtggaatccaccggaatcttggcactcacttaagccgcgtacgatccctcgacctcgatgattggccccgcgaactgaccctggtgctcactgccattgggaatgacacagccaaccgtgtgtgggagtctgacacccgggggagggctaagcccagcagggactcctctagggaggaacgcgagtcctggatacgcgctaaatacgagcagctgctgttcttagccccactgtcaacatcagaagagcctttaggacggcaactttgggccgcagtacaggctcaagacgtggctaccgtcctcttgttgctcgctcatgcaaggcatggccctctcgatactagcgtggaagatccccaactgcgtagtcctctgcatttagctgcagagctcgctcacgttgtgatcacccagttattgctatggtacggtgccgacgtcgccgcccgtgatgcccagggaagaacagctctgttctacgcgaggcaagctgggagccagctctgcgccgacattctgctccagcacggctgtccaggcgaaggcgggagcgcggctacaacgcctagcgccgctacaacaccttccatcaccgcaacaccttcacctcgcaggaggtcctccgcagccagcgttggaagagcggacgcacctgtagcactggtgtag

SEQ ID NO: 13872 - DNA, 1185 bp, synthetic construct
  misc_feature 1..1185: note = Description of Artificial Sequence: Synthetic coding sequence
  source 1..1185: mol_type = other DNA
atggactcccagggccgaaaggttgtggtttgtgataacggtacaggattcgtgaaatgcggatatgccggaagtaatttcccggagcatatcttccccgctcttgtcggacgccccatcatcaggagtaccaccaaagtcggtaacatcgagataaaagacttaatggtgggcgatgaggccagcgaactgaggagcatgctcgaggtgaattatcctatggagaacggcattgtacgaaattgggacgatatgaaacacctttgggattacacctttgggccagaaaagctgaatatcgatacacggaactgtaaaattctccttacagagcctccaatgaaccccactaaaaatcgagaaaagatcgtagaggtcatgttcgagacttaccagtttagcggggtgtatgtggccattcaggccgtgttaactttgtatgcgcaggggcttctcaccggagtggtggtggattctggtgacggcgtgactcacatttgcccggtttatgaagggttctctctcccccatctcactcgtcgcttggatatcgcggggcgggacattacacggtacctgatcaagcttttgttgcttaggggttacgctttcaatcactccgctgactttgagaccgtcaggatgatcaaggaaaagttatgttacgtcggatacaatatcgagcaggagcagaaactggcacttgagaccaccgtcctggtcgagagctatacactccctgacggacgtattatcaaggtgggaggcgaacgctttgaggccccggaggcactctttcagccgcatctgattaacgtggaaggggtgggcgtcgctgagctcctgttcaatactattcaggcagctgatattgatacaaggagcgaattctataagcatatcgtactgtcaggtggatccacaatgtatcccggacttccctcccgcctcgagcgagagctgaagcaactctacctcgaacgcgttttgaaaggggatgtggagaagctttcaaaattcaagatccggatcgaggatcccccacggcggaagcacatggtcttcctggggggggccgttcttgcagatatcatgaaggataaggataatttttggatgactagacaagaataccaggaaaaaggagtgcgggttctggagaaacttggggttacggtgaggtag

SEQ ID NO: 13873 - DNA, 1200 bp, synthetic construct
  misc_feature 1..1200: note = Description of Artificial Sequence: Synthetic coding sequence
  source 1..1200: mol_type = other DNA
atggattctcagggcaggaaggtcgtggtatgcgacaacgggacagggtttgtaaagtgtggctacgccggttctaatttccccgagcacatctttccggccctcgttgggcggcctattatccgatcaactaccaaggtcggaaacatcgagataaaaaataataagaaaatggaccttatggtcggagatgaggcgagtgagctccggtcgatgctcgaagtgaattatcccatggagaacggcatcgtccgcaactgggatgacatgaaacacctctgggattatacttttggccccgagaagctcaacatcgacactcgtaattgcaaaattctactcacagagcctcctatgaaccctactaagaacagagaaaaaatagtggaagttatgttcgagacataccaattctcaggggtgtatgtcgcaatccaggctgtgctgaccctgtacgcccagggtctgctgaccggagtagtggtagattccggtgatggtgtcacacacatttgccccgtgtatgaagggttctccctccctcacctcacccgccggctggacattgccggcagagacataacccgctatcttattaagcttctattactgagaggctatgctttcaaccacagcgctgattttgagactgtgaggatgatcaaagaaaaactgtgctacgtgggatacaacatcgaacaagaacaaaaactcgccctggagacgacggtactggtggaatcctatacacttcctgatgggcgcataatcaaagtgggcggtgaaaggtttgaggcacccgaagcacttttccagccacacctgattaatgtagaaggcgtgggagtggccgagctgttatttaacacgattcaggcggcagacatcgacactcggagtgagttttataagcatatcgtgctgtctggaggtagtaccatgtaccccggcctgccatcaaggctggaacgcgagctcaagcagctgtatctcgaaagagtcctgaagggcgatgtcgagaaactgagcaagtttaagatccggattgaggacccgccaaggaggaaacacatggtctttctgggcggggcggtcctcgctgatattatgaaagacaaagataacttctggatgaccagacaggaataccaggagaaaggtgtccgcgttctcgagaagctgggcgtgaccgttcgctag

SEQ ID NO: 13874 - DNA, 1020 bp, synthetic construct
  misc_feature 1..1020: note = Description of Artificial Sequence: Synthetic coding sequence
  source 1..1020: mol_type = other DNA
atggttggcgacgaggcatcggagctgcgttcaatgctggaagtaaactatccgatggagaatggcattgtgagaaactgggatgacatgaaacacttgtgggactacaccttcggtcctgagaagctgaacatagatacacgaaactgtaagatactccttacagagcctcccatgaaccccacgaaaaaccgagaaaaaatagtggaagtcatgtttgagacctaccagttcagcggcgtgtacgtggccattcaggccgttctgaccttgtacgcccaggggctgttaactggcgtggttgtagactcaggtgatggggtgacccatatttgtcccgtatatgagggcttcagtttaccccacctgacccgccgcctggacatcgccgggagggacatcaccaggtacttgataaaattgttgctgctccggggctatgccttcaaccattctgcagactttgaaacagtcagaatgatcaaagagaagctgtgctatgtgggctataacatagaacaggagcagaaattagctttggagacaacggtcctcgtggagtcctataccttacccgatggaaggattataaaggtgggtggagagcgtttcgaggcccccgaagcactgttccaaccccatctgattaatgtggagggagtcggcgtggcggagcttctctttaatacgattcaagccgcagacatcgatactaggtcagagttttacaaacacattgtgctcagcggagggagcacaatgtaccccggcctgccctctaggctagagcgggagctaaagcagctttacctggagagagttctcaaaggcgatgttgagaagctctcaaagtttaagatcagaatcgaggacccacccaggaggaagcatatggtcttcctcggaggcgccgtgctggcggacatcatgaaggataaggacaacttttggatgacacggcaagaataccaggaaaagggcgtgcgcgtacttgaaaaattaggcgttactgttaggtag

SEQ ID NO: 13875 - DNA, 918 bp, synthetic construct
  misc_feature 1..918: note = Description of Artificial Sequence: Synthetic coding sequence
  source 1..918: mol_type = other DNA
atggtgggggacgaagcttccgaactccggagtatgcttgaggtgaattaccccatggagaacgggatcgttcgcaattgggacgacatgaaacatctatgggactacaccttcgggcctgaaaaattgaatatcgacacgcgcaactgtaaaatccttctcaccgagcctcccatgaatcccaccaagaaccgagaaaagatcgtggaggtaatgttcgagacataccagttcagtggagtctacgtagctattcaggccgtgctgactctttacgcccagggcctcctgacgggggtggtggtggattctggggacggcgtgacccacatctgtcctgtctatgagggattcagtctcccgcacctcacaagacgacttgatatcgctggtcgcgatatcactcggtacctgatcaaactgctgctcctcaggggttatgccttcaaccactcggcggacttcgagacggtccgcatgatcaaggaaaagctctgctatgtcggatacaatatagaacaagagcagaagttagccttggagacaacggtgttggttgagagttacacgttgccagacgggcgtatcatcaaggtgggcggggagaggtttgaagcacctgaggccctcttccagccacatctcatcaacgttgaaggagtgggagtggctgaactcctcttcaacaccattcaggcggctgatattgacactcgatccgagttctacaagcacatcgtgttgtccggtggatctaccatgtacccaggcctcccctctaggctggagagggagttaaaacagctgtatctggagagggtactcaagggggatgtggagaagctttctgtgagcatctcaaagtccacgattaccaatatcctcctgaaaggctacacagtggtatgcgagtcctag

SEQ ID NO: 13876 - DNA, 1257 bp, synthetic construct
  misc_feature 1..1257: note = Description of Artificial Sequence: Synthetic coding sequence
  source 1..1257: mol_type = other DNA
atggctggtcggttgccggcctgtgtggtggactgcgggacaggctacaccaagttaggctacgctggaaacactgagccccagttcatcatcccatcgtgcattgccattaaggagagcgccaaggtgggtgaccaagcacaacggagggtgatgaaaggcgtggatgacctggatttctttataggcgatgaggccatagaaaaaccaacgtacgccaccaagtggccgatacgacacggtattgtagaggactgggatttaatggagaggtttatggaacaagtcatctttaaatatctgcgggctgaacccgaagatcattactttctgcttactgaacctccactgaatacacctgaaaaccgggaatacaccgcggaaatcatgttcgaatcctttaacgtgcccggtttatacattgcggttcaagctgttctcgctctggccgcgtcatggacctcacgacaggttggagagcgtaccctcaccggaactgtaatagatagtggagatggcgtcacacatgtgattcccgtagctgagggatacgtgatcgggagctgcatcaaacacatccctattgcaggccgggatattacgtacttcatacagcagctgctccgtgatcgcgaggtggggatcccccctgagcagtcactggagaccgccaaggccgtaaaggagcggtatagttatgtctgtcccgacctcgtgaaggaatttaacaagtacgataccgacggatcgaaatggataaaacagtataccggaattaacgccatcagtaagaaggaattctccatcgatgtggggtacgaacgttttcttgggccggagattttcttccacccagaattcgcgaatccagacttcacccaacccatcagcgaagtggtagatgaagtgatccagaactgtcccattgacgttcgccgacccctgtataagaatatagtgttgtccggggggagcactatgtttagagatttcgggcgacgtctgcagcgtgacctgaagagaaccgtcgacgcacggctgaagctatctgaggaactgagcggcggtaggctgaaacccaagccaattgacgttcaggttatcacgcatcatatgcaacgatatgccgtgtggttcggcgggagtatgctggcctcgacccctgaattctaccaggtttgccacactaagaaggattacgaagaaatcgggccctccatatgtaggcataatcccgtgttcggtgtgatgtcatag

SEQ ID NO: 13877 - DNA, 1104 bp, synthetic construct
  misc_feature 1..1104: note = Description of Artificial Sequence: Synthetic coding sequence
  source 1..1104: mol_type = other DNA
atgaagggcgtagatgatctcgacttctttattggagacgaggccatcgagaaacctacctacgcaaccaagtggccaatcaggcacgggattgttgaagattgggacttgatggagcgcttcatggagcaggttatcttcaagtatctcagagcggaaccagaggaccactatttcctgttaacggaacccccactgaacactccggaaaacagagagtatacagccgagatcatgtttgaaagctttaacgtaccagggctatatatcgcggtgcaggccgtgctcgcactggctgcaagttggacaagccgacaagtgggtgagaggactctgaccgggaccgtgatagactccggcgatggtgtcacccacgtaattccagtggccgaggggtatgtcattggcagctgcattaagcacatcccaatagccggaagagacatcacatacttcattcagcaactgctgagagatcgcgaggtcggaattccaccagagcaaagcctcgaaacggccaaggccgtgaaggaaagatattcgtacgtctgtcccgatctggtgaaggaattcaataaatacgacacagatgggagcaaatggatcaagcaatacacaggaatcaacgccatttccaagaaggagttctccatcgatgtcggttatgaacgattccttggccccgagatctttttccatccagagtttgccaacccggattttacgcagcccatttctgaagtggtcgatgaggtcattcagaactgtccaatcgatgtgcggcggccgctttataaaaacattgtactgagtggtggttccacaatgttcagagatttcgggaggcggctccagagagatctcaaaaggaccgtcgatgcccggttaaaattatccgaggaactctcagggggcagattgaaaccaaagcccatcgatgtgcaagtaattacacatcacatgcaacggtatgccgtgtggtttgggggctccatgcttgcgagcacacccgaattctatcaggtatgtcacaccaaaaaagactacgaggagataggaccttctatctgcagacataatcccgtctttggcgtgatgtcctag

SEQ ID NO: 13878 - DNA, 1071 bp, synthetic construct
  misc_feature 1..1071: note = Description of Artificial Sequence: Synthetic coding sequence
  source 1..1071: mol_type = other DNA
atgctggagattcagaatcactctctgagttccttaccatggcccatcaggcacggtattgtcgaggattgggacctgatggaacgattcatggaacaggtcattttcaaatacctgcgggccgagccagaagaccattacttcctgctgacagagcctccgctcaataccccagaaaatcgcgagtataccgcagagatcatgtttgaaagttttaacgtgcctgggctttatattgcagtgcaagcagtgttagctctcgctgcctcctggacgagccgtcaagttggagagagaactcttacaggcacggttatcgacagcggggacggcgtcacccacgtgattcccgtggccgagggatatgtgatcggctcttgcatcaagcatattcccatcgctggacgcgatataacctactttatccagcagctcctgcgggacagagaggtgggtattcctccagagcagagccttgagacggctaaggcggtgaaggagcgctatagctatgtgtgcccggatctcgtaaaagaattcaataaatacgacactgacggttccaagtggatcaagcagtacaccgggattaacgccatttctaagaaagaattctccattgatgtgggctacgagaggttcctgggtcccgagattttctttcatccagagtttgccaacccagacttcacacagccgatctcggaggtggtagacgaagtgatacagaattgccctattgacgtgaggaggccgctgtataagaacattgtgttgtctggcggttcgaccatgtttcgggactttggccgtcgcctgcaacgggatcttaaaaggaccgtcgatgcaaggctaaagctgtcagaagagctttccggcgggagactgaagcccaaacccatcgatgtgcaggtgatcacacatcacatgcaacgatacgcagtttggttcggcgggtcgatgctcgcctcgacaccagagttttaccaggtttgtcacacaaagaaggactatgaagagattgggccttccatttgccgacataatcctgtcttcggtgtgatgtcttag

SEQ ID NO: 13879 - DNA, 870 bp, synthetic construct
  misc_feature 1..870: note = Description of Artificial Sequence: Synthetic coding sequence
  source 1..870: mol_type = other DNA
atgttcgaatcatttaacgtcccgggcctttatattgcggttcaggccgtcctggctctggcggcgagttggacctcccggcaggtgggtgagcgaaccctgacaggcactgtgattgattcaggagacggagtcacccacgtcattccagtcgctgagggttacgtgatcggttcctgtataaagcatattccgatcgcaggccgcgacattacttattttatccagcagctgctgcgtgatagggaggttggcattccccctgagcaaagcctggagacagctaaagctgtgaaagaacggtatagttacgtgtgcccagacctagtaaaagaattcaataagtatgataccgacggctcgaagtggattaaacagtacacaggaattaacgccatctccaaaaaggaattctcgatcgatgtcggctatgagagattcctcggacctgagatcttctttcaccctgaatttgccaatccggacttcacacagcccatctcggaggttgttgacgaggtgatacagaactgtcctatcgacgtgagaaggccactgtacaagaacattgttcttagtggtggtagcaccatgtttagagatttcggacgacgactacaacgcgacctaaaaagaacagtggatgcgcgcctcaaactgtcggaagaactgtcaggcggtcgccttaaaccgaagccaatcgatgttcaggtgattactcaccatatgcagcgatatgctgtgtggttcggtggcagtatgttggcctctactccagaattttatcaggtctgtcacaccaagaaagactacgaggagattggcccctccatatgcaggcacaacccagtgtttggggtcatgtcctag

SEQ ID NO: 13880 - DNA, 1749 bp, synthetic construct
  misc_feature 1..1749: note = Description of Artificial Sequence: Synthetic coding sequence
  source 1..1749: mol_type = other DNA
attgatattgagtccatggataccgataaagacgaccctcacggacgattggaatacaccgaacaccaggggcggatcaagaatgcgcgcgaggcccactcccagatcgaaaaaagacgacgggacaagatgaactcctttatcgatgaactggcttcactggtccccacttgtaatgcaatgtcccgaaaattggataagcttacagttctcagaatggcggtgcagcacatgaaaacactcaggggtgcaacaaatccatataccgaagcaaactataaacctaccttcctctccgacgacgagctgaagcacctaattctccgcgccgccgatggattcctcttcgtcgtggggtgtgatcgtggcaaaattctgtttgtttccgagagtgtatttaagatcctgaactactcgcagaacgacttgattgggcagagtctattcgactatctgcaccccaaggatatagcgaaggtcaaggaacagttatcttcaagcgatacagcacccagggagcgcctgatcgatgccaaaacaggcttgcccgttaaaaccgatatcaccccaggtccttcccgcctgtgttccggagcacgacgcagttttttttgccggatgaagtgcaaccggcctagcgtgaaggtggaggataaagacttcccaagtacttgctccaaaaagaaggccgacagaaaaagtttctgcactattcactctacagggtacctcaagtcatggccacctaccaaaatgggcctggacgaagacaacgaacccgataacgaggggtgcaatctgtcctgcctcgtcgctatcggtagattacattcccatgtggttcctcagcctgttaatggcgagatcagggtcaaatcaatggagtacgtgagccgtcacgccatcgatggcaaattcgtctttgtggaccagagagccaccgctatcctggcctatctgcctcaggagctcctgggaacatcctgctacgaatactttcaccaagacgatattggccacctggctgaatgtcacagacaggttctccagacccgcgaaaagatcacgacgaactgttataagtttaagattaaggatggatcctttataaccctcaggtcccgatggttctccttcatgaatccatggaccaaggaggtggaatacattgtctctactaataccgtcgtcctggctaacgtgttagaggggggggaccctacatttccacagctgaccgcttccccccactctatggactcgatgctgccttctggtgaaggtgggccaaaacgcactcatccaactgtgcccggcatccctggaggcacaagagctggggccggcaaaatcggtcgcatgatcgccgaggaaattatggaaatacaccgcatccggggatcttctccaagcagctgcggcagctctcccctgaacataacaagtacacctccccctgatgcttcatcccccggcggtaaaaagattctgaacgggggtacaccagacattccgagctccggtcttctttccggccaagcccaagaaaatccaggttacccctattcagattcaagcagcatactgggggagaatcctcacatcggaatcgacatgatcgacaatgaccagggcagtagttctccaagcaatgacgaggccgcaatggccgtaatcatgtctctactggaggcagacgccgggcttggcggacctgttgacttttccgatctgccctggcctctgtag

SEQ ID NO: 13881 - DNA, 1527 bp, synthetic construct
  misc_feature 1..1527: note = Description of Artificial Sequence: Synthetic coding sequence
  source 1..1527: mol_type = other DNA
atggccgatcagagaatggacatatccagcactatttcagatttcatgtccccaggccccacagatctgctgtcgtcttccctgggaacctctggtgtcgattgcaatagaaaacgtaagggaagctcaacagattaccaggagagcatggatacggataaggatgatccccacgggcgactggagtacaccgagcatcaaggtcgtattaagaatgctcgggaagcacactcccagatagagaaaagaagacgagataaaatgaacagctttatcgacgaactggcctccctagtgcctacctgcaacgcaatgtcacgcaagctcgataaactgacagtattgcgaatggccgtgcagcacatgaaaacactgcgaggcgcaaccaacccttacacggaggccaactataagcctacctttttaagcgacgacgaactgaaacacctgattcttagagctgccgatggatttctgttcgtcgtgggctgcgaccgcggcaagatcctgttcgtaagtgagagcgtgttcaagattctaaactattcacagaatgatctgattggacagtctctcttcgattatttgcatcctaaggacatcgccaaggtaaaggaacaactgagctctagcgataccgccccccgtgaaaggttgatcgatgccaagaccgggcttcccgtcaaaaccgacataacccccggtccatcaaggctgtgcagcggagccaggcgcagctttttctgccgaatgaagtgtaatcggccatcagtcaaagtggaagacaaggacttcccctccacctgcagcaagaagaaagtgctgcagacccgcgagaaaattaccaccaactgctacaagttcaagattaaggacggatcatttattacccttagatctagatggttttcatttatgaacccatggactaaagaagtggagtatatcgtgtccacaaacactgttgtcctggccaacgtgctcgagggaggggacccaacattccctcaactcaccgcctctccccactccatggactcaatgctgccctcaggagaaggaggtcctaagagaacgcatcctactgtcccaggtataccgggcggtacgcgggctggggccgggaaaatcggcagaatgatagccgaggaaatcatggagatccaccggattcgcggctcttccccatccagctgtggctcctcccctcttaatattacatccaccccacctcctgatgcgtcatcaccgggcggtaagaagatcctgaacggcgggacccccgacattcctagctctgggctcttaagtgggcaggctcaagaaaacccaggatacccttactcagatagctcatccattctgggggagaacccacacattggcatagacatgattgataacgatcaggggagttcttctccgagtaacgatgaggccgccatggccgtgattatgtcactgctggaagctgacgccggtctgggaggccccgtggatttcagcgacctgccatggcctttatag

SEQ ID NO: 13882 - DNA, 1878 bp, synthetic construct
  misc_feature 1..1878: note = Description of Artificial Sequence: Synthetic coding sequence
  source 1..1878: mol_type = other DNA
atggctgaccagagaatggatatttcatctacaatatcagactttatgtctccaggcccaacggatctgctgtcgagttctcttggcacctctggcgtcgactgcaacaggaaaagaaagggttcttccaccgactaccaggaatctatggatacggataaggacgaccctcatggacggctggagtacacagaacatcaaggtcggattaagaacgctcgggaggcccacagtcaaattgagaaacgcagacgtgataagatgaactcattcatcgatgaattggctagtctggtcccgacttgtaatgctatgagccgcaagctcgataagcttacagttcttagaatggctgtgcagcacatgaaaactttacggggagctaccaatccttacacggaggctaactacaaacctaccttcttatctgacgacgaactcaaacatcttattctcagagccgccgatgggtttctcttcgtcgtgggatgtgacaggggcaaaatcctgttcgtgagcgagtccgtgtttaagatcctgaactatagtcaaaacgatcttatcggacagtcacttttcgattatcttcaccctaaagacatcgccaaagttaaagaacagctgagttccagtgacacagcgccccgcgagaggctcattgatgccaagaccgggctccctgttaaaactgacattacgcctgggccctcccggttatgtagtggtgctcgcagaagttttttctgccgaatgaagtgcaacagaccctccgtgaaagttgaagataaagattttccttcaacgtgctccaaaaagaaagaccgcaaaagtttctgtactatccattcaacgggatacttaaagtcctggccccctacaaagatgggcttggacgaagacaatgaacctgacaatgaaggttgcaatctttcatgcctggtagcgatcggccgcttgcattctcacgtggttccacagccagtgaacggggagatccgggtgaagtcaatggaatacgtgtcccgacacgccattgatgggaagtttgtgttcgtggaccagagggccacagcaatcctcgcatatctgcctcaggagctgctgggaacatcatgctatgagtacttccaccaggacgacatcggtcacctggccgagtgccaccgacaggtgctgcagacccgcgaaaaaataacgactaattgttacaagttcaagattaaagatgggtcattcatcactctgcgcagtcgctggtttagcttcatgaacccatggacgaaagaggtcgagtatattgtttccacaaatactgtggtactcgctaacgtgttggaggggggcgatcctactttccctcagcttaccgcttctccccactctatggattctatgctcccttcaggagaaggtggaccgaaaaggacccaccccacagtgcctggcatcccagggggcacccgggcaggtgccggaaaaattggaagaatgattgcggaggagatcatggagatacacagaattcggggctcttccccaagcagctgcgggtccagcccgcttaacattacatcaacccctccccctgacgcatcctcccccggtggcaaaaagatccttaatggagggactcccgatattcctagtagcggcttgctcagtggacaggcccaagaaaatcccgggtatccctattctgattcttcatctatcctgggggaaaaccctcatatcggtatcgatatgatagataatgatcagggtagtagcagcccgtctaatgacgaggccgccatggccgtgataatgagccttctagaggccgatgcaggacttggggggcccgtcgatttcagcgacctcccctggccactctag

SEQ ID NO: 13883 - DNA, 1581 bp, synthetic construct
  misc_feature 1..1581: note = Description of Artificial Sequence: Synthetic coding sequence
  source 1..1581: mol_type = other DNA
atggccgaccagaggatggacatctcctccacgattagtgacttcatgtcccctggccccaccgacctgctgtctagctcactgggaacctctggcgtggactgtaatagaaagcggaaggggagcagtaccgactaccaggaatctatggataccgacaaggacgacccccacggcagacttgagtatactgagcaccaggggcggatcaaaaacgccagggaagcccactcacaaatcgagaagaggaggcgggataagatgaacagctttatcgacgagctggcctccctggtgccaacgtgcaatgccatgtccagaaaactggacaaattgacagtcttgagaatggcggtgcagcacatgaagaccctgcggggagctactaacccctacactgaggccaactacaagcctacgttcttaagcgatgacgaactgaagcacctgatactgcgcgctgcagacggcttcctgtttgtcgttggatgcgacaggggtaagattctcttcgtctctgagagcgtcttcaagattctcaattactctcagaacgatttgatcggccagtcactgtttgactacctgcacccaaaggatatcgccaaggtcaaggaacagctgagctcaagcgataccgccccccgggagcggctgattgatgcaaagactggccttccagtgaaaaccgacattacaccaggccctagtaggttatgcagcggagctcgacggtcatttttttgccgaatgaagtgtaaccggccctccgttaaagtggaggataaagacttcccatctacctgcagcaagaaaaaggccgaccgcaagtcgttttgtaccattcattcaacaggttatctaaaatcatggcctcccacaaaaatgggactcgacgaagacaacgaaccagacaacgagggatgtaacctctcctgccttgtcgcgattggtcgcctacattcccatgtagtcccccaacctgttaatggggagatcagggtgaaatcaatggaatatgtctcccggcacgccattgatggtaagttcgtgttcgtggatcaacgtgcaaccgccatactggcctacttgccccaagagctgctgggaacatcatgttacgaatactttcaccaagatgatatcgggcacttggccgaatgtcacaggcaggtcctccagacgcgcgagaaaatcactactaattgttacaaattcaagattaaggacggctcatttattactttgcgctccaggtggttttcattcatgaacccatggaccaaagaagtggagtacatcgttagcacaaataccgtcgtgttgtcgagagtggacacggggcatttaggacaggtcgagtggtgtactgtgctctcacgcccagatagtcgttttttgatcgccggcatgtttactgaacccacctcatggaaggccggtacccaaccgtcacactctagtcagcaccctccgacagcatggacggcatgctgtcctttggagaaggtggctcagagaggacccaccccgctgttccagggctttcaaggtgaaccaggactagggcaggagaagtag

SEQ ID NO: 13884 - DNA, 1878 bp, synthetic construct
  misc_feature 1..1878: note = Description of Artificial Sequence: Synthetic coding sequence
  source 1..1878: mol_type = other DNA
atggcagatcagcgaatggatatatcttccacaatctccgactttatgtcacccggtccgacagacctcctctcctcttccctgggaaccagtggagtggattgtaatcggaagagaaagggaagtagcactgactaccaggaaagcatggacactgacaaggacgaccctcatggacggctcgagtatacggagcatcaaggtcggatcaaaaatgctcgggaagcccatagccagatcgaaaagcggaggagggacaaaatgaactcctttatcgatgagcttgctagtctagttcccacatgtaatgccatgtccagaaaattagataaattaaccgtgctacgcatggccgtgcagcacatgaaaactctgcgaggagctacgaatccgtataccgaggctaactacaagcccacattcctgagtgacgacgaactgaaacatttgatcctgcgcgccgcagacggcttcctgttcgttgtcggatgcgacaggggcaaaatcctgtttgtgagtgagtcagttttcaagatcctcaactattcccaaaacgacctgatcgggcaatccctatttgactacttgcacccaaaagatattgcaaaagtcaaagagcaattgtcttcgagcgacaccgccccgagggaacgactgatcgatgctaaaaccgggttaccagtgaagactgacattacccccgggccgagccggctgtgcagcggcgcccggagatcttttttttgccgcatgaaatgcaatcgcccatcggtgaaagtggaggacaaagatttccccagcacatgcagcaaaaagaaggataggaagtctttttgtaccattcattcaaccggatacctgaagtcttggcctccgaccaaaatgggactcgacgaggacaatgaacctgacaatgagggctgtaatttgtcctgcctcgtggctataggccgcttacatagccacgtagtcccccagcccgtcaatggggaaatccgcgttaagagcatggagtatgttagtcgacacgcaatcgacggtaagtttgtctttgtggaccaacgggccaccgctatcttggcatacctgccacaggagctgctgggcacgtcatgctacgagtactttcatcaagatgatattggccacttggccgaatgtcaccggcaggtcttgcagaccagagagaagataacaaccaactgttacaaatttaagatcaaagatgggtccttcatcacactgcgaagtcgatggttttctttcatgaatccatggacaaaggaggttgagtatatcgtgagcacaaatacggtggtgctggctaacgtgctggagggtggtgatccaaccttcccccaactaacagcctccccccacagcatggactccatgctgcctagtggagagggcggcccaaagcggacccacccgactgttcccggaattcccggcggaacgcgcgcaggcgccggtaagataggtcgcatgatcgccgaggagattatggaaattcaccgcataagggggtcttccccatcttcatgcgggagctcacccctgaatataacgtccacacctcctcccgatgcatctagccctggaggcaagaagattctgaacggtggtacccccgacatccccagttctgggctgctctcaggacaggcccaggagaatcccggctatccgtactctgactctagcagcatcttaggcgaaaacccacacatcgggattgacatgatcgataatgaccagggcagttcatccccttctaacgacgaggccgcgatggccgtgatcatgagtctgttggaggcagacgctggcctggggggccctgtagactttagcgatctaccttggccactatag

SEQ ID NO: 13885 - DNA, 1752 bp, synthetic construct
  misc_feature 1..1752: note = Description of Artificial Sequence: Synthetic coding sequence
  source 1..1752: mol_type = other DNA
atgattaacatcgagagtatggacaccgataaagatgatccccatggtagattggagtacaccgaacatcagggcagaattaagaatgcgagagaggcccacagtcagatcgaaaaacgacgtcgcgataagatgaattcgttcatagacgagcttgcttccctcgttcctacatgtaatgccatgagcagaaaactggataaactcacagtcctgcggatggccgtacagcacatgaagaccctcagaggagccacaaatccatacaccgaggccaattacaaacctacatttctttccgatgacgagttaaagcacctcattctaagggccgctgacggattcctgtttgtggtaggttgcgatcggggtaagatcttgtttgtgagcgagtctgttttcaagatactgaactattcacagaacgacttgattggccaaagcctcttcgactacctacatcccaaagacatcgccaaggtgaaagagcaactctcgtcttcggacactgctccccgggaacggttgatagacgctaaaactggcctccctgtaaagactgacattactcccggcccttcacgactttgttccggtgctcgccgatcctttttttgtaggatgaagtgcaaccggccctctgtcaaggtggaagacaaggactttcccagtacctgtagcaaaaaaaaggccgacaggaagtctttttgtactattcactcaactggatatctaaaaagttggccacctactaaaatgggcctcgatgaagacaacgagcctgacaacgagggctgtaatctgagttgcttggtagccatcggaagactccacagccatgtggtgccccagcccgtcaacggagaaatacgggttaaaagtatggaatacgtgagccggcatgctattgatggtaaattcgtgttcgtggatcagagagccactgccattctggcttacctgccacaggagttgctgggtacctcttgctatgaatactttcaccaggatgacattgggcatttggccgaatgtcatagacaggtgctgcagacccgggagaagattactacaaactgctataaatttaagatcaaggacgggagtttcatcaccctgcgttctaggtggttttccttcatgaatccttggaccaaggaagtggagtacattgtatcaactaatacggtcgttctcgcgaacgtactggagggtggcgaccctactttcccccaattgacagcatcaccccacagcatggactctatgctgccatccggggagggcggccctaaaagaacccaccctaccgtccctggcatcccggggggcacacgggccggggctggcaagatagggaggatgattgcagaggaaatcatggaaattcatagaatccgtggatcttcaccatcaagctgtggatcaagtccattgaacattaccagtactccgccccctgacgcgtcctccccaggagggaagaagatcttaaatggaggaacaccagatatccctagcagtggccttctctcgggccaggcccaggagaaccccggctacccttacagtgattctagctcaattctaggtgagaacccccatattggcatcgacatgatcgataacgatcaaggtagctccagcccctctaatgatgaggctgcaatggccgtgatcatgagtttgcttgaagctgatgctgggctgggaggaccagtggacttctcagacctcccctggccactctag

SEQ ID NO: 13886 - DNA, 1881 bp, synthetic construct
  misc_feature 1..1881: note = Description of Artificial Sequence: Synthetic coding sequence
  source 1..1881: mol_type = other DNA
atggccgatcagcgcatggacatcagtagcactatatcagattttatgtctccaggacccacagacctgctctcctccagccttggcacttcgggtgtagactgcaataggaagcgcaaaggtagcagcacggattatcaggaatcaatggacacagacaaagatgatccgcacgggaggctggagtataccgagcatcagggtagaataaagaacgctagggaagcccacagccagatagagaagcgacggcgcgataagatgaacagctttattgatgagctagccagtctggtcccaacatgtaatgctatgtccagaaaactcgacaaattgaccgtactccggatggcagtgcagcatatgaaaacactgcggggggcaacaaatccatacaccgaggccaattacaagcctacgtttttgtcagacgatgaactaaaacaccttatcctgagagctgccgacggcttcctgtttgtagtgggatgtgatcggggcaagattttgtttgtaagcgaaagcgtattcaaaattttaaattactctcagaatgacctcatcgggcagtcactcttcgactacttgcacccaaaggatatcgccaaagtgaaggagcagctgagttctagcgacactgcccctcgcgagcgcctcattgatgccaaaactggcttgcctgttaagaccgatatcacacctgggccctcccgcctttgttccggtgcgagacgcagctttttttgcaggatgaaatgtaaccggcccagcgttaaggttgaggataaggattttccaagtacctgctcgaagaagaaggcggaccggaagagcttctgtacaatacatagcacgggatatctgaaaagttggccccctacaaaaatggggttagacgaggacaacgagccagataatgaaggatgtaatctctcctgtctcgtcgccatcggcaggctacattcacacgtagtgccccaaccagttaacggagaaatcagggtcaaaagcatggaatatgtgtctagacacgcaattgacggaaagtttgtattcgtggatcagcgtgctaccgccatcttggcttatttacctcaagagctgctcggcacatcttgttatgagtacttccaccaggacgacattgggcatctggctgaatgtcacaggcaggtgctccagacgagagagaaaataacaaccaactgttacaagttcaagattaaggacggtagtttcattactctgaggagccggtggttttctttcatgaacccgtggactaaggaggtggagtatattgtgtcaaccaatactgttgtccttgccaatgttctagagggcggggatcctacgttcccacaattgaccgcatctccgcattccatggatagtatgctgcctagcggcgaggggggccctaagcggacccacccgaccgttcctgggatcccaggtggcacccgcgctggggctggaaaaattgggcgaatgatcgcagaggaaataatggagattcacagaatcaggggatcgtcccccagcagttgcggatcaagcccccttaacatcaccagcacaccaccccctgacgccagcagtcctggcggcaaaaagatcctaaatggtggaaccccagacattccttcgtccggcctgctgagcggacaggcccaggagaatccagggtatccctattctgacagctccagcatcctgggagagaacccacacatcggtatagacatgatcgacaacgatcagggctcatccagcccttctaacgatgaggccgcaatggccgtgatcatgtcgctgctcgaagctgacgcaggtctgggagggccggtggacttcagtgatctgccgtggcccctttag

SEQ ID NO: 13887 - DNA, 1749 bp, synthetic construct
  misc_feature 1..1749: note = Description of Artificial Sequence: Synthetic coding sequence
  source 1..1749: mol_type = other DNA
atgataaatatagagagtatggataccgataaggatgatcctcacggacgcctggagtacacagagcaccagggccgcattaaaaacgctcgcgaggcccactcccaaattgaaaagcgcagacgggataagatgaattcatttatcgacgaactggctagtcttgtgccaacgtgcaatgcaatgtctcgaaaactagacaagttaactgtgctacgcatggcggtacagcacatgaaaacactgcgtggtgcaactaatccatatacggaagccaactacaaaccaactttcctgtcggatgacgaactcaaacacctcatcctgcgggccgccgatggcttcctctttgtggtggggtgcgaccgcggcaagatcctgtttgtgtcagaatctgttttcaagatcctcaattattctcagaacgatcttatagggcagtcactgtttgattacctgcaccccaaagatattgccaaagtgaaggaacaactgagttcttctgatacagcccctagggagcgcttgatcgacgcaaaaaccgggttacccgtgaaaaccgatatcactcctggcccgagccgactttgctctggagcccggaggagttttttctgccgcatgaaatgcaaccggccttccgttaaagtagaggacaaagacttcccctcaacctgctctaaaaagaaggacagaaaatctttttgcacgattcactcaaccggctacctgaaatcctggccacccacaaagatgggcctcgatgaggataatgagcccgataatgaaggctgtaacctgagttgcttagtggctattggccgactacactctcatgtggtaccccagcctgttaatggagagatccgagtaaagtctatggaatacgtttcaaggcacgctatagacggcaagttcgtctttgtcgaccaacgtgccaccgccatcttagcctacctgcctcaagaactcttgggcaccagctgctacgaatacttccatcaggacgatattggacatctggctgagtgtcatcgccaagttcttcagactcgcgagaagattactacgaattgttacaagttcaagattaaagatggctcgttcatcaccctgcgcagccgctggttctctttcatgaacccttggacgaaagaggtcgaatacattgtttccactaatactgtggtgttggccaatgtgctcgaaggtggggatccaacatttccccaattgactgcctcaccacactccatggattccatgctgcctagtggagaaggcggtcccaaacggactcaccctactgtgcctggcatcccaggcggaacccgcgcaggagctggcaagattggccgcatgatcgcggaggagatcatggagatccataggattaggggtagttcaccttcctcctgcggatcctccccattgaacattacttctaccccaccccccgacgctagctcgccggggggcaagaagatcctcaacgggggcactccggacataccgtcgtccgggctcctaagtggacaggctcaggagaatccgggttacccttattccgacagtagctccattctaggagaaaatccacacatagggatcgacatgatagacaatgaccaaggttcttctagtccgtccaacgatgaggccgcgatggccgtgattatgtcactgctggaggccgacgctggcctcggggggcccgtggatttctcagatttgccatggccactgtag

SEQ ID NO: 13888 - DNA, 219 bp, synthetic construct
  misc_feature 1..219: note = Description of Artificial Sequence: Synthetic coding sequence
  source 1..219: mol_type = other DNA
atgattaatattgaatctatggacaccgacaaggatgatccccacggccgtctggagtacaccgagcaccaaggcaggattaaaaacgccagagaggcgcattcgcaaatcgagaagaggagaagggacaaaatgaattctttcatcgatgagctggcttcattggtgccaacctgcaacgctatgagccggaagcttgataaattaaccgtcctatag

SEQ ID NO: 13889 - DNA, 231 bp, synthetic construct
  misc_feature 1..231: note = Description of Artificial Sequence: Synthetic coding sequence
  source 1..231: mol_type = other DNA
atggccgatcaaaggatggacattagttccacaatctccgacttcatgagccctggtccaacagatttactaagctcctcccttggcacctccggcgtggattgcaacaggaaaaggaagggcagctccactgactatcaggaatccatggataccgataaagatgaccctcatggtcggctcgagtacaccgagcatcagggccgcattaaaaacgctcgcgaggcctag

SEQ ID NO: 13890 - DNA, 72 bp, synthetic construct
  misc_feature 1..72: note = Description of Artificial Sequence: Synthetic coding sequence
  source 1..72: mol_type = other DNA
atggcagaccagagaatggacatatccagcaccattagcgatttcatgagccccggtcccacagatctgtag

SEQ ID NO: 13891 - DNA, 408 bp, synthetic construct
  misc_feature 1..408: note = Description of Artificial Sequence: Synthetic coding sequence
  source 1..408: mol_type = other DNA
atggccgatcaaagaatggacatttcttccaccattagcgattttatgagcccgggtcccaccgatctccttagctcttccctagggactagcggcgtggattgcaaccgaaaacggaaaggctcgtccacagattatcaggagagtatggataccgataaggacgatccccacggacggcttgagtacaccgaacaccagggtcgaattaagaatgcaagagaggctcactctcagatcgagaagaggagaagggataagatgaatagctttatcgacgagctggctagcttggtaccaacatgtaatgccatgtcccggaagctcgataagctcaccgtgctcagaatggccgttcagcacatgaagactctgcgtggtgccacaaacccctacaccgaagcctag

SEQ ID NO: 13892 - DNA, 141 bp, synthetic construct
  misc_feature 1..141: note = Description of Artificial Sequence: Synthetic coding sequence
  source 1..141: mol_type = other DNA
atgattaatattgaatccatggatacggacaaggatgacccacacggaagattagaatacacagagcatcaagggcggatcaaaaatgcccgcgaagcacactcacaaatcgaaaaaagacggagagacaagatgaattag

SEQ ID NO: 13893 - DNA, 426 bp, synthetic construct
  misc_feature 1..426: note = Description of Artificial Sequence: Synthetic coding sequence
  source 1..426: mol_type = other DNA
atgattaacatcgaatcaatggacacagacaaggacgacccgcacggacgactggagtacacagagcaccagggccgtattaagaatgcgcgggaggctcacagtcagattgaaaagagacgccgggacaagatgaatagctttatagatgagcttgcttcccttgttccaacatgcaatgccatgagccgtaagctggataagctaactgtgttgcggatggcagttcaacatatgaaaactttgcgcggggccaccaatccctacacagaagccaactataaacccaccttcctgtccgatgacgaactgaagcatcttatcctccgtgcagccgatggcttcctgtttgtcgtcgggtgcgacagggggaagatcctcttcgtttccgagagcgtctttaagatccttaactacagtcagtag

SEQ ID NO: 13894 - DNA, 306 bp, synthetic construct
  misc_feature 1..306: note = Description of Artificial Sequence: Synthetic coding sequence
  source 1..306: mol_type = other DNA
atggcagaccaacgcatggacataagttccacgatttctgactttatgagccccgggcccactgatcttctgagcagcagcttaggcacttctggtgtcgattgcaatcggaagcgtaagggttcaagcacggactatcaggagtccatggacaccgacaaggacgatcctcacgggcgactggagtacaccgagcaccagggcagaattaagaacgctagagaggctcactcacagatcgagaagaggcgcagagacaaaatgaattcattcatcgacgagctcgccagtcttgtgccaacctag

SEQ ID NO: 13895 - DNA, 180 bp, synthetic construct
  misc_feature 1..180: note = Description of Artificial Sequence: Synthetic coding sequence
  source 1..180: mol_type = other DNA
atggccgaccaacgtatggacatttccagcacgatatccgattttatgtccccaggtcctaccgacctgctatccagctcactaggaaccagcggggtagattgcaaccggaagaggaaaggctccagcactgattatcaagagagtatggacaccgacaaagacgatccgcatggatag

SEQ ID NO: 13896 - DNA, 1683 bp, synthetic construct
  misc_feature 1..1683: note = Description of Artificial Sequence: Synthetic coding sequence
  source 1..1683: mol_type = other DNA
atggaacccctgcagcagcagcagcagcagcagcaacagcaacagaaacagccccatttggcccccctgcagatggatgcacgcgaaaagcaaggccagcagatgagggaagcgcaatttttgtatgcccagaagttagtaacccagccgaccctgttgtcagccaccgctggtagaccttctggcagcaccccactcggcccactcgctagggtccccccgaccgccgcagttgcacaggtgttcgaacgcggcaatatgaactctgaaccagaggaagaggacggcgggttagaagacgaagatggagacgatgaggtagccgaagtcgctgagaaggagacccaggcagctagcaagtacttccacgtccagaaggtcgctcgtcaagaccctcgagtcgcaccgatgtccaacctgctccccgcccctggcctgccgccccacgggcagcaggctaaagaggaccacacaaaagatgctagtaaggcctcaccaagtgtgagcacagctggccagccgaattggaacctggacgaacagttgaagcagaacgggggccttgcctggagcgacgatgccgacggcggccggggtagagaaatcagtcgcgactttgctaagctgtatgaattggacggcgacccagaaaggaaagagttcctggatgatctgtttgttttcatgcaaaagcgtggaactcccattaatagaattcccataatggccaaacaaatactagacctgtacatgctgtacaaacttgtgacggagaaagggggcctggtggagattattaacaagaaaatatggagggagataacaaaggggctgaacctgcccacctccattactagtgcagctttcactctcagaactcagtatatgaaatacctgtacgcttatgagtgtgagaagaaagcactctcctcccccgccgagttgcaggccgctattgatggcaatagacgcgagggacgacggccatcttactcttcttcactgtttggctacagtccggccgccgccaccgcagccgctgctgctggcgcccccgctcttctcagcccaccaaagatccgattcccaatactgggcctggggtcctcaagtggcaccaatacgtcttctcctcgcatttctccagccactacactacggaagggcgacggagcgcccgtgacgacagtgccagttcctaataggttggcagtgcctgttactcttgcttcacagcaggctgggactaggacagcagccctggagcaacttagggagagattggagtcaggcgagcctgctgaaaaaaaagcctctagactgtcagaagaggaacagaggctggtacagcaggcgttccaaagaaatttttttagtatggccagacaactcccgatgaagatcagaattaatggtagagaagatagagctgaagcctcagcagccgccctgaatctgactacctcttctataggttcaatcaatatgagtgttgacattgatggtactacctatgccggagttctttttgctcaaaagcccgtggtgcacctgattactgggtctgccccccagtctctgggcagttccgccagctccagcagtagttcccactgcagcccttccccgacctcatccaggggaacaccgagtgccgagccatctaccagctggtctctgtag

SEQ ID NO: 13897 - DNA, 1335 bp, synthetic construct
  misc_feature 1..1335: note = Description of Artificial Sequence: Synthetic coding sequence
  source 1..1335: mol_type = other DNA
atggaaccactccagcaacagcagcaacagcagcaacagcaacagaaacagccccacctcgccccgttgcagatggatgcccgtgagaagcagggccagcaaatgcgagaagctcagttcctgtacgctcagaaactggtcacacagccgacactgctgagcgctacagccggaaggccatccggatccactcccctcggtccgttagctcgggtcccacccacggccgccgttgctcaagttttcgagcgcggcaacatgaacagcgagccagaggaggaggatgggggtctcgaagatgaagatggtgacgatgaagtggccgaagtcgcggagaaagagactcaggccgccagtaagtacttccacgtccagaaagtcgcaaggcaggaccccagagtggctcccatgtccaatctgctcccggcccccgggctgccgccccacggccagcaggcaaaggaggatcacacaaaggatgcatccaaggcttccccctctgtgtcaactgccggccagcctaactggaaccttgacgaacagctaaagcagaatggggggctggcatggtccgatgacgccgacggcggcaggggcagagaaatcagcagagattttgccaagctctacgagttggacggggaccctgagagaaaagaattcttggatgacctttttgtctttatgcagaagcgtggcacacctatcaatcgaatcccgattatggcaaagcagattctggatctgtatatgctctataagctcgtcactgaaaaaggcggcttagttgagattattaataagaaaatttggagagaaatcaccaaggggcttaacctgcccacaagtataacaagcgctgccttcactttgagaacacaatacatgaaatacctgtatgcctacgagtgcgaaaagaaagcactttcaagccctgctgagcttcaggccgcgatagacggcaaccgacgggagggacgccggcccagctactctagcagtctgttcggctattccccggcagctgccaccgccgccgcagctgctggtgctccagccttgttgtcaccaccaaaaattcgctttccaatacttggattaggctcgtcctcaggcacaaatacctcaagccctaggatctctccagcaacaaccctccgcaagggcgatggtgccccagtcacgacagtccctgtgcctaacagactcgcagtacccgtcactctggcctcccaacaggctggaaccagaacagccgccctggagcaactaagggaacggcttgaaagtggtgagcctgcagaaaaaaaagcttcggggacttggtgccaatag

SEQ ID NO: 13898 - DNA, 1413 bp, synthetic construct
  misc_feature 1..1413: note = Description of Artificial Sequence: Synthetic coding sequence
  source 1..1413: mol_type = other DNA
atggagccattgcaacagcagcaacagcaacagcagcagcagcagaagcaaccccacctcgcccctcttcagatggacgctagagagaagcagggacagcagatgagagaggcacagttcctttacgcccaaaagctcgtaacccagccaacgttactgtccgccaccgcaggcagaccctctgggtccacacccctgggccctctggcgcgggtgccgcccactgctgctgtggctcaggtgtttgaaaggggtaacatgaatagcgaacccgaagaggaagatggggggctcgaggatgaggacggtgacgatgaggtggcagaggttgctgaaaaggaaactcaagcagccagcaagtatttccatgttcagaaggtcgcgaggcaggacccacgggtggcacccatgagcaacttgctcccggcacctggcttgccccctcatggccagcaggcaaaggaagaccatactaaagacgcttccaaagccagcccttccgtgtctaccgccggccagcccaattggaatctggatgagcaactgaagcagaacggtgggttagcatggtctgacgacgcggacgggggaaggggccgcgagatttcccgcgacttcgctaaactttatgaactcgacggagatccagaaagaaaagaatttcttgatgacctctttgtgttcatgcagaaaagagggaccccaatcaaccggatccctattatggccaaacagatcctggacctttatatgctgtacaaattggtcactgagaagggagggctcgtggagattataaataaaaagatatggcgggagattacaaagggtctgaatctgcccaccagtattacttccgcagccttcacattgagaactcagtatatgaaatacttatatgcatatgaatgtgaaaagaaagctttatcttccccagcagaactgcaggcagcaattgacggcaacagaagggagggcagaaggccctcttacagttcgtcactttttggctattcccccgcagccgctacagccgcggcagcggccggcgctccggctcttttatcaccccccaaaatcaggtttccgatccttggactcggtagctcttccggcaccaacacttcatcacctagaatttcccctgctactaccctgcgtaagggtgacggggcccccgtcacaaccgtacccgtgccaaacaggctggccgtccctgtaaccttggcgtcacagcaggccggcactagaactgcggccctggagcagctgcgagagcgactggagtccggagagccagcggagaaaaaggcctctagactcagcgaggaagagcaaagactggtgcagcaggcgtttcagcgtaacttcttcagcatggccagacaactgtctatcctctacgtgttctag

SEQ ID NO: 13899 - DNA, 7935 bp, synthetic construct
  misc_feature 1..7935: note = Description of Artificial Sequence: Synthetic coding sequence
  source 1..7935: mol_type = other DNA
atgggtgagcacgggctcgagctggctagtatgattcccgccttgcgtgagctggggtcagccaccccagaagagtacaacaccgtcgtgcagaaaccccggcagattctctgccaattcattgaccggatactcactgatgtgaacgtggtcgctgtcgagttagtgaagaaaacagattctcaacccacatcagtcatgctgctggactttattcagcacatcatgaagagctcccccttgatgtttgtgaatgtcagtgggtctcatgaggccaaagggtcctgtatcgaattcagtaactggatcattacaaggctgctgcgcatcgccgcaacaccttcttgtcacctgttacacaagaagatatgtgaagtgatctgtagcctcctcttcctgtttaaaagcaagtctccggcaatttttggcgtgctcaccaaagaactgcttcagctctttgaggaccttgtctatctccacagacggaacgttatggggcacgcagtggagtggccagtggttatgagtcggttcctctctcagctagatgagcacatgggctacttgcaatccgcaccattacagctcatgtctatgcaaaacttggaattcatcgaggtcaccctcttaatggttctcacacgcataatcgcgattgtgtttttccggcgccaggaattgctgttgtggcagatagggtgtgtgcttttggaatacggaagccccaagatcaagtccctggctatttctttccttacagagttattccagctgggcggtttgccggctcagcccgctagcacctttttctcctccttcctggaattactgaagcaccttgtggagatggacaccgaccaattgaaactctacgaggagccactgagcaaactcattaagaccctatttccattcgaagcggaagcatatcgtaatatcgaaccggtgtacctaaacatgttactcgaaaaattgtgtgttatgtttgaagatggcgtcctgatgcgcttgaagagcgatctgctgaaggccgctttgtgtcacctgctgcaatacttcctaaaattcgtacccgccgggtatgagtctgctctgcaggttcgaaaggtgtatgtgcgcaacatttgcaaggctctgctagatgtccttggcatcgaggtggacgcagagtacctgttgggacccctatacgccgccctcaaaatggagtcaatggaaattatagaagagatccaatgtcagacacagcaagaaaatctgagcagcaactcagacggtatatcccctaaaaggcgtaggctttccagctccctgaatccaagtaagcgcgccccaaagcagaccgaagagatcaagcatgtggacatgaaccagaaaagcatactttggtccgccctgaagcagaaggctgagagcctgcagatctctctcgaatactccgggctgaaaaatcccgtgattgagatgttagaaggtattgccgtagtactgcaactcaccgctctttgcaccgtacattgttcccatcagaacatgaattgccgcacctttaaagactgtcaacacaaatctaaaaaaaagccctcagtggtaatcacctggatgtcacttgatttttataccaaagttctcaagtcctgtaggtccctgctggaatctgttcagaagctggatctggaggccaccatcgataaggtggttaagatctatgacgctctgatctatatgcaggtgaatagctcattcgaggaccacatcctcgaagatctctgtggtatgctgtctttgccttggatttactctcactctgacgacggctgccttaagctgaccactttcgccgctaacctgctaacactcagctgcaggattagcgacagctattcgccccaggctcagtcacggtgcgtcttcctgctcactctgttccctcgaaggatttttctggagtggagaactgcagtctacaattgggctctccagagttcacacgaagttatccgagctagctgtgtatccggattctttattctgctgcagcagcagaattcctgtaaccgggtgcccaagatcctgatcgataaggtcaaggacgatagtgatatagtgaagaaagaatttgcatctatcctgggacaattagtgtgcaccttacacggaatgttctatctaacgtctagccttacagagccgttttccgagcatggacatgtggatttattctgtagaaacctgaaggcaaccagccaacatgaatgctcttcaagccagctgaaagcctccgtatgcaagccgtttctgtttttgctgaaaaagaagatcccttcccccgtgaagcttgcgttcatcgataacctacatcatttgtgtaaacacctagattttcgggaggacgagaccgacgtgaaagccgtgctggggacactcctgaatctaatggaagacccggataaagacgtgagagtcgctttctccggtaacatcaagcacattttggagagcctggactccgaagatgggtttatcaaagaactttttgtgcttaggatgaaggaggcctacacacatgcccagatttctaggaacaatgagctgaaagacacactaattttgactacgggcgacatcggccgggccgctaaaggtgaccttgtaccattcgcgctccttcacctgctgcactgcctactttctaaaagtgcctccgtcagtggcgcagcctacactgagatcagagcgttagtggccgcgaaaagtgtaaagctccagtcgttttttagtcagtacaagaagcccatatgccagtttttggtggagagcctgcattcatcccagatgacagctctgcccaataccccctgtcaaaatgcagatgtaaggaaacaggacgtggctcatcagcgagaaatggctctgaacactctatctgaaattgccaatgtgtttgactttcctgacctcaatagattcctaaccaggacgttgcaggtgctcctgcccgaccttgctgccaaagcctctcctgctgcatcagcattaataagaacacttggtaaacagttgaacgtgaatcgcagagagatcctaattaataattttaagtacatctttagtcacctggtgtgttcctgctccaaggacgagcttgagcgcgccctgcattatctgaagaacgaaactgaaatcgagctggggagcctcttgcggcaggacttccaaggtctacacaacgagctcctgctcagaattggcgagcattaccagcaggtgttcaatgggctgagcatactggccagcttcgccagttctgatgacccataccaggggccaagagacattataagccccgagctgatggccgactatctccaacccaagctcttgggaatcttagctttctttaatatgcagctgctaagttcttccgtgggcattgaggataagaaaatggctctaaacagcctcatgtccttaatgaagttgatggggcccaagcacgtgagctctgttcgagtgaagatgatgacaacccttagaacagggttgagatttaaggatgacttccccgaattgtgttgtagggcctgggactgctttgtcagatgtttagaccatgcgtgcctcggttctcttcttagtcatgtcatcgtggcattgttgcctctgattcacattcagcctaaggagaccgcggctatcttccattacttaattattgagaatagggatgccgttcaggactttctacatgaaatatattttctccctgatcacccagagttgaaaaagattaaagcagtactgcaggagtatcgcaaggagacttccgagagtacggacctgcagactaccctccaactgtcaatgaaggccattcaacatgagaatgttgacgtcagaatacacgcactgacttcacttaaagagacattgtacaaaaatcaggagaaactgataaagtatgcgacggactcagaaacggtcgaacctattattagccaattagtgactgtactcctgaagggctgccaggacgcaaattctcaggccagactcctttgcggcgaatgtttgggagagcttggggccatcgatccaggtagattggatttcagtactacagagacccaggggaaggatttcaccttcgtaacgggcgtggaggactccagctttgcctacggcttattgatggagcttactcgggcatacttggcctacgccgacaattcacgcgctcaggattcagcagcatacgctattcaggagctgctgagcatttatgattgtagggaaatggagactaacggcccaggccaccagctttggaggcggtttccagagcatgtgcgcgaaatcctggaacctcacctgaacacccgctacaaatcctcccagaagagcacagattggtctggtgtgaaaaagccaatttacctgtccaagctgggaagcaactttgcagagtggtcagccagctgggcaggctatctcatcaccaaggtcaggcacgatctcgcgtccaaaatctttacttgctgttccattatgatgaaacacgatttcaaagtgacgatttacctgttgccccatattctcgtctatgtactcctcggctgtaatcaagaagatcagcaagaagtttacgctgaaatcatggcagtgcttaaacatgacgatcagcacacgatcaatacacaggatattgcgtccgatctttgtcagttatccacccagacagttttctccatgctcgatcacttgacacagtgggctcgccataagttccaggccctcaaggctgaaaagtgccctcacagcaaatcgaaccggaataaagtggactcaatggtttccactgtggactatgaggactatcaatctgtaacacggtttcttgacctgatccctcaggataccctggcagtggcctcgtttcgtagtaaagcatacactagggcagtaatgcacttcgagagctttattacagaaaagaaacagaacatacaggaacatctcggcttcctccagaagctgtacgctgctatgcacgagccggacggagtggcaggggtctctgctatccgcaaagcagagccatcactgaaggaacagatattagaacacgagtcattgggattattaagagatgccacggcgtgttacgacagagcgattcagttggaacctgatcagatcattcattaccacggcgtggtgaagtcaatgttgggcttgggtcagctttctactgtgatcacacaagttaacggcgttcatgctaaccgcagcgagtggacagacgagttaaatacataccgcgtcgaagctgcttggaagctctcacagtgggatctcgttgagaattatctagccgcagatgggaagagcacaacttggtccgtcagattagggcagttgctactctctgccaagaagcgcgatataaccgctttctatgacagcctgaagctggtgcgagccgagcagattgtgcccctctcagccgcgtcgttcgaacggggaagctaccagaggggttatgagtacatcgtaaggctacacatgctgtgtgaactcgaacacagtataaaacccctatttcagcacagccccggggatagctcccaggaggactcactcaactgggttgcgcgcttagagatgactcagaattcataccgcgctaaagagcctattctcgccctgcgcagggctcttctgtctttaaataaaagacctgattataatgagatggtgggggagtgttggctgcaatcagccagggtcgcacggaaggctgggcatcaccaaacggcatacaatgctttgcttaatgctggggagtcacgtctggcggagctgtatgtcgaacgggctaagtggttatggagtaagggcgacgtgcatcaggctctcatcgtgctccagaaaggcgtggagctctgtttccctgagaacgaaacacccccggaagggaagaacatgttgatccacgggagggccatgctgctggtggggcggtttatggaggagacggccaatttcgaatctaacgcaattatgaagaagtacaaagatgtgacagcgtgcctccctgaatgggaggacggccatttttatcttgccaaatactatgataagctgatgcctatggtcacagacaataagatggaaaagcagggggatctcatcagatatatcgtgcttcacttcggaaggtcccttcagtatgggaaccagttcatctaccagtcaatgcctcgcatgctcactctttggctcgattatggtacaaaggcctatgagtgggaaaaggccgggaggtctgaccgcgtccagatgcggaatgacttagggaagattaacaaagtgataaccgagcatactaactacctcgcaccttatcagtttctgaccgccttctcgcaactgatttcacgaatctgtcactcacacgacgaggtatttgtggttctgatggaaatcatcgccaaggtcttcctggcttatcctcagcaggccatgtggatgatgaccgcagtgagcaaaagctcttaccccatgcgcgtgaacaggtgtaaggagatcctgaataaagctatacacatgaagaaatctctggagaaatttgtaggtgatgctactcgcctgaccgacaaactcctcgagttatgcaataagcctgtggatggctccagcagtacccttagtatgtcaacccatttcaagatgctgaaaaaacttgtagaagaggctacctttagcgaaattcttatccctttacaaagcgtaatgatacctacactgccttccatcctgggtacccatgcaaaccatgcttcacatgaacctttcccaggacactgggcatatatcgcagggtttgacgatatggtcgagatactcgctagtcttcagaagccaaaaaagatttccctcaaaggctctgacggaaagttctatatcatgatgtgcaagcctaaagacgatctgcgcaaagattgcagactgatggaatttaattcactgatcaacaagtgcctgcgcaaggacgccgagagccgtcgtagagaactgcacatccggacttacgccgtcatcccccttaacgatgagtgcggcatcatcgaatgggtcaacaatacggccgggttaagacctattttgactaagctctataaagagaaaggagtgtacatgacaggcaaagagctgcgacagtgtatgctccccaagagtgctgccctgagtgaaaaacttaaggtttttagggagtttctactgccaaggcacccaccgatattccacgagtggtttttgcgcaccttccccgaccccacttcttggtactcatctcggtctgcatactgccggagcaccgcggtgatgtccatggttggttatatcttgggattaggggaccggcatggcgagaatattctattcgactcactgacaggcgagtgcgttcacgtggactttaattgtttattcaataagggcgagacatttgaggtacctgagatcgtcccatttaggctcactcataacatggtaaacggtatgggacctatggggaccgagggcctctttcggagggcttgcgaggttactatgcgcctgatgcgtgaccagagggaacccctgatgagtgtgctcaagaccttcctgcacgaccccctggtggagtggtcaaaacctgtgaagggacactccaaagctcccctgaacgaaacgggagaggtcgttaacgagaaggccaagacgcacgtcctcgacattgaacaaagactgcagggtgtcattaagacacgcaatcgggttactggacttcctctgtccatagagggacatgtgcactacctcatccaggaagctacagacgaaaatctgttgtgccagatgtacctcggttggactccctacatgtag

SEQ ID NO: 13900 - DNA, 7743 bp, synthetic construct
  misc_feature 1..7743: note = Description of Artificial Sequence: Synthetic coding sequence
  source 1..7743: mol_type = other DNA
atgggggagcacggtctggagctcgcatctatgatacccgctttgagggagcttgggagtgcgacaccggaggaatacaatacagtcgtgcagaagccgagacagatactttgccagttcatagataggattctgacagacgtcaatgttgtcgcagtggagctcgttaagaaaacggacagccagccaacatcggtcatgttactcgatttcattcagcacataatgaaatcttccccactcatgtttgtaaacgtgagtggatcacatgaagctaaaggttcctgtattgaattttcaaattggattataacccgtctcctgcggattgcagccaccccctcctgccatctcttacacaaaaaaatttgcgaagtcatttgtagcctactattcctctttaagagtaagagtcccgccatctttggtgttctcaccaaggagctgctgcaattgttcgaagatctggtgtacctgcatcgaagaaacgtgatgggtcatgcagttgagtggcccgtcgtcatgagtaggttcctgtctcagctggatgagcacatgggctacctgcaatctgctccactacaactcatgtcaatgcagaacctcgagttcatcgaggtaacactcctcatggtgcttacaagaattattgctatcgtcttcttcagacggcaagagctgcttttgtggcagatcgggtgtgtgcttctggagtatggctctccaaagatcaagtctctcgccatctccttcttaacagagctgttccagcttgggggactccctgcacagcccgcatccaccttcttttcgagcttcctggagctgttaaagcatcttgttgagatggatacagaccagttgaaactatacgaagaaccactcagtaagctgataaaaacactgtttcccttcgaagcagaggcatacagaaacatcgagcccgtgtatttgaatatgctcctcgaaaagctgtgcgtgatgtttgaggatggtgttttaatgagacttaagtccgatttgttgaaggccgccctatgtcacctgctccagtacttcctgaaattcgtcccagcagggtatgaatcagcactgcaggtgagaaaggtctacgtccgaaatatttgtaaggccctcctggacgtgctcggcatcgaggtggatgccgagtaccttttgggcccactatatgccgcccttaaaatggagtcaatggagattatcgaggaaatccagtgccagactcagcaggagaacttgtcttcaaacagtgacgggattagccctaaaaggcggcgactctcctcctcgctgaatcccagcaagcgagctccaaaacagacggaagaccggacttttaaagattgtcagcacaagagtaaaaagaagcccagtgtggttataacgtggatgtctctcgacttctatacaaaggtcctgaaatcatgtcgatcgctgctcgagtcagttcaaaagttagacctcgaagccacgattgacaaggtcgtgaaaatctatgacgctctgatctacatgcaggtaaattctagtttcgaggaccacatcttagaagatttatgtggtatgctcagcctaccttggatttactctcactcagacgatggctgcctgaagctcactacctttgccgctaatctgctcacactgtcttgccgtatctcagacagttattcaccccaggcccagtcacgatgtgtctttctgcttacccttttcccacgacgcatattcttggaatggcgcactgccgtctataattgggctctgcagtcttcccacgaggtcatccgggctagctgtgtttctggtttcttcattctcctgcagcagcagaacagttgtaaccgcgtccccaagatattgattgataaagtgaaggacgacagtgacatcgtgaagaaggaattcgcaagcatcctgggccaattggtatgcacacttcatgggatgttttaccttacctcctctcttaccgaacccttttcagagcacggccacgttgatctgttttgtcgcaacttaaaagccacgtcacagcacgaatgttcatcttcccagctgaaggcgagtgtctgcaaacccttcctgtttttacttaagaaaaagatccctagccctgtgaagttagccttcattgataacctccaccatctttgtaagcacctcgacttccgcgaagatgagaccgacgtcaaggcagtgcttggcactctgctgaatctgatggaagaccccgacaaggatgtgcgtgtagcattttcagggaacatcaaacacatcctcgaatctctggattctgaagatggctttattaaggagctgttcgttctgcgtatgaaagaggcatacactcacgcccagatttctcgcaacaacgagctaaaggacacattgatcctcacaactggagacataggccgtgctgccaaaggagacctggtgccgttcgcgctgcttcacctgctacactgcctcttatcaaaatctgcgagtgtatctggagcggcctacacagaaatccgggctctggtcgcagccaagtccgtgaaattgcagagctttttttcacagtacaagaagcccatctgtcagttccttgtcgaatccttgcactcctctcagatgacggcgctgccgaataccccttgtcagaatgccgatgtacgcaaacaggacgtggcacaccagcgggagatggctcttaacaccctcagcgagatagcaaatgtcttcgactttcctgatttgaaccgttttctgacaagaacactgcaggttcttcttcctgatctggccgctaaagcttcccccgctgcctcagcgctgataaggactttgggtaagcagctgaatgtgaataggcgcgagattttgataaacaacttcaagtacattttttcccacttggtgtgtagctgctccaaagacgaactggaaagggcgttacattacttaaagaatgaaacagagatagaattaggctccctcttgaggcaagatttccagggactacacaacgagctgctgttgagaatcggggaacattaccagcaagtgttcaacgggctgagcatactcgcgtcatttgcctctagcgacgatccctaccaggggccaagggacattatttctcctgaactgatggccgattatcttcaacctaagttactgggcattctcgcattttttaacatgcagctgctctccagctccgtggggatcgaggacaagaagatggctctgaattcattaatgtccctaatgaaacttatgggccctaagcacgtctcctcagtgagggtgaagatgatgactacactacggaccgggctcaggtttaaggatgattttcctgaactgtgctgccgggcttgggattgtttcgtccggtgccttgatcatgcttgcttaggaagcttactctcacacgtaattgtcgccctgttaccccttattcacattcaacctaaagagacggcggccatcttccattacctgatcatcgaaaatagagatgccgtgcaggactttctccatgaaatctactttcttcccgaccatccggaactgaaaaagataaaggccgtcctccaagagtacagaaaagagaccagcgagagtacagacctgcagaccacactgcaactatctatgaaggccatacagcatgaaaatgtggatgtgcgcatccatgcactgacatctttaaaagagacactttacaaaaaccaagagaagcttattaagtacgcaacagatagtgagaccgtagaacctatcatcagtcagttggtgacagtgttgcttaaagggtgccaagatgccaacagccaagctagactgttgtgcggtgagtgtctaggagagctgggcgctatcgatcccggccgccttgatttcagtactactgagacacagggaaaggactttacctttgtaaccggggttgaggattctagttttgcctacggtctgcttatggaactgactcgggcgtatttggcgtatgctgacaacagccgcgctcaggattcggctgcttacgccattcaggagcttctgtcaatctatgattgtcgcgagatggaaactaatggccctgggcaccaattatggcggagatttccggagcacgtccgggaaattctggagccacatctgaatactcgttacaagtctagtcagaaaagtacggattggtcgggagtgaaaaaaccgatatatctgtccaaactgggatccaattttgctgaatggagtgcatcatgggccgggtacctcatcacaaaggtaaggcatgatctggcgtccaagatctttacttgctgctctattatgatgaaacatgacttcaaagtcaccatctacctgctcccgcacattctcgtctatgtactcctcggctgtaatcaggaggaccagcaggaggtgtacgccgaaatcatggccgtgctgaaacatgacgatcagcatactatcaacacccaagatatagctagcgatctctgccagctcagcacccagacagtgttcagcatgttagatcacctgactcagtgggcccggcataagtttcaggcgctgaaggcggagaagtgtccgcacagcaagtcaaacaggaacaaggtggattcaatggtttctacagtcgattacgaagactatcaatctgtgacccgctttctcgatctcattccacaggacaccctcgcggttgcgtcttttagaagcaaagcctatacaagagcagtgatgcacttcgaaagctttattactgaaaaaaagcagaatatacaagaacacctgggtttcctgcagaaactgtacgccgcaatgcacgagcctgacggagtcgcgggggtatctgccatcagaaaggccgagccatcactcaaagagcaaatcctggagcatgagtcgttggggctccttcgagacgccacagcttgttacgatcgggcaattcagctagagcctgaccaaattatccactaccacggcgtggttaaaagtatgttggggctggggcaactgagcacagtgatcacacaggtgaacggggtgcacgctaatcgaagtgagtggacagacgagttaaacacttatagggtggaggccgcttggaaactgtctcagtgggacttagtcgagaactacctggctgccgatggaaaaagcaccacctggagtgtacgcttgggacagctccttctgagtgcaaagaagagggacattacagcgttctatgattctctaaaactggtgcgcgccgaacagatcgtgccgctttcagccgctagtttcgagcggggttcctaccagcgtggttatgaatatatcgtgcgcttgcatatgctgtgcgaactcgagcactccattaagcccctatttcagcactctcctggcgatagctcacaagaagacagcctcaattgggtcgcccgccttgagatgactcagaacagttaccgagctaaggagccaatcttagccttacgccgcgcattgctatccctgaataagcgaccagattataacgaaatggtgggggagtgctggcttcaatcagcaagagtggctcgcaaagcagggcatcaccagaccgcttacaacgctttgctgaacgctggcgaatcacgactggcagaactctacgtggagcgcgccaagtggctgtggtccaagggagatgttcaccaggcgctcatcgtcctccagaagggcgtggaactctgctttcccgagaacgagacaccacccgaaggaaagaacatgcttattcacggccgggcgatgctgcttgtcggccgattcatggaggaaaccgccaacttcgagtccaatgcaatcatgaaaaaatataaggatgtgacggcttgtctgccagagtgggaggatggacatttttacctggccaaatactacgacaaactgatgcccatggttactgacaataaaatggaaaaacagggcgatcttattcggtatattgtcctgcacttcggacgctcactgcagtacggcaaccagttcatttatcagtccatgcctcgaatgctgactctctggctggactacggcactaaggcttacgagtgggaaaaggccggtcggagcgaccgggtacaaatgaggaatgatctcggaaaaatcaacaaagtgattactgagcacactaactacctggccccatatcaattcctgaccgcgttttctcagctgatatctcgcatttgtcactctcatgacgaagtttttgtcgtgctgatggagattattgctaaggtatttttggcttacccccagcaggcaatgtggatgatgaccgccgtcagcaagtcgtcttatcctatgcgagtgaacagatgcaaagaaattttgaataaggccatccatatgaaaaagagtttggagaagtttgtgggagatgctactcgattaacggataaacttcttgagctctgtaacaaacctgtggatggctcttcaagtactttgagcatgtcaactcacttcaagatgctgaaaaaactggtcgaggaagcaactttctcggaaatcctgatccctctgcaatcggtgatgatccccaccctgccgtccatattaggaacccatgcgaatcatgcatcacacgaaccatttcctggacactgggcatatatcgccggtttcgacgatatggtggaaatcctggcctcgcttcagaaaccaaaaaaaatttccctgaaaggatccgatgggaagttctatatcatgatgtgcaaaccaaaggatgacctccgaaaggattgtcgacttatggaatttaatagcctgattaacaagtgcctaagaaaggatgcggagtcgcgtcggcgcgaactgcacattagaacttatgctgtaattcccctgaatgacgagtgcggcatcatcgaatgggtcaacaatacagcagggcttcggcccatccttactaagctatataaggagaaaggcgtctacatgactggcaaggagctgaggcagtgtatgctaccaaagtccgccgccctgtctgaaaaattgaaagtctttagggagttcctgttgcctcgccacccccctatattccatgaatggttcctgcggacctttccagacccaacatcttggtattccagccgctcggcctactgccgcagtactgccgtgatgtcaatggtgggatacatcctgggactgggagatcggcacggagagaatatcctgtttgactcactcaccggggagtgtgttcacgtcgacttcaattgcctgttcaataagggggaaaccttcgaagtgccagaaattgtcccctttaggcttacacataatatggtgaatggaatgggcccgatgggaaccgagggcttgttccggcgtgcatgtgaagttactatgagactgatgagagatcagagggagcctctcatgagcgtgctgaagacttttctgcacgaccccttagtcgagtggtctaaacctgtgaagggccactctaaagctccgctgaacgaaactggcgaggtggttaatgagaaagctaagacccatgtgctggacatcgagcaacggctccagggcgtgattaagactcggaaccgggtgacaggtctcccgctgtctattgaaggacatgtgcattatctgatccaggaggctactgacgaaaatctgctgtgccagatgtacctcggatggactccgtatatgtag

SEQ ID NO: 13901 - DNA, 9171 bp, synthetic construct
  misc_feature 1..9171: note = Description of Artificial Sequence: Synthetic coding sequence
  source 1..9171: mol_type = other DNA
atgagtctggtgttgaatgacctgcttatctgttgcagacagctggagcatgacagggcaaccgagcgtaagaaggaggtggaaaaatttaaacgcctgatccgtgacccagagactattaaacatctcgaccgccactccgactctaagcagggcaaatatctgaactgggacgccgtatttagatttttgcaaaagtatatccaaaaggagaccgagtgtttgcgtatcgcaaaaccaaacgtctcagctagtacccaggctagtcgacagaaaaagatgcaggaaattagctcactcgtgaagtattttataaaatgcgctaacagaagggccccgcggcttaagtgccaggagcttctgaactacatcatggacactgtaaaagatagttctaacggcgctatctacggcgccgattgtagcaatatattacttaaagatattttatcagtgcgcaagtactggtgcgagataagtcagcaacaatggctggagctgtttagcgtgtattttagactctatctgaaaccaagccaggatgtgcacagagtgctggtagcccgtatcatccatgcagtgactaaaggatgctgttcgcagactgatggccttaacagcaagtttttggatttcttttcgaaggctattcaatgtgcaaggcaggagaagtcgagcagtgggttgaaccatatcctggctgcactcaccattttccttaagacactggccgttaactttcgaattcgcgtgtgtgagttgggggacgaaattctccccacactgctgtacatctggacacagcacaggttgaatgacagtctcaaagaggtgatcatcgagctcttccaactgcagatctatatacatcaccccaagggcgccaagacacaggaaaagggggcatatgagagcaccaagtggcgtagcattctgtacaacctctatgacctcctcgtgaacgagataagtcatatcggcagcaggggcaagtactcctccggcttcagaaatatcgctgtgaaggagaaccttatagaactgatggcggatatatgtcaccaggtgttcaacgaagacaccaggagcttagagatttcacaaagctatactaccacacagagggaatcctcagactattccgtgccttgtaagcgcaagaaaatcgagcttggctgggaagttattaaagatcacctccagaagtcccaaaatgattttgatctggttccttggctccagatagccacccagctgatcagcaagtatccagcctctctaccgaattgcgagctgtcccccttactgatgatcttatcacaacttctgccacagcagcgccatggtgagcggacaccctacgtgctacgatgtttgactgaagtggccctttgtcaggataaacgaagtaacctagaaagtagccagaaatccgacctgcttaagttgtggaataagatctggtgcatcacttttcgcggcatctctagcgagcaaattcaggccgagaattttggcctgctgggcgcaatcattcagggctctctcgtagaggtagaccgcgaattctggaaactgtttacaggctccgcttgccgtccttcctgccctgcggtgtgttgccttacacttgctctcaccacctctatagtacctggaactgtcaagatggggattgagcagaacatgtgcgaagtcaataggtctttctcactgaaggagagcatcatgaagtggctgcttttttatcaactcgagggggatctggaaaatagcacagaggtgccacccattctccacagtaattttcctcatctggtgcttgaaaagatcttagtcagtttgacaatgaaaaattgcaaagcggcaatgaactttttccagagtgtcccagaatgtgagcaccaccagaaggataaagaggagctaagcttcagcgaggtggaggagctctttctgcaaactacttttgataagatggacttccttacgatcgtgcgcgagtgtggcattgaaaaacaccagagctcaattgggttctctgtgcaccagaatttgaaagagagcctcgacaggtgcttattggggctgtcggagcagttgctcaacaattactcctccgagattacaaactcggagacattggtgcggtgttcacgtttgctggtgggcgtgctaggctgttattgttacatgggcgtcatcgcagaagaggaggcctataagtccgagctgttccaaaaggctaagagtctgatgcaatgcgctggggagagcatcactctgtttaagaacaagactaatgaagagtttcgaatcggatctcttcgaaacatgatgcaattatgcactcgctgcctgtcaaattgtacgaaaaagagccctaataagattgccagtggcttctttcttcgactcctcacgtctaagctcatgaatgacattgctgacatctgcaaatccttggcttcatttatcaaaaaaccattcgatcgcggtgaggtggaaagtatggaagacgataccaacggcaacttgatggaagtggaggatcagagcagtatgaacctattcaacgattaccctgatagcagcgtctccgatgctaacgagcccggggagtctcaaagcactattggggctatcaacccattggccgaggagtacctgtctaagcaagatttgctctttctggatatgctaaaattcctctgcttatgtgtgaccacagctcagactaacacagtgtcatttcgagcagctgatattcggcggaagcttctgatgttaatcgactctagcactctggaacccaccaagagccttcatctacacatgtacctaatgcttctaaaagaattacctggcgaggagtaccccctccccatggaggatgtccttgagctactgaagccactctctaatgtatgctctctgtatcgtcgggatcaggatgtgtgcaaaactatcctgaatcatgttctgcacgttgtcaaaaacctcggacaaagtaatatggattctgagaatacacgtgacgcccaaggccagtttctgaccgttatcggagctttttggcacctaacgaaggagaggaaatacattttttctgtacgcatggctctcgtaaactgtttgaagacacttctggaggctgatccctacagtaaatgggctatcttaaatgtaatggggaaggatttccccgtaaacgaggttttcactcaatttctggctgacaatcatcatcaagtgagaatgttggctgcggagagtatcaaccgcctgttccaagacaccaagggggactccagcaggttgcttaaagctctccctctgaagctgcaacagactgcattcgaaaacgcatacctgaaggcccaggagggcatgcgtgaaatgagtcattctgcagaaaacccagagaccttggatgaaatatataataggaaatcggtactcctgaccctgatcgctgtggtgctctcctgtagccccatttgtgagaagcaggctctcttcgcgctgtgcaagtccgtcaaagagaacggactcgaaccgcatcttgtgaagaaagtcctagaaaaagtgagtgaaacctttggctatcgtcgcctggaggattttatggctagccacttagactatctggtgctggaatggctgaatttacaggacacagaatataaccttagttcatttcctttcatccttttaaattataccaacatcgaggacttttacagaagctgttacaaggtactcattccccatctggttatccgcagccatttcgacgaagttaagagcatcgcaaaccaaatccaagaggactggaagtccctcctgacggactgcttccctaaaatcttagtgaatatcctcccatacttcgcttatgaaggcacaagagatagcggcatggctcagcaacgagagaccgctacaaaggtctacgatatgctcaaatcagagaaccttttgggaaaacagatcgatcatctcttcatatcaaaccttccggagatagtagtagagctcttgatgacgctccacgaaccggcaaatagctccgcatcacagagcaccgacctgtgtgatttcagcggtgacctggatcccgccccgaatccacctcacttcccgagtcacgtgatcaaggccacgtttgcatatatcagcaactgtcacaagaccaagctgaaatccattctcgaaatactctctaaaagtcctgactcctaccagaagatcctgctcgcgatttgcgaacaggctgcagagacaaacaacgtctacaaaaagcatcggatcctaaaaatctatcacttgttcgtttcactgctgctgaaggatattaaatctggactgggcggtgcttgggcctttgttctgcgggacgttatttacactctgatccattacattaaccagcggccaagctgtattatggacgtctcccttcgctcgttttctctttgttgtgatctgctgtcacaggtatgtcagaccgccgtcacctactgtaaagacgctctggagaatcacttgcatgttatcgtcggcaccctgattccactagtttacgaacaggtagaagtccagaaacaggtgctcgatcttttaaagtacctagtgatcgataacaaggataacgaaaacctgtatattacgatcaagctcttggacccatttccagaccatgtggtttttaaggatcttagaattacgcagcagaagattaaatattccaggggtcccttctcactactggaggagattaaccacttcctgagcgtttcagtctacgacgctctcccgcttacacgcctggagggccttaaagatttacggcgtcagctggagcttcataaagatcagatggtagacattatgcgggcgtcccaggataaccctcaagatggcattatggtaaagctggtcgtaaatctgttgcaactgtcgaaaatggcaatcaatcataccggtgaaaaagaggtgctcgaagccgtgggctcctgccttggagaagtcgggcccatcgactttagcacaatcgcaattcagcacagcaaagatgcttcctacaccaaggccctcaagttgtttgaggataaggagctccagtggacatttatcatgttgacttatttgaacaacacactggtggaggattgtgttaaagtgcggagcgcagctgtcacctgtctgaaaaatatcttggccaccaaaactggccatagcttctgggaaatttataagatgacaaccgaccctatgttagcctatcttcagccattcaggacatctaggaaaaagtttctggaagtgcctaggttcgataaagagaaccccttcgaaggtctagacgacataaatctttggatcccactctccgagaaccacgacatttggatcaagacactcacatgcgcttttctagattccggcggcactaagtgtgagatcctgcaactcctaaagccgatgtgcgaagttaagactgacttctgtcagaccgtgttaccgtacctgattcatgatattctcctgcaggatactaatgagagctggcggaacctgctgtccacccacgtccagggcttcttcacaagctgcctacgacacttttctcagacatctaggtccacgaccccagctaacctcgattccgagtcagagcacttctttagatgctgcctcgacaaaaaatcacagcgtaccatgctggccgtcgtggactatatgcggcgccagaagcgcccgagtagcggcactatattcaatgacgccttttggctcgatctgaactacctggaggtcgcaaaagtcgcgcaatcatgcgcagcccacttcacggccttgctgtatgctgagatttatgcagacaaaaaatccatggacgatcaggagaaacgcagtctggcattcgaagaaggctctcagaacaccactatttcctccctgtcagaaaaatctaaggaggagaccggaatttccctccaggacttacttctcgagatttacagatctattggggagcctgacagtctgtacggctgcggcggtggtaaaatgttacagccgatcactagactgaggacctacgagcatgaagccatgtggggcaaagcccttgtgacatatgacctggagaccgccattcccagtagtacccgccaggccggtattatccaagccttgcagaatctcgggttgtgtcatatcctcagcgtgtatctgaaaggtctggactacgagaacaaagactggtgtcctgagcttgaggaactgcactaccaagcagcgtggaggaacatgcagtgggatcattgcacatccgtgtccaaggaggttgagggaaccagttaccacgagtctctgtataacgcacttcagagtctgcgagaccgtgagttctctacattttatgagtcattaaaatacgctcgcgtgaaagaagtggaggagatgtgcaagagatcactcgaatcagtgtactcactgtacccgacccttagcaggttgcaggctatcggagagcttgaatccattggcgaacttttttctcggtcagtcacccacaggcagttatctgaggtgtacattaaatggcagaagcatagtcaactcctgaaggactccgacttctcttttcaagagcctatcatggcactccgaaccgtcatcctagaaatccttatggagaaagaaatggacaacagtcagcgagagtgcataaaagatattcttactaaacatctagtagaattgtctatcctggcacgaactttcaagaatacgcagctccctgagagggcaatctttcagattaaacagtataactcagtgtcttgtggagtctcagagtggcagttggaagaggctcaggtattctgggccaagaaagaacagagcctggccttgtccatactgaagcaaatgatcaaaaaacttgacgcctcttgcgccgccaataacccgtcactgaaactgacctatacagaatgtctcagggtttgcgggaactggctcgcggagacatgtcttgagaaccctgccgtgataatgcaaacttacttggaaaaggcggtggaggtggccggcaattacgatggagaatcgtccgatgaactgcggaacggcaagatgaaagccttcctgtccttggccaggttttcggacactcagtaccagagaattgagaattacatgaagtcatcggagttcgagaacaaacaggccttgctgaaacgcgctaaagaagaggtaggcctgttacgggagcacaagatccagacgaacagatacacggtgaaggtccaacgcgagttggagctggatgaactggccctgcgcgcccttaaggaagatcgcaagaggtttctctgcaaggccgtggagaattatatcaattgcctgttgtccggcgaggaacatgacatgtgggtgtttcgactgtgtagcctctggctagaaaacagtggagtgtctgaggtgaacggcatgatgaaacgagacggcatgaaaattccaacatataagttcctgcccctcatgtaccaactcgccgccaggatgggcaccaagatgatggggggcctggggttccacgaggtgctgaacaatcttatctctaggatctcaatggaccatccgcaccataccttgtttattattcttgctctggctaacgcaaaccgcgatgaattcctgacaaagccggaggtagctagacgctccaggataaccaagaacgtccctaagcagagctcccagttggatgaggaccgcactgaagcagcaaataggatcatttgcacaataagatccaggcgaccccagatggttcgcagtgtagaggccctctgtgacgcatatatcattctggccaatttagatgccacccagtggaagactcaaaggaaaggcattaatatccccgccgaccagccaattactaaactgaaaaatcttgaggacgttgtggtccctacaatggaaatcaaggtcgaccatacaggcgagtatggcaatctggtgactattcagtcttttaaagcagagtttcggctagccgggggggttaacctccctaaaattatcgattgcgtggggtcagacggaaaagagaggcgacagttagtgaagggacgggatgaccttcgacaggatgcggtgatgcaacaagtttttcagatgtgcaacacactgctgcagagaaatacagagacacgaaagaggaaactcactatttgtacatacaaagttgtccccctgagccagaggtcaggtgtcttggaatggtgtaccggcactgtgcctattggcgaatttcttgtgaacaatgaggatggcgcacacaaacgatatagacctaatgacttttcagcctttcagtgccagaaaaaaatgatggaagtacagaaaaagtccttcgaggagaagtatgaggtgttcatggatgtctgccagaacttccagcccgtgtttaggtacttctgtatggaaaagtttcttgatcccgccatatggtttgagaaacgcttggcttataccaggtctgtggctacttcaagcatcgtaggttatatactgggtctgggggaccgccatgtgcaaaacatcctcataaacgagcagtctgcagagctcgttcacattgacctgggcgtggccttcgaacaaggtaaaatactgccgacccccgaaaccgttccctttagactgacacgggatatcgtggatgggatgggtatcactggggtcgaaggcgtttttcgccgatgttgtgagaaaacaatggaggtcatgagaaactctcaggagactttactgacaatagtggaggtcctgctgtacgatcctctgttcgattggacgatgaatcccctgaaggctctgtacctccaacagagaccggaggatgagaccgagctgcacccgacgttgaatgcggacgatcaggagtgcaaacggaaccttagtgacattgaccaaagtttcaacaaagttgccgagcgtgtgctgatgagactgcaggaaaagctgaagggggtcgaagaaggcacagtgctgagtgtaggagggcaggtcaatctgctgatccagcaggcgatcgatcccaaaaatttatctcgactgtttcctggctggaaagcatgggtgtag

SEQ ID NO: 13902 - DNA, 417 bp, synthetic construct
  misc_feature 1..417: note = Description of Artificial Sequence: Synthetic coding sequence
  source 1..417: mol_type = other DNA
atgactctgcacgaacctgccaactcaagtgcatcccagtctacagatctctgtgacttcagcggagatcttgaccccgctccaaatcctccccactttccatcgcacgtcataaaagctacattcgcttacatcagtaattgtcataaaaccaagctgaagagtatcctggaaatcctgtccaaaagtcccgattcctaccagaaaattctactggccatctgcgagcaggcagccgaaaccaacaatgtgtataaaaaacatcgcatcctcaaaatctaccatctgttcgtgtctttactattgaaagacattaagagcggattaggcggggcctgggctttcgtgctgcgcgatgtgatctacacacttatccattacattaatcagcgcaaactaactatcttctctcaatag

SEQ ID NO: 13903 - DNA, 9171 bp, synthetic construct
  misc_feature 1..9171: note = Description of Artificial Sequence: Synthetic coding sequence
  source 1..9171: mol_type = other DNA
atgtcgctggtgctgaacgatctgctcatctgctgcagacaacttgagcatgacagagcaaccgagaggaaaaaagaagtggagaagtttaagcgactgatccgcgatccagagacaatcaagcatctggacaggcacagcgacagtaagcaaggtaagtaccttaactgggacgctgtatttcgcttcttacagaagtacatacagaaggagactgagtgcctgaggattgccaaacctaacgtgagtgcaagcacccaggcaagtagacagaagaaaatgcaggagatctcctcactcgtcaagtactttatcaagtgcgccaaccgccgggctccacgcctcaaatgccaggagctgctgaattatattatggacacggtcaaggacagtagcaacggcgctatatacggagctgactgctctaacatcctcctgaaggacatcctgtcggtgcgcaaatactggtgcgaaatttcacagcagcagtggcttgagttgtttagcgtatattttagactgtatctgaagccaagtcaagatgttcatcgggtgctggtcgctagaatcatccacgctgtgaccaaaggatgctgcagtcagaccgacggactgaattccaagttcttggatttcttctctaaggctatccagtgtgcgagacaggaaaagagttcatctgggcttaaccacatcctggccgcactgactatcttcctgaagacactggccgtcaactttcggatccgggtctgtgagctgggggatgagattctgcccacacttctctatatttggacgcagcatagattgaatgactccctaaaagaggtgatcatagagctgttccagctacagatctacatccaccatcccaagggagccaaaacccaggagaaaggagcgtacgagagcactaagtggcgcagcatcttgtacaacctgtacgacctgcttgtgaacgaaatctcgcacattggcagtagaggcaagtatagctccggcttcaggaacattgccgttaaagaaaacttgattgagcttatggctgatatttgccatcaggtttttaatgaggacacccgatcgctggagatctctcaaagttatacgactacccaacgcgaaagtagtgactacagtgtgccttgcaaaaggaagaagatagagttaggctgggaggtaatcaaggaccaccttcagaagagccaaaacgacttcgatctggttccttggttacaaattgcaacacaacttattagcaaatatccagccagcctccctaattgtgagctgtccccactcctcatgattctgtcgcagctgctgccacagcaacgccatggggaacgtacaccatatgtcttgcgatgtcttactgaagtcgcactctgccaggacaagcgatcaaatctggagtcctcgcaaaagtccgatttgctgaagctgtggaataagatctggtgcattacattccgcggcattagctcagaacagattcaggccgaaaactttggtctgctcggtgccatcattcaaggctcgctcgtggaggtggacagagagttttggaaactcttcacagggtccgcctgtcggccatcctgcccggctgtttgttgtcttaccctcgcactgacaactagcatagttccaggcaccgtaaaaatgggcatcgaacaaaatatgtgcgaagtgaacaggagcttcagcctgaaagagagcatcatgaagtggctgctgttctaccaattggagggcgatctggagaactcgaccgaagtccctcctatcctgcattccaattttcctcatctggtcctcgagaagatccttgtatccctgaccatgaagaattgtaaggctgctatgaacttttttcagagtgtaccagagtgcgaacaccaccagaaggacaaggaagagctgtcattcagcgaggtcgaagaactcttcttacagactaccttcgataagatggactttttgacgattgtccgcgagtgcggcattgagaagcaccagtcttctataggattcagcgtgcatcagaatctgaaggagtccctggacaggtgccttcttggtctctcggaacagttgctcaataattacagtagcgaaatcactaactctgagactcttgtgcgatgttctaggctgctcgtcggagtgctagggtgttactgctacatgggtgtgattgctgaggaggaggcttacaagtccgaacttttccagaaggccaagtctctgatgcagtgcgccggtgagtccattacactcttcaaaaacaagaccaacgaagaatttagaattggttccctccggaatatgatgcaattgtgtacccgctgcttgagtaattgcacgaagaaaagtcctaataagatagcaagcgggttttttctgaggctgcttacgagcaagctcatgaatgatattgctgacatttgtaagagcctggctagcttcataaaaaagccttttgacaggggagaggtcgaatcaatggaagacgatacgaatggaaatctaatggaggtggaagatcagagttctatgaacctttttaatgactatccggatagcagtgtgagcgacgctaacgaacccggcgagtcgcagtcgaccataggcgctatcaaccctctggccgaagagtacctgtccaaacaggacctgctgttcttagacatgctgaagttcctgtgtttatgtgtgacaaccgcccagaccaacaccgtctcattccgcgccgctgatatcagaagaaagctgcttatgctgatcgattcttctactctggaacccaccaaatcccttcacttgcacatgtatctgatgctcctgaaagagttgcccggcgaggagtatccactacctatggaggacgtcctggaactgctgaagcccctgtctaatgtgtgttctctttacagaagggatcaggatgtgtgtaaaaccattctcaaccacgttttgcatgtcgttaagaatctgggtcagagtaacatggatagcgaaaacaccagggatgcgcagggtcaattcctcactgtgatcggtgcgttctggcatctgaccaaggaacgcaagtatatcttttctgtgcggatggccctcgtgaattgcctcaagactctgctggaggccgacccatattcgaaatgggccattctgaatgtcatgggcaaggattttcccgtaaacgaagtgtttactcagttcttagctgacaaccatcatcaagtgagaatgctggcggccgagtccatcaatcggttattccaggataccaagggagacagtagcaggttactgaaggcactacctctgaagctgcaacagaccgcatttgagaatgcatacctgaaggcccaggaaggcatgagggagatgtcccactctgccgagaatcccgaaactctggatgagatctacaatcgcaaatccgtattattgactctgatcgccgtggtcctgtcatgtagtcccatctgcgagaagcaggccctctttgccctgtgcaagagcgtcaaagaaaatgggctcgagccgcaccttgttaagaaagtgcttgagaaggtgagcgaaacgttcggttaccggcggcttgaggacttcatggcatctcatctggactacctggttcttgagtggcttaacctccaggatacagagtacaacctgtcctcattcccgtttatcctgcttaactataccaatatcgaggatttttatcgttcctgttataaggttttgataccgcatcttgtgattcggagccactttgacgaggtgaaatccattgctaaccagattcaggaggactggaagtctcttttaaccgattgctttccaaaaatactcgttaacatcctgccctacttcgcatatgaaggaacacgggattccggcatggcgcagcagcgcgagaccgctacaaaggtgtatgacatgctaaaatcagagaacttactgggaaagcagattgaccacttgttcattagcaacctcccagaaattgtggtggaattgctgatgaccctgcatgagcccgccaattcctctgcttcacagtcaacagacttgtgcgactttagcggagatttggaccccgctcctaacccgccacatttccctagtcatgtaatcaaagctactttcgcatatatctctaattgtcacaagactaagctgaagagtatcttagagatcctttccaagtcccctgactcttatcaaaaaatactcctcgctatatgcgagcaggcagccgaaaccaacaacgtgtacaagaagcatcgcattttaaagatctaccatctatttgttagtttactgctgaaggacatcaaatctggattgggcggtgcctgggcattcgtgttgagggacgtaatttacaccttaatccactatataaaccaaagaccttcatgtatcatggatgtgtctctcagaagcttcagcctgtgttgtgatttgctgagtcaagtgtgccaaactgctgttacctactgcaaggacgcgctggagaatcatctccatgtgattgtaggaaccctgattcctttggtgtatgagcaggtggaggtgcagaagcaagttctggatctgctgaagtatttggttattgataacaaggataacgagaacctgtacataactatcaaattgctggatccttttccggaccacgtagtttttaaggacctgagaattacccagcagaaaataaaatattctcgcggaccctttagtctgctggaggagattaaccacttcctctcagttagcgtctacgatgcactgcccctcactcgactggagggattgaaggatctgaggcgacaactagagctgcataaggaccagatggtggatatcatgcgggcaagccaagacaacccgcaggacggaatcatggttaagctcgtcgtgaacctattgcagctctccaagatggccatcaaccacacaggagaaaaagaggtgctggaagctgtgggcagctgcctgggtgaggtgggcccaatagacttctcaactatcgctattcagcactctaaagatgcgtcatacaccaaggccctgaaactcttcgaagacaaggagctgcaatggacgttcataatgttaacttacctaaacaatacgctggtggaagattgcgtcaaggtcaggtccgcagcagtaacttgtctcaaaaacatcttagccacaaagacaggacattctttttgggaaatctacaagatgactacggacccaatgctggcctatctgcaaccattcaggaccagtcgtaagaaattcttggaagttcccaggttcgacaaggaaaaccccttcgaggggcttgatgatattaacctttggatccccctctccgagaaccacgatatatggattaagaccttgacctgtgcttttcttgactcgggaggtaccaagtgcgagattcttcaactgctgaagcccatgtgcgaggttaaaacagatttctgtcaaacagtgctcccctacctgatacatgacattctacttcaggataccaacgaatcttggagaaatttattatcaactcacgtccaaggcttcttcacgtcatgcctgaggcattttagtcaaactagcaggtctacgacccctgctaatctggattccgagtctgagcacttcttcaggtgttgtctggacaagaaatcccaacggaccatgctggcagtggtggactatatgcggagacagaagagacctagttcgggtaccatttttaacgatgctttttggctcgacctgaattatctggaggtcgcgaaggtggctcagagttgcgctgctcatttcacagctctgctctatgctgagatatatgcagataagaagagcatggatgatcaggagaaaagatctctggcctttgaagaggggagtcagaatacaactatctcctcactcagtgagaaaagtaaggaggaaaccggcataagcctgcaggacttactgttagagatatatagatctattggtgagcccgacagtctctatggctgcggcggagggaagatgctccagcctattacccgcctacggacatacgagcacgaggcgatgtgggggaaagccctggtgacttacgatctggaaactgcaattccctcctcaaccagacaagccgggataattcaggctctgcagaatttgggcctgtgtcatatattgtctgtgtatctgaaaggtttggactacgagaataaagattggtgtccagaactcgaggagctgcactaccaggccgcctggagaaatatgcagtgggatcactgtacaagtgttagtaaggaggtggaaggcacctcataccacgagagcctgtacaatgccctgcaaagtctccgggatagggaatttagtactttttatgaaagcttgaagtacgcccgcgtcaaggaggtggaagagatgtgtaaaagaagtcttgaaagtgtgtacagcctttaccctacgttgtctcgtcttcaggctataggggagctcgaatcgatcggcgagctgtttagccgcagtgtgacacaccgacagcttagtgaggtgtacattaagtggcagaagcattcacagctgctgaaagactctgacttttcattccaagagcccattatggccctgcgtaccgtaatacttgaaatacttatggagaaggagatggacaactcgcaaagggaatgtatcaaagacattctaaccaagcaccttgttgaactctcaatcttagctagaactttcaagaacacccaactgccagagagagccatcttccagataaaacaatacaacagcgtgtcctgtggagtctctgagtggcaacttgaagaagcccaagttttttgggcaaagaaggagcagtctttggcactgtctatcctgaagcagatgataaagaagctggacgccagctgcgctgctaataatcctagcttgaagctcacttataccgagtgtctgcgcgtgtgtgggaattggctggctgaaacatgcctcgagaaccctgctgtgatcatgcagacctacttagaaaaagccgtggaggtggccgggaactacgacggagagagctcagatgagttgaggaacggaaagatgaaagccttcctaagtttggcaaggttctctgacacacagtaccaaagaatcgaaaactatatgaaatcctcggaatttgagaacaagcaggctctgctgaagcgggccaaagaagaagtgggccttcttagagaacacaaaattcagactaatcggtacaccgtgaaagtacaacgcgagctggaactcgatgagctcgcattgcgggctttgaaagaagaccgaaaaaggttcctatgcaaggccgtggagaactacatcaattgtcttctatctggggaagagcatgacatgtgggtttttaggctgtgttcactgtggctcgagaattccggggtcagcgaagtgaacggcatgatgaaaagggacggtatgaagatacccacatacaagttcctgcccctgatgtaccaactagcagcgagaatgggaactaagatgatgggcggccttggtttccacgaagtgttaaataatctgatttctagaatcagcatggatcatccacaccacactctcttcataatcctcgccttggctaacgccaatcgcgacgaattcctaaccaaacccgaggtagcccgccggagtagaatcacaaaaaatgtgcccaagcagtcttcgcagctggacgaggatagaactgaagcagccaaccgcattatttgtaccatacgaagccgccgcccccagatggtacgctctgtagaggccctgtgcgacgcatatattatcttagcgaatctggacgcgacccagtggaagacacaacgcaagggtatcaacattcctgccgatcagcccattacgaaactcaagaacttggaagatgtggtagtgcctaccatggaaatcaaggtggatcacactggggagtacgggaatttggtcaccattcagtcctttaaggcggaatttaggctcgctggcggcgtgaacctgccaaaaatcattgattgcgtcggctccgacggcaaagaacggcgccagcttgtgaaagggagggacgatctgcgccaggatgccgttatgcagcaggtttttcaaatgtgtaacactcttctgcaacgtaacaccgaaaccaggaaacgcaaacttaccatttgtacatataaggtcgtgccgctttctcagaggtcaggggtgttagagtggtgcacaggtaccgtgccaattggtgagttcctagttaataacgaggatggcgcccataagaggtacaggcctaatgactttagtgctttccagtgccagaagaaaatgatggaagtgcaaaagaagtcgttcgaagaaaaatatgaagtctttatggacgtgtgtcagaatttccagccggtgttccgctacttttgtatggagaagtttctggaccccgccatctggtttgaaaagcgtttggcgtacacccgaagtgtcgccacctcaagtattgttggctacatcctggggctgggcgataggcacgtccagaatatccttataaatgaacagagtgcagagctcgttcatatcgatctaggcgttgccttcgagcagggtaagattctgcccacccctgagacagttccattccgactaacgcgtgacatagtggatggaatggggattacaggcgtggagggggtcttcaggaggtgctgcgagaagaccatggaggtcatgaggaattctcaagagaccttgctgaccattgttgaagtgctcctgtatgaccccctatttgactggactatgaaccccctgaaggcattgtatttacagcagaggccagaagacgagaccgagttacaccctaccctaaacgcagatgatcaggaatgcaagcgcaaccttagtgacatagaccagtcttttaataaagtggccgagcgggtgctgatgaggctccaagagaagctgaagggagttgaagaaggcaccgtgcttagtgtggggggacaggtcaatcttcttattcaacaagcgattgaccctaagaacttgtctagactgttccccggttggaaggcctgggtgtag

SEQ ID NO: 13904 - DNA, 4110 bp, synthetic construct
  misc_feature 1..4110: note = Description of Artificial Sequence: Synthetic coding sequence
  source 1..4110: mol_type = other DNA
atgtccctggtgcttaacgacctacttatttgctgccggcagctcgagcacgaccgcgctaccgagagaaagaaagaagtggaaaaattcaaaaggctcatccgagacccagaaactatcaagcatcttgaccgccattccgacagtaaacaaggaaaatacctcaactgggacgctgtgtttaggtttctgcagaaatatattcagaaggagaccgagtgtctcagaattgcaaaaccgaatgtaagcgcctcaacccaagctagcagacagaaaaaaatgcaggaaatttcttccctggtcaaatacttcataaagtgcgccaaccgtagggctccacgtcttaagtgccaggagttgcttaattacatcatggataccgttaaggatagttctaatggggctatatacggggcagattgttccaatatcctcctgaaagacatcctgagtgtgaggaagtactggtgcgagatctcgcaacaacaatggctggaattgtttagcgtgtactttcgcctatatctgaagccaagccaggatgtccacagagtgttagtggcacgcatcattcatgccgtcactaagggttgctgtagccagactgatgggctcaatagcaagttcttagatttcttcagcaaggctattcagtgtgcccggcaggagaagtcgtcatcaggacttaaccacattctggctgccttgacaatatttcttaaaaccctggccgtgaactttcggatccgcgtgtgtgagctcggagacgagattttgccaacactgctttatatttggacccagcataggttgaacgattccctgaaggaggtcatcatcgagctcttccagctgcagatctatatccaccaccctaaaggagctaagactcaggaaaaaggagcttatgaaagcacaaaatggcgctccattctctataatctgtatgacctcctggtgaacgaaatatctcacatagggtcccggggcaagtatagctcgggattcagaaatatagctgtgaaggagaatctgatcgaattaatggcggacatctgccatcaggtgttcaatgaggatacacggtcgttggaaatttcacagtcttataccacaacccagcgcgagtctagcgactattctgttccctgcaagcggaaaaaaattgagctgggatgggaggtaatcaaagatcatttgcaaaaatcccaaaacgacttcgacctggtgccatggctgcaaattgcgactcaattgataagcaagtaccccgcgtccctgccgaattgtgaactgtctccactgctgatgatcctcagtcagctcctgccccagcaaagacacggagagcggacaccatacgttctgagatgcttaacagaggtggccctgtgccaggataaaagatcgaacttagaatcgtctcagaaaagcgatctcttgaaactctggaataagatttggtgtatcacttttaggggcataagctcagagcagatccaagccgagaactttgggcttctgggtgcaattattcaggggagtcttgtggaagtcgatagagaattttggaagctgtttactggcagtgcttgtagaccttcatgccctgctgtttgctgcctcacccttgcactgaccacatccatcgttcccggaacagttaagatgggaatcgaacagaacatgtgcgaagtcaataggagtttctccctcaaagagagcatcatgaagtggttgctcttttatcagctggaaggagacctggagaattcgactgaggtcccacctatccttcattccaacttcccccatctcgtcctggagaagatcttggtaagtctcactatgaaaaactgcaaggctgctatgaatttctttcagagcgtacccgaatgtgagcatcatcagaaggacaaagaggagctatccttcagtgaggtagaagagctgttcctgcagacaaccttcgacaaaatggactttttgactattgttcgtgagtgcgggattgagaaacaccagtctagcatcggattttcggtgcaccaaaatctaaaagagtctctagaccggtgcctgctgggcctgtccgaacagctcctgaataattacagttctgagatcactaatagtgagacgctggtgagatgcagtcggttgctcgtcggagtattggggtgttattgttacatgggcgtgattgccgaagaggaagcctacaaaagcgaactcttccagaaagcaaagtcactgatgcaatgtgcaggcgagtccatcacactgttcaaaaacaagactaatgaggagttccggatcggcagcctaaggaatatgatgcaattatgcacacgctgcctgagtaattgcacaaaaaaaagccctaataaaattgcctctggttttttcctgagactattgacctctaaactgatgaacgatatcgccgacatttgcaagagcctggcatctttcatcaaaaagccatttgacagaggggaggtagaatcaatggaggacgacactaacggaaatctcatggaggtggaagaccagtcctccatgaacctatttaacgattacccagattcctccgtttccgacgcaaacgagcctggcgagagtcagtccactattggagccatcaacccactggctgaggagtacctatctaagcaggatttgcttttcctcgatatgttgaaatttctctgtctgtgcgttaccacagcgcagactaatactgtgtcatttagagcagccgatattaggcgcaaactcctgatgttgatcgattcgtccacccttgaacctacaaagtctctacatctgcacatgtacctgatgcttcttaaggaactgccaggcgaagaataccccctccctatggaggacgtgctggaactgttaaaaccattgtccaacgtctgcagcctctatcggcgagaccaggacgtgtgtaaaaccattcttaaccatgtgctgcatgtggtcaaaaatctgggccagagtaatatggactccgagaatacccgggatgcccagggccagtttctgaccgtgatcggggctttttggcacctgacaaaagaacgtaaatatattttttccgttaggatggccctggtcaattgcctaaaaaccctactcgaggcagatccctattcaaagtgggctattctgaacgtgatgggcaaggactttcctgttaacgaagtgttcacacagttcctggctgacaaccaccaccaggtgcgtatgctggctgcagagtccattaacagattgtttcaggacacaaaaggcgattctagccggttactgaaagccctacccttgaaactgcagcagaccgcattcgaaaatgcgtatctgaaagcccaggaaggtatgagggagatgtctcactctgctgagaaccccgagacattggacgagatctataaccgaaaaagtgtgctcttgaccctcatcgctgtggtgctctcctgtagcccaatttgcgaaaagcaagctttattcgctctctgtaagagtgtcaaggagaatggccttgagccccacctagtcaaaaaagtgctagagaaagtgagcgagacgttcggttataggaggttggaggacttcatggcctcgcacctagattatctggtgctggaatggctgaatcttcaggacaccgaatacaatctttcttcttttcccttcattttgctgaattacaccaacatcgaggacttttacagaagctgctataaagtgctgatacctcatcttgtgattcgatcccacttcgatgaggtaaagtcaattgctaaccagattcaagaggactggaagtccctattgacagattgcttccctaagatcctggtcaacatcctaccatacttcgcctacgaggggaccagagacagtggcatggctcagcaacgagagaccgcgaccaaggtttatgatatgctgaagtcagagaacttgttgggaaaacagatcgaccacctgttcatttccaatctgcccgaaattgtggtggagctgctaatgacactgcacgagcccgccaactcaagcgcttctcagtctactgacctgtgcgatttctcatag

SEQ ID NO: 13905 - DNA, 282 bp, synthetic construct
  misc_feature 1..282: note = Description of Artificial Sequence: Synthetic coding sequence
  source 1..282: mol_type = other DNA
atgagcctggtgctcaatgatttgctgatttgttgccgccaactggagcacgatagagcgacagagcgcaagaaagaagtggagaagttcaagagactgatcagggaccccgaaaccatcaagcacctcgataggcactccgatagcaaacagggaaagtacctcaattgggacgccgtgttcagatttctgcagaaatatattcagaaagagacggagtgtctcagaatagcaaaaccgaacgtgtcggcatcaactcaggccagccggcaaaaaaaatag

SEQ ID NO: 13906 - DNA, 921 bp, synthetic construct
  misc_feature 1..921: note = Description of Artificial Sequence: Synthetic coding sequence
  source 1..921: mol_type = other DNA
atggagtccatatttcatgagaagcagccctcaggtaacatggatgactctgggtttttcagtatccaagttatcagtaatgcactcaaggtttggggattggagttaatactatttaactcacctgaatatcaacgcctgagaatcgatcccatcaacgaacggagtttcatttgtaattacaaagaacattggtttactgtcagaaaactggggaagcagtggtttaatctgaattccttactgactggacccgagctcatttccgatacttacctcgcactgttcctggctcagctacaacaagaaggctattccatttttgttgtgaagggggacctgccagattgtgaggctgaccagcttctacaaatgatccgggtgcagcagatgcatcggcctaagctgataggcgaggaattagcgcagctgaaggaacagcgagtgcataaaacggacctggaacgagttctggaggcaaatgacgggtccggcatgctggacgaggacgaggaggacctacagcgcgcactggcactctctcgacaggagatagacatggaggacgaggaggcagatttgaggcgggccattcagctgtcaatgcagggctcaagcagaaacattagtcaagacatgacacagactagcggcacaaatctcacctccgaagagcttcgcaaacgcagggaggcttacttcgaaaagcagcaacaaaaacagcagcaacagcaacagcagcagcagcagggtgacctcagcggccagagttctcatccttgcgagcggcccgccacgagcagcggcgccctgggctcggatctgggcgacgccatgtctgaagaggacatgctccaagccgccgtgaccatgtctctggagaccgtgaggaacgatttgaagaccgagggcaagaagtag

SEQ ID NO: 13907 - DNA, 1110 bp, synthetic construct
  misc_feature 1..1110: note = Description of Artificial Sequence: Synthetic coding sequence
  source 1..1110: mol_type = other DNA
atggagagcattttccacgagaaacaggagggttcgctgtgtgcacagcactgcttgaataatttactccaaggcgagtatttcagtccggtggaactgtcgagtattgcccatcagcttgacgaagaagagcgcatgcgcatggcggaaggcggagttacgagtgaagactaccgaaccttcttacaacagcctagcggaaacatggatgactccggatttttctcaattcaggtcatcagtaacgctctaaaagtatggggtcttgaacttatcctctttaattctcccgaatatcagcgcctccgtatcgaccctattaacgagagatcttttatttgtaattataaggagcactggtttaccgttagaaagctcgggaagcaatggttcaacctgaattcattactgactggacccgaactaattagtgatacataccttgctctcttcctggcccaactgcaacaagaaggatatagcatcttcgtagtgaagggcgatctgccagattgcgaagcagatcagttgctgcagatgatccgagtacaacagatgcatagaccaaagctgatcggtgaagaactcgcccagctcaaggagcagagggtccataagacagacctggaacgcgttctggaggcaaatgatggatccggcatgttagacgaggatgaggaggacctccagcgggccctcgcactcagccgccaggaaatcgacatggaggacgaggaagcagacctcaggcgggccattcagctcagcatgcaagggtccagccggaacatcagccaggacatgactcaaacatctggaacaaatttgacatccgaggagctgagaaagaggagggaggcctatttcgaaaaagaccagcattttcatattcttaagcagcaacagaagcaacagcagcagcagcaacagcaacagcagggcgatttgagcggccagagcagccacccctgtgagagacctgccacctcaagcggtgccctgggcagcgacctcggcgatgccatgtcagaagaagacatgctacaggccgccgtgacaatgtctctcgagaccgtccgaaacgacctgaagactgaggggaaaaagtag

SEQ ID NO: 13908 - DNA, 1086 bp, synthetic construct
  misc_feature 1..1086: note = Description of Artificial Sequence: Synthetic coding sequence
  source 1..1086: mol_type = other DNA
atggaatcgatatttcatgagaagcaagagggcagcctgtgcgcacagcactgtctcaataacctcttacagggggaatatttctctcccgtcgagctatcttctatcgcccaccagctcgatgaagaggaacgaatgcggatggcagagggcggtgtgactagtgaagactataggaccttcttgcaacaaccgtctggaaacatggacgacagcggctttttttcaatccaggtcattagtaatgcactaaaagtctggggtctagaattaatcctgttcaactctccagagtatcaacgcttgcggattgaccctatcaacgaaaggtctttcatatgcaactacaaggaacattggttcacagtgcgcaagttggggaagcagtggtttaacctcaattctctgctgactggaccggagctgatctccgacacttacctggccttatttttggcccagttgcagcaggagggctacagtattttcgtggtgaagggggatctgccagattgtgaagctgatcagctgcttcagatgattcgggtccagcagatgcatagaccaaagttgattggggaggaactggcccaactcaaagagcaacgcgtgcataaaacagatctagagagagtgttggaggcaaatgacgggagcggcatgttagacgaagacgaagaagatctgcagagggcactggccctgagcaggcaggagatcgatatggaagatgaggaggcagatctcagaagagcaatccagctctccatgcagggcagctctaggaatatttcgcaagacatgacccagaccagcggcacaaatctgacgtccgaggaacttaggaagcgccgcgaagcttatttcgaaaagcaacaacaaaagcagcaacagcagcagcaacagcagcagcagggcgacttgagtggacagtcatcacatccgtgtgaaaggcctgcaaccagttccggcgccctcggatctgacctgggggacgcaatgtctgaggaggatatgctccaggctgcagtgactatgagtctagaaaccgtccggaacgatcttaagacagaaggtaagaagtag

SEQ ID NO: 13909 - DNA, 1101 bp, synthetic construct
  misc_feature 1..1101: note = Description of Artificial Sequence: Synthetic coding sequence
  source 1..1101: mol_type = other DNA
atggagtcaatttttcacgaaaagcaggagggctccttgtgtgcgcagcattgtctgaacaatttattgcagggagaatactttagtccagtcgagctctccagtattgcgcaccagctcgatgaagaggagaggatgcggatggctgagggcggtgtgacaagtgaggactaccgtacattcctccagcagccatcgggcaacatggatgactctgggtttttctctattcaggttatttctaatgctctgaaagtgtgggggcttgagctgatcctgtttaattctcccgagtatcagcgactccgaatagacccaattaatgaacgatccttcatttgtaattataaagaacattggtttaccgtgcgaaaattaggtaagcagtggtttaatctgaactctcttctcaccgggcctgagctgatttcagacacttacttagctctgttcctggcccagctccagcaagaggggtattccattttcgttgtcaaaggcgacctccccgattgcgaggctgaccagctactgcagatgatccgagtccagcagatgcatagacccaaattaatcggcgaagagctcgcccagctaaaggagcagcgggtgcataaaacagatctagagagagtcctcgaggctaacgatgggtcagggatgctcgacgaagatgaagaagatttgcaaagagctctggcactttcacggcaggagatcgacatggaagatgaggaggcagacctcaggcgagctatccagctctcaatgcaggggtcatctcgcaacataagtcaggatatgacccagactagcggaaccaacctgacctccgaagaattgagaaagaggcgagaggcctatttcgagaatgattactttgattctcaacagcagaaacagcagcagcagcaacagcagcagcaacagggagatctctcgggacagtcaagccacccttgcgagagaccagctacctcttccggagctctggggagtgacctcggcgacgccatgtcagaggaagacatgctgcaagccgcggttactatgagcctggagacagtacgcaatgacttgaaaacagagggaaagaagtag

SEQ ID NO: 13910 - DNA, 1065 bp, synthetic construct
  misc_feature 1..1065: note = Description of Artificial Sequence: Synthetic coding sequence
  source 1..1065: mol_type = other DNA
atggagagtattttccatgagaagcaggaggggagcttgtgcgcccagcattgtctgaacaatcttcttcagggagagtacttttctcccgtggagctgagttctatcgcgcatcagttggatgaagaggaacgcatgagaatggccgaagggggagtaaccagcgaagattaccggactttcttacaagtgatcagtaatgctttgaaggtgtggggcctagaactcatcctgttcaacagcccagagtatcagagattgcgtatcgacccaatcaacgaacgttccttcatctgtaattacaaggaacattggtttaccgtgaggaagcttggaaagcaatggttcaacctaaattctttgctcactggcccagagctgattagcgatacctacttggcattgtttctcgcgcagctccagcaggaaggatattccatctttgtggtgaaaggagacttgcccgattgcgaagctgatcagttgctgcaaatgatccgggtgcaacagatgcatcggccaaaacttatcggcgaagaactcgcccagctgaaggaacagcgggtacacaaaaccgacctcgaacgtgttctggaggctaacgacggttccggaatgctagatgaagacgaggaggatctgcagcgtgctttggccctctcccggcaggagattgacatggaagatgaggaggccgacctgaggagggccattcagctgagcatgcagggtagttcccgaaacatttcccaggatatgacacagacatctgggacgaatcttactagcgaggaactgaggaaaagacgcgaggcctactttgagaaggaccagcattttcatattctaaaacagcagcaaaagcaacaacagcagcagcagcagcagcagcagggtgatctcagtgggcagagttctcatccatgcgaacgcccagccacatctagtggagccctgggttctgacctgggagatgctatgagcgaggaagatatgctacaggccgccgtgacaatgagcctggagaccgtcagaaatgacttgaagactgagggaaaaaaatag

SEQ ID NO: 13911 - DNA, 1113 bp, synthetic construct
  misc_feature 1..1113: note = Description of Artificial Sequence: Synthetic coding sequence
  source 1..1113: mol_type = other DNA
atggagagtatatttcacgagaagcaagagggctctttatgtgcgcagcattgcctgaacaatctgctacagggggaatactttagtcctgtggagctcagcagtatcgcacaccagcttgatgaagaggaacgaatgaggatggcagaagggggggttacttctgaagactatagaacctttttgcagcagccatctggcaacatggacgactcaggctttttctcgatccaggtcatcagcaatgccttgaaggtttggggtttggagctcattctgtttaatagtcctgagtaccagcgattgagaattgaccctattaatgaacgcagctttatttgcaattataaggagcactggtttactgtgcgcaagctaggaaaacaatggttcaacttgaacagtctactgaccgggccggagctgatctcagatacatatctcgccctgtttcttgctcagctgcaacaggaaggctattcaatattcgtggtcaaaggggatctccccgattgcgaagctgatcaactgctgcaaatgattcgggtccaacagatgcaccgtccaaagctgataggcgaggagctggcgcagctaaaagagcaacgcgttcacaagacggaccttgagcgcgttcttgaagccaatgatggctccggcatgttagatgaggacgaagaggatctgcagagagccctggccctgagcagacaggagatcgacatggaagacgaagaggctgatctccggagggcgattcagctgtcgatgcagggatcctcaagaaacatctctcaggacatgacccagacctctggcaccaacttaacgagtgaggagctgcgtaaaagacgcgaagcatacttcgagaagacagagtccaggtcggttgcgcaggctcagcagcagaaacagcaacaacagcaacagcagcagcaacagggcgacctctcagggcagagtagccatccatgcgagcggcctgccacatcctccggagctctgggtagcgacctaggggacgccatgagtgaagaggacatgctgcaggccgcagtgacaatgagtctcgaaactgtgaggaatgatctcaagactgaaggcaagaaatag

SEQ ID NO: 13912 - DNA, 1041 bp, synthetic construct
  misc_feature 1..1041: note = Description of Artificial Sequence: Synthetic coding sequence
  source 1..1041: mol_type = other DNA
atggagtccatctttcacgagaaacaagaaggctcactgtgcgcccagcactgcctaaacaatctgctgcagggggaatatttctctcctgttgagctgtcttccatagcccatcagctggacgaggaggagaggatgcgcatggccgagggaggggttacatctgaggattatcgaaccttcctgcaggtgatttctaacgccctgaaggtgtgggggttagaactgatcctgtttaatagccccgagtatcaaagacttcgtattgatccaataaacgagagatcgtttatttgtaattacaaagaacactggtttaccgttcgaaagctgggtaagcagtggtttaatctaaactccttactcaccgggcccgagctgatatctgacacttacctggctttgtttcttgcccagctgcaacaggagggttacagtatttttgtcgtgaagggagatctgcctgattgcgaagcagaccagctattgcagatgatcagagtccaacagatgcacagaccaaagctgataggagaagagcttgcccagctgaaggaacaacgcgtccataagactgatctggaaagagtgttagaagccaatgacggatctggcatgctcgatgaggacgaagaggatctacagagggcactggccctcagccgccaggagattgacatggaagacgaggaggccgacctgaggcgggctatacaactatctatgcaaggttcttctagaaacatttctcaagacatgactcagacgagcgggaccaatcttacttcagaggagctccgaaagcgtcgggaggcgtattttgagaagcagcaacagaaacagcagcagcagcagcagcagcagcagcagggcgacctgagcggtcagtccagtcacccttgtgaacgacccgcaacatcctcaggagcgcttggctccgatctgggggatgcgatgtcagaagaggacatgctccaggctgccgtgaccatgagtctcgaaacagttcgaaacgatctgaagaccgaggggaaaaaatag

SEQ ID NO: 13913 - DNA, 1095 bp, synthetic construct
  misc_feature 1..1095: note = Description of Artificial Sequence: Synthetic coding sequence
  source 1..1095: mol_type = other DNA
atggaatcgatttttcacgaaaaacaggagggaagtctgtgcgcccagcactgtctcaataacctgctgcaaggtgagtacttttcaccagtggagctgtcctccatcgcacaccagctcgacgaggaggagcggatgcggatggccgagggcggggtcaccagtgaggattatcgtacgttcctgcaacagccatccgggaatatggacgactcggggtttttctcaatccaggtcatctccaacgctctgaaggtttggggcttagaactgatccttttcaactccccagaataccagagactgcgcatcgaccccatcaatgagagatcctttatatgcaactataaggagcactggttcacagtgcgaaaattaggcaagcaatggtttaatctgaatagcttgctgactggtcctgaactcatctccgacacttatctcgctctctttctggcacaactgcagcaggaaggatatagcattttcgtcgtgaagggcgacctgccagactgcgaagccgaccagttactgcaaatgattcgggtgcagcagatgcaccgcccaaaactgattggcgaggagctggcccagctgaaggagcagagggtgcataaaacagatctggaaagggtcctggaagcaaacgacgggtcagggatgctcgatgaagacgaagaagatttgcagagggcacttgccctcagccgtcaggaaattgatatggaggacgaggaagccgatctgaggagggctatccagctcagcatgcaaggcagctcgcgaaacattagtcaggatatgacccagacgagtggcacgaacctgactagtgaggaattgcggaagcgcagagaggcttatttcgagaagcagcagcaaaaacagcaacagcagcagcagcagcagcagcaaggagacctgagcggccaaagttcccacccatgtgagcgacccgcaacatcttccggagccctgggctccgacctgggcaaggcttgctcaccattcattatgttcgccactttcaccctgtacttaacgtatgagctgcacgtgattttcgccctacattatagctcctttccattgtag

SEQ ID NO: 13914 - DNA, 1119 bp, synthetic construct
  misc_feature 1..1119: note = Description of Artificial Sequence: Synthetic coding sequence
  source 1..1119: mol_type = other DNA
atggagtcaatttttcacgagaagcaggaagggtctctatgcgcacaacactgtctgaacaacttactgcagggggagtatttctctcctgtggagttatcaagcattgcccatcaactggatgaggaagagcgcatgcgcatggctgaaggcggcgtaaccagtgaggactataggacctttctgcagcaaccttctggaaatatggacgacagcggattcttcagcattcaggttattagtaatgcattgaaagtctggggccttgagctgattctcttcaattctcccgagtaccagcggctacgaattgaccccattaatgagaggagcttcatatgtaattacaaggagcattggttcaccgtcaggaagttggggaagcagtggttcaatcttaatagcctgctgacagggcccgagcttatctctgacacttatctggctctgttccttgctcagttgcaacaggaaggatactctatctttgtcgtgaaaggcgacctgccagactgtgaagccgatcagcttttacagatgatcagagtgcagcagatgcaccgccctaagctcattggagaggagctggcacagctaaaagagcagagagttcacaagaccgacctcgaacgggtcctcgaggcaaatgatggttccgggatgttggacgaagacgaggaagacctgcagagagccttggcactaagtcgccaggaaatagatatggaagacgaggaagctgacctcaggagggccattcagttgtccatgcagggcagcagtaggaacatatctcaggatatgacccaaacgagcggcacaaatctgaccagtgaggagcttagaaaaaggagggaggcatacttcgagaagttcgggagaccgcgaagggcggactgccttaggcaacagcagaagcaacagcagcagcaacaacagcagcaacaaggggatttgtccggccagtcatctcatccttgtgagaggccggccacgtcatcgggggctctgggctcagatctcggtgacgctatgtccgaggaggatatgttacaggcggccgttaccatgtcgctcgagaccgtgcgcaacgatttaaaaactgaaggcaaaaagtag

SEQ ID NO: 13915 - DNA, 1128 bp, synthetic construct
  misc_feature 1..1128: note = Description of Artificial Sequence: Synthetic coding sequence
  source 1..1128: mol_type = other DNA
gactccgttagcaagaaaaaacaggaagggagcttatgtgcccaacactgcttaaacaatcttctccagggtgaatacttcagtcctgttgagctctcctccattgcacaccagctggacgaggaggaaagaatgcggatggccgagggcggcgtgactagtgaggactaccgtaccttccttcaacagcccagcggcaatatggacgacagtggttttttctccattcaggtgatcagcaatgcactaaaggtgtgggggcttgaacttattctctttaactccccagagtaccagcggctcagaattgatccaatcaacgagcgcagtttcatctgcaactacaaagagcactggttcacagtaaggaaactggggaagcaatggttcaacctgaattcactcctcaccggccccgagctgatcagcgatacataccttgcccttttcctcgcacaattgcagcaggagggttactccatattcgttgtgaagggtgacctccccgattgtgaggccgaccagttactgcagatgatccgagttcagcagatgcaccgacccaagctcattggtgaggaactagcccagcttaaggagcagagggtgcacaagaccgatctagagagagtgttggaagcaaatgacggttcaggaatgctagacgaagatgaagaggacctgcagagggctttggctctgtcaaggcaggagattgacatggaagacgaggaggccgatctccgccgggcgattcagctttccatgcagggctcgagtcggaatatcagtcaggatatgactcaaaccagtggtactaacctaaccagtgaggaactgaggaagagacgggaagcttacttcgagaagaaattcacagccaatcggaccgaccagcacttccacattctgaagcaacaacaaaagcagcagcagcagcaacaacaacagcagcaaggggacctgagcggccaatccagtcatccatgtgagcggcctgccacctcttccggcgcactgggaagcgatctcggggacgctatgagcgaggaggacatgcttcaagcagccgtgaccatgagcctggaaaccgtgcggaatgaccttaagacggaaggtaaaaaatag

SEQ ID NO: 13916 - DNA, 1125 bp, synthetic construct
  misc_feature 1..1125: note = Description of Artificial Sequence: Synthetic coding sequence
  source 1..1125: mol_type = other DNA
atggagagcatcttccatgaaaagcaggagggttcgctgtgcgctcagcactgtctgaacaatctgttacagggagagtacttttccccagtggagctcagttcaatcgcccatcaacttgacgaagaagaacgaatgcgaatggctgagggaggggtcacatctgaggactaccggactttcctacaacagccctctggaaatatggacgactcaggatttttttcaatccaagtgatctcaaatgcattgaaagtttggggcctcgaattgatcctgtttaacagccccgagtatcagcggttgcgaatcgaccccattaatgaacgaagcttcatttgcaactataaggagcactggttcaccgtacgcaaactgggtaagcagtggttcaatctgaactcactgctaaccggacccgaactcatttccgatacctacctcgctctgtttctggcacagctacagcaggaaggatactcaatctttgtggtgaagggcgacctccctgattgtgaggcggatcagctcctgcagatgatccgtgtacaacagatgcatcggcctaagcttatcggcgaggagctggcccagttgaaagaacaacgagtccataagacagacttagaacgagttctggaagccaacgatggcagtggtatgttagacgaggatgaggaggaccttcagagagctctagcactgagtcggcaagagatcgatatggaggacgaggaagccgatttgcggcgggccatccagttatccatgcaggggagtagtaggaatatatcccaagatatgacacagactagcggaacaaacctgacatcagaagaactaagaaagagacgcgaggcttactttgaaaaggtatttttcaaaaacctacagcagatcggccgtgcacgtcagcaacagaagcagcagcagcagcagcagcagcaacagcagggcgatctgtcagggcagtcctcccatccgtgtgagaggccagccacaagctccggggcactcggtagcgacctgggcgatgccatgtccgaggaggacatgctacaggctgccgttaccatgagcctagagaccgtcaggaacgatctgaagacagagggcaaaaagtag

SEQ ID NO: 13917 - DNA, 1113 bp, synthetic construct
  misc_feature 1..1113: note = Description of Artificial Sequence: Synthetic coding sequence
  source 1..1113: mol_type = other DNA
atggagtccatcttccatgagaaacaggagggcagcttgtgcgctcaacactgtctgaataatctccttcagggagagtacttcagcccagtcgaactgtcaagcatagcgcaccaattggacgaggaggagcggatgcggatggccgaagggggagtgacctcagaggattaccggacctttcttcagcagcccagtggaaacatggacgactctggcttcttttcaatccaggtgatcagcaacgccctcaaggtgtgggggttggagctcatactgtttaacagtccagagtaccagcggctgcgcatagacccaatcaacgagaggtcttttatctgcaattacaaggagcactggttcacagtgcgcaagttagggaagcagtggttcaatttgaattctcttctcacaggaccagaactcatctctgacacgtacttagctctctttttggctcagctgcagcaggaaggatactctatcttcgtcgtcaaaggggatctaccagattgtgaagccgatcagctactgcagatgatccgcgtgcagcaaatgcatcgaccaaaactgatcggggaggagctcgctcaacttaaggaacagcgggtccacaagactgatctcgaacgcgtactggaggcgaatgacgggtctggtatgcttgacgaggacgaagaggatcttcagagagcgttggccctcagccgccaggaaattgatatggaggacgaggaagccgacctccgtcgggccatccagctttccatgcagggcagtagcagaaatatctcccaggatatgactcagacttctgggacgaacctcactagcgaagagctccggaaacgaagggaggcatatttcgaaaaaatctacttcaccttcgagtgtttcagacagcagcaaaaacagcagcagcagcaacagcaacagcagcagggcgacttgagtggacagtcctctcatccgtgcgagcggccagcaacctctagcggcgcactggggtccgaccttggcgacgccatgagcgaagaagatatgctacaggctgcagttacaatgagcctcgagacagttcggaatgatctcaagaccgaaggcaaaaaatag

SEQ ID NO: 13918 - DNA, 1134 bp, synthetic construct
  misc_feature 1..1134: note = Description of Artificial Sequence: Synthetic coding sequence
  source 1..1134: mol_type = other DNA
atggagtccatctttcatgaaaagcaggagggctctttatgcgcacagcactgcttgaacaatctgctacaaggtgagtattttagtcccgtcgagctgtccagcatcgcgcaccaactcgacgaggaagaacgtatgagaatggcagagggtggggtgacgtccgaggattaccggactttccttcagcaaccaagtggcaacatggatgatagcgggtttttctcaatccaggtgatttcaaacgcactgaaggtatggggcttagaactgatcctgtttaactccccagagtaccagcggctgcgaattgacccgataaatgagcgatcatttatctgcaactacaaggagcactggtttacagtgcggaagcttggaaagcagtggttcaatctgaatagcctgttgaccggccccgaacttatctctgacacctacctagcactcttcctggcacaattgcagcaggagggttacagcatctttgtggtgaagggagatttgcccgactgtgaggcagaccagttgcttcagatgatccgagtgcaacagatgcacaggccaaaactcatcggtgaagaactggctcagttgaaggagcaacgagtccataaaactgatttagagcgcgtgctagaggccaacgacggttctggaatgttggacgaagatgaagaagatctgcagcgagcgctggcccttagtcgccaagagattgatatggaggatgaggaagccgacctcaggcgtgctattcagctaagtatgcaagggtcctccaggaacatctctcaggatatgactcagacatccggaacaaatttaaccagtgaagaactcagaaagcgacgtgaagcatacttcgagaaggtgttctttaaaaacctgcagcaaaaccagcacttccatatcctcaagcagcaacaaaaacagcagcagcagcagcaacagcagcagcagggcgacctctctggacaatcatcacacccttgtgagagacccgctaccagctctggcgccctgggtagcgacctgggggatgccatgtcggaagaggatatgctgcaggctgccgtgaccatgtcattggagacagtccgtaacgaccttaagacagaaggcaaaaagtag

SEQ ID NO: 13919 - DNA, 549 bp, synthetic construct
  misc_feature 1..549: note = Description of Artificial Sequence: Synthetic coding sequence
  source 1..549: mol_type = other DNA
atgatacgcgtgcagcaaatgcaccgaccaaaattgataggagaggaactcgcacaacttaaggagcagagagtccataagacagacctggagcgcgtattggaggcgaatgacgggtctgggatgctggacgaggatgaggaggacctccaaagggccctcgctctttcccggcaggagatagacatggaggacgaggaagcggacctgagaagggccatccagttgtctatgcagggctcgagtcgcaacatctcccaggatatgacacaaactagcggaacaaatctgacctctgaggaactgaggaaacgccgggaggcctatttcgagaagcaacagcagaagcaacaacagcagcagcagcagcagcaacagggcgatctgtcaggacaatcttcccacccctgtgaaaggcctgccacatcgtctggggccctgggttctgatctgggcgatgcaatgtcagaagaagacatgctccaagccgcagtgaccatgtccctcgagaccgtccgtaacgatctcaagacagaaggcaagaagtag

SEQ ID NO: 13920 - DNA, 3306 bp, synthetic construct
  misc_feature 1..3306: note = Description of Artificial Sequence: Synthetic coding sequence
  source 1..3306: mol_type = other DNA
atgagcgctaaggccattagtgaacagactggaaaggaacttctgtataagttcatttgtacaacctccgctatacagaatcgatttaagtacgcgagagtgacacctgacaccgactgggctcgacttctccaggatcacccctggctcctgtcgcaaaaccttgtggttaagcccgaccagctcatcaaacggaggggcaagttgggactggtaggcgtaaatctgaccttagacggtgtcaagagttggctgaagccacgacttggccaagaagcgacagttgggaaagccacaggctttctgaaaaacttcctcattgaacccttcgttccccattcccaggctgaggagttttacgtgtgcatatacgccaccagagagggggattatgtgctgtttcatcacgagggtggcgttgacgtcggcgacgtggacgccaaagcccaaaagctgctcgtaggcgtagatgagaagctcaaccccgaggatataaaaaagcacctgctcgtgcatgctcctgaggacaagaaggaaatattggcctcgtttatctccgggctattcaacttttacgaggatctctactttacctatctcgaaatcaatcctttagtagtgaccaaggacggcgtatatgttctagatctcgcagccaaggtcgacgctacagcagattatatttgcaaggtcaaatggggggacatcgaatttcctcccccgttcggccgagaagcttatcccgaggaggcgtatatagccgaccttgatgcaaagtccggagctagccttaagcttaccctgctgaatccaaagggccgcatctggacaatggtagctggcggcggagcctcagtcgtgtattcagacacaatctgcgatttggggggtgtcaacgagctcgccaattatggagaatacagtggcgcccctagcgaacagcagacgtatgattatgcgaagaccattcttagcctgatgacgcgtgagaaacatccagacggcaaaattcttattatcggtggctcaattgccaactttaccaatgtggcagccaccttcaaaggcatcgtgagggccatccgggattaccaagggccactcaaggaacatgaagtcaccatcttcgtgaggcggggtggaccaaattatcaggaaggactacgcgtgatgggggaagtcggaaagacaacgggcatccccatccatgtgtttggaacggaaacacacatgaccgcgattgtcgggatggctttaggacaccggcctattccaaatcaaccgcccaccgcagcccacacagcgaattttctgctcaatgcctctggctctaccagtactccagctccgtctcgtacagcctcgttctccgagtcaagggctgatgaggtcgctcccgccaagaaagcaaagccagctatgccccaggacagtgtaccctctccccggtcactccagggtaaaagcaccaccctgttctcaagacacacaaaagcgatcgtctggggcatgcagactcgcgccgtacaaggcatgctcgattttgattacgtctgctctcgagatgagccctctgtggctgctatggtgtacccatttacgggcgaccacaagcaaaagttttattgggggcacaaggagatattaatacctgtgttcaagaacatggctgacgccatgagaaagcaccccgaggttgatgtcttgatcaactttgctagcctgaggtctgcatacgacagtacaatggagaccatgaattatgcccaaatccgaactattgctataattgctgaaggcatacctgaggctttaacaaggaaattaattaaaaaggccgaccaaaagggcgtcaccatcattggaccagccacagtgggcgggattaagcctgggtgctttaagataggtaatacaggtggcatgcttgacaatatcctggctagcaagctctataggcccggtagcgtagcctacgtttcccgcagtggaggaatgtcgaatgaactcaacaatatcattagtagaaccactgacggggtatacgagggtgtggccattggtggggatcggtacccgggcagcactttcatggatcatgttctgagataccaagatacgcccggggtgaagatgatcgtggtgcttggggaaattggcggtacggaggagtacaaaatatgcaggggcatcaaagagggaagactgacaaaaccaatcgtctgttggtgtataggcacttgcgcaactatgttctctagcgaggtacagtttggacatgccggcgcatgcgcaaatcaggcctccgagactgccgtggccaaaaatcaggccctaaaggaggccggcgttttcgtgccaaggtccttcgacgagttaggggagatcatccagtctgtgtacgaagacctggttgcaaatggcgttatcgtgcccgcccaggaagtgcccccgccgaccgtgcccatggattactcctgggccagagaactcggtttgattcgcaagcccgcttcattcatgaccagtatctgcgacgaacgtggacaggaactgatatatgctggaatgccaatcaccgaggtcttcaaggaagagatgggcattggtggcgtgctgggtctgctgtggttccaaaaacgcctgcccaagtattcatgtcagtttattgaaatgtgtctgatggttacagccgaccacgggcctgccgtctctggagcacacaatactattatttgcgcaagagccggaaaagatcttgttagtagcctgacttccgggcttctgacaattggcgatcgattcggcggcgctttggatgcagccgcaaagatgttttcaaaagctttcgacagtggcattatcccaatggaatttgtgaataagatgaaaaaggagggcaagttgatcatggggattggtcatagggttaaaagcatcaacaatcctgacatgcgagtgcaaattctaaaggactatgtgcgccagcactttccagcgactcctctgcttgattacgcacttgaggtggagaaaatcacaacatctaaaaaacccaacctgatcctgaacgtcgacggactgataggagtggccttcgtggacatgttacggaattgcggatccttcacccgcgaggaggcggacgaatacattgatatcggggcactcaacgggatcttcgttctggggcgttccatggggtttatcggccactacctggaccagaaaaggctcaagcaaggcttatatcgtcatccctgggacgatatctcctacgttttgcccgagcacatgtccatgtag

SEQ ID NO: 13921 - DNA, 3276 bp, synthetic construct
  misc_feature 1..3276: note = Description of Artificial Sequence: Synthetic coding sequence
  source 1..3276: mol_type = other DNA
atgagcgccaaagccatttctgaacagactggaaaggaacttttgtacaagttcatctgtacaaccagtgcaatccagaatcggttcaagtacgcgcgagtgacgcctgataccgattgggccaggctcctgcaggatcacccatggcttctctctcagaatcttgttgttaaacctgaccagctgattaaacggcgcgggaagctcgggctggtcggcgtaaacctgaccttggacggcgtcaagtcttggctgaaacctagactgggccaggaggccactgtgggcaaggccaccgggttcctgaagaactttcttatcgagcctttcgtgccacactcccaggcagaagagttctatgtttgcatctacgcgactcgcgagggggactatgtgttattccaccatgaggggggggtcgatgttggcgatgtagacgccaaagcccaaaagctgctcgtcggtgtggatgagaagctgaatccagaggacattaaaaagcacctcttagtccatgcacccgaggacaagaaagagatactggcctcgttcattagcgggttgttcaacttctatgaggacctgtattttacgtacctggaaatcaatccactggtggtgactaaagacggggtgtatgtcctggatctcgcggcgaaggtggatgctaccgctgactatatctgtaaggttaagtggggagatattgaatttccacccccgtttggaagagaagcctacccagaggaggcgtacatcgctgaccttgacgcaaagtcaggagcttcactgaaattgactctcctgaaccccaagggcaggatctggaccatggtagccggcgggggcgcctcagtagtgtattcggacactatctgcgatcttgggggtgttaacgagctggcaaattatggtgaatactccggagccccatcggaacagcagacttatgattacgccaagacaatcctatccctgatgactagagagaagcaccccgacggcaagattttaatcatcggaggttcaatcgctaacttcactaacgttgctgcaaccttcaagggtatcgtgagggctatcagggactatcaggggccactgaaggagcacgaggtgaccatctttgtacgaagagggggtccaaattaccaagagggcctgagagttatgggagaagtgggcaagacaacaggaatccctatacatgttttcgggaccgagactcacatgactgctattgtgggtatggccctcggccacaggccaataccaaatcaacccccaactgccgcacatacagctaacttcttgttgaatgcatcaggcagtacaagtacccctgcgcctagccgaaccgcatccttcagcgaaagccgcgctgatgaagtggcacccgccaaaaaagcgaaacctgctatgccgcaaggcaaaagtaccacactgttctcacggcatacaaaggcgattgtctggggtatgcagacccgagccgttcagggaatgttggatttcgactatgtctgtagccgggatgagccctcggtggccgctatggtttacccattcactggcgatcataagcagaaattctactggggacacaaggagattttgattcccgtgttcaaaaacatggctgacgctatgagaaagcatcctgaggtggacgtgctaattaacttcgctagcctcaggagcgcatatgactccactatggaaactatgaattatgcccagattaggacaatcgccattatcgctgagggaattcctgaagccttgacaaggaaactaattaagaaagcagaccagaagggggttaccatcatcggccccgccactgtaggtggaattaagccaggatgctttaagataggtaacactggggggatgcttgataacattcttgccagcaagctgtataggccaggctcagtcgcgtacgtgagccgcagcggaggtatgtccaacgagttgaacaacatcatttcaagaacaactgacggcgtgtatgagggcgtcgcaataggaggggaccggtatccaggatcaacttttatggatcacgttctgcggtatcaggacactccgggggtaaagatgatcgtcgtactgggggagattggaggcacggaggaatataagatctgcagaggcatcaaggagggccgcctgaccaagcccattgtctgttggtgcatcggcacatgtgctacaatgttttcttccgaagtccagtttggccatgccggcgcctgcgccaaccaagcaagcgagaccgctgttgcgaagaatcaggccctaaaagaagccggcgtttttgtcccccgatcgttcgatgagctaggggagattattcagagtgtatacgaagatctcgttgctaatggcgtgatcgtaccagcgcaggaagtgcccccccccactgtgccaatggactacagttgggctcgggagctcggcctcattcggaagcccgcctcgtttatgacaagtatatgcgacgaacgaggtcaggagctgatttatgcaggaatgccaattacagaggttttcaaggaggaaatgggaatcggcggcgtgctgggcttactatggtttcagaaaaggctccctaagtacagttgccagttcatcgagatgtgcctgatggtaacagcagatcatggacccgccgtctccggcgcacataacaccatcatatgtgctcgcgctggaaaagatttggtgagttctcttacgtccggactgctgaccattggtgatcggtttggaggggctctggatgcagccgccaagatgttcagtaaggcttttgattccggaatcattccaatggagtttgttaacaagatgaagaaggaggggaagttaataatgggcattggacatagggtaaagagcattaacaatcccgacatgagagtacaaattctgaaagactatgtgcgtcagcatttcccggccacacctctgctagactatgcactggaagtggagaagatcaccacctcgaagaaaccaaatctcatcctgaacgtggatggactgattggagtggccttcgtggatatgctgcgcaattgtggcagtttcacacgggaagaggcggatgagtacatcgacattggggcgctgaacgggattttcgtgctggggagaagtatgggatttattgggcactacttggaccagaagagactcaaacagggcctttataggcacccttgggatgacattagttatgttctcccggaacacatgtccatgtag

SEQ ID NO: 13922 - DNA, 3276 bp, synthetic construct
  misc_feature 1..3276: note = Description of Artificial Sequence: Synthetic coding sequence
  source 1..3276: mol_type = other DNA
atgagtgccaaggccatctccgagcagacggggaaggagctcttgtataagttcatatgcaccacgtccgctatacagaataggtttaaatacgccagggttacaccagataccgattgggctcgactgttgcaggatcacccttggctgctgtctcaaaatttggtagtcaaacctgatcagttgattaagcggaggggcaagctggggctcgttggcgttaatctgacgttagacggggttaaaagctggctgaagccaaggctcggccaggaagcaactgtaggaaaagccacaggctttttgaaaaattttcttatcgagccattcgtgccacattcccaagccgaagagttctacgtctgtatttacgctaccagggaaggtgattacgtcctgtttcatcatgagggtggggtggatgtaggcgatgtagacgcaaaggctcagaagctgctggtcggcgtcgacgagaaacttaaccctgaggacattaaaaaacacctgctggtgcatgccccagaagacaagaaggaaatcctcgccagctttattagtggactattcaatttttatgaggacctgtacttcacctatctggaaattaatcccctcgtcgtcacaaaggacggcgtttacgtgctcgacctggccgcgaaggtcgatgcgacagcagactatatttgtaaagtgaaatggggcgatatcgaattccctcctccttttggcagggaggcctatcctgaggaagcatatattgccgacctggatgccaagtcaggggcctcattgaaactaaccctcctgaatcctaaaggacggatctggacaatggtggccggcggcggcgcctctgtggtgtacagtgacaccatatgtgacctgggcggcgtgaatgaactggctaactacggggagtactcaggtgccccttcggaacaacagacgtacgactacgccaaaactattctgtcgcttatgacccgggagaagcaccctgacggaaaaatcctgattattggaggatcaattgcaaatttcacaaacgtggctgccacctttaaaggtattgtgagggcaatacgcgattaccaaggtccgttgaaagaacacgaagtcaccatattcgtgcggcgcggcggaccgaattatcaagagggcctgcgggtaatgggtgaggtggggaagactacaggcatcccaatccatgtgttcgggactgaaactcatatgactgccatcgtagggatggcactaggtcacaggcccattccgaatcagcctccgacagcggcgcatactgccaactttctgctgaatgccagtggttccaccagtacgccagcccccagcagaactgccagtttctcagagtccagagcagacgaggtggcaccagccaagaaggctaagcctgcgatgccccaggggaagtccacaaccctgtttagccgccataccaaggccattgtctggggtatgcagaccagagctgtacagggcatgctagattttgactacgtgtgttccagggacgagccctccgtcgccgcgatggtctacccgttcacaggtgaccacaaacagaaattttactggggccacaaagagatactaatccctgtgttcaagaacatggccgatgccatgagaaagcatcctgaggtggatgtgcttattaacttcgcctcacttcgttctgcttatgacagcacaatggagactatgaactacgcacagattcgaacgattgctatcatagcagaaggcatccctgaggcactcactcgaaagctgattaaaaaggctgaccagaagggtgtaaccatcatcggacctgcaaccgtgggaggtatcaagccgggctgtttcaaaatcggcaacaccggtggcatgcttgataacattttagcatccaagttgtatcggcccgggtccgtggcctacgtgtcacgaagcgggggcatgtccaacgagctgaacaacattatttcgagaaccacagacggagtgtacgagggagttgccatcgggggcgaccgctaccctgggtccacattcatggatcacgtgctgaggtaccaagacacacctggcgtcaagatgatagttgtgctcggagagatcggcggcacagaggagtacaagatctgcagaggcatcaaggaaggccgacttaccaagcccattgtgtgctggtgtattggaacttgcgcaacaatgttctcgtctgaggtgcagttcggtcacgcaggagcgtgtgctaatcaggcaagcgaaacagcagtagctaagaatcaagcactgaaagaggcgggagtgttcgtgcctagatctttcgacgagctcggcgaaattattcaaagcgtgtatgaagacctcgtcgccaatggcgtgatcgttccagctcaggaggtaccaccacctaccgtacccatggattatagctgggccagagaactgggtctcatccgaaagcccgcgtccttcatgacttctatctgcgacgagaggggccaggaactcatctatgctggaatgcccatcaccgaagtgttcaaagaggaaatggggattggaggcgttctgggcctgctctggttccagaagcgcctgcctaagtattcatgtcaatttattgagatgtgtctcatggttaccgctgatcatggtcctgcggtttctggcgcacacaacacaattatatgtgcaagagcaggaaaggatctggtctcctcactaacttccggcctattaactatcggggaccgctttggaggagccctggacgccgctgccaagatgtttagcaaggccttcgacagcggaatcatccccatggaattcgttaataaaatgaagaaagaaggtaaactgatcatgggaatcggtcatagagtgaagtccataaacaacccagacatgcgtgtccagatactgaaggattatgtgcgccaacatttcccagctaccccactcctggactatgctctggaggttgaaaagataaccacttccaagaaacccaaccttatcctcaacgttgatggcctgatcggggttgccttcgtcgacatgctcagaaactgcgggtcctttacacgggaagaagcagatgaatatattgatattggggccctgaacgggatctttgtgctgggaaggagtatgggcttcatcggccactatctggatcaaaagaggctgaagcaggggttgtaccggcacccgtgggatgacatttcctacgtgcttccggagcatatgtctatgtag

SEQ ID NO: 13923 - DNA, 3468 bp, synthetic construct
  misc_feature 1..3468: note = Description of Artificial Sequence: Synthetic coding sequence
  source 1..3468: mol_type = other DNA
atgggggcaggaaaaagtcccgctggcccaggccaaaagccagatccaggtaagcttcccgctgctggggtcttaagaatcttaagaggctcctctggcctatggaagaaacgcagagcaaggactagtgctgagactggaagagctgggctgagcgcggcaatgagcgccaaagccatcagtgagcagacaggtaaggaactcctctataagtttatttgcacaacctcggccatccagaacagatttaagtacgccagagttactcctgacaccgactgggctcgactgcttcaggatcatccctggcttctttcgcagaacctcgttgttaagcccgatcaattgattaaacgccgcggaaaactgggcttggtaggggtgaatctcacattagacggcgttaaaagttggctgaagcccagactaggccaggaggctacggtcggcaaggccactgggttccttaaaaacttcctgattgaaccattcgtgccacattcacaggcggaagagttctacgtgtgcatctacgctactcgcgaaggggactatgtgttgttccatcatgagggtggcgttgatgtaggcgacgttgatgccaaggcccagaaactgctagtaggagtggacgaaaaattaaacccagaagatatcaagaaacacctgttagttcatgctcctgaagacaagaaagaaatcctggcaagcttcatcagcgggctttttaacttctacgaagatttgtattttacctacttggaaatcaatcctctggtggttaccaaagatggggtgtatgtgttagacctggcggccaaggtggacgcaactgccgactacatttgcaaagtcaaatggggagacatcgagtttcctcctccatttgggagggaagcttaccctgaagaggcctacatagctgatctggacgccaagtctggcgcgtcactgaagcttaccttgctgaatccaaagggaaggatttggacaatggtggctggaggaggagccagcgtcgtttacagcgatacgatttgtgatctcggaggcgtcaacgaactggcaaactatggcgaatattctggcgccccgagcgagcagcagacatacgactatgcgaagaccattctgtccctgatgacgagagaaaagcaccctgacgggaagatcctgataatcggaggaagtatcgcaaacttcacgaatgtcgccgcaacctttaagggcattgttagagcgattcgagactaccaggggcccttgaaagagcatgaagtcacaatcttcgtgaggaggggtgggccaaactatcaggagggcctccgagtcatgggggaagtcggaaaaacgactggcatcccaattcacgtgtttgggactgagactcacatgaccgctatcgtgggcatggccctgggccaccgtccaattccgaatcagcccccaaccgcagcccacactgcgaattttctgttgaatgcctctggcagcacatccactcctgccccaagcagaaccgcaagtttctctgagagtcgtgctgatgaggtggcgcccgcgaagaaagcaaagcctgctatgcctcaggacagcgttccatcccctagatccctgcagggcaaatctacaacattgttttctcgacacactaaagccatagtgtgggggatgcagactagagcagtccagggaatgctggactttgactacgtctgctcccgagatgaaccaagtgtggccgctatggtatacccctttacgggggaccataaacagaagttctactggggccacaaggaaatcctgatccccgtcttcaaaaatatggcagatgccatgcgtaaacacccagaagtagacgtgcttatcaactttgctagtcttaggtctgcgtatgatagcaccatggagaccatgaattacgcccagatcagaaccattgccattatcgccgaaggaatccctgaggcactcacacgcaagctcattaaaaaggctgatcagaaaggggttaccatcattggcccagcaactgtcggcggaatcaaacccgggtgcttcaaaatcgggaatacgggagggatgctcgacaatatcctcgcatcaaagctgtaccgccctgggagcgtagcttatgtctccagaagcggcggtatgtctaatgaactgaataatatcatcagcaggactactgacggcgtttatgagggggttgcaatcggcggtgaccgatatcccggaagcacctttatggaccatgtgctgcgatatcaagacacacctggggtgaagatgatagtcgtgctaggggagatcggaggaactgaagaatataagatctgtcggggaataaaggagggccggctaacgaagccaatagtgtgttggtgcattggtacctgtgctactatgttttcctcggaggtgcagttcggccacgcgggtgcctgcgctaaccaggctagcgaaacggccgtcgccaaaaaccaagccttgaaggaagcaggcgtgttcgtcccccggtctttcgacgagcttggggagattatccagagtgtgtacgaggacctggtggctaacggggtcatcgtaccagcacaggaagtgcctccccctaccgtgcctatggactacagctgggccagagagcttggcctgatcaggaaaccggcttcattcatgacaagtatctgcgatgaacgcggtcaagagcttatttatgctggcatgccgattaccgaggtcttcaaagaggagatgggcatcggaggagtcctgggtctcctctggttccaaaagcgcctgccaaagtactcctgccaattcatagaaatgtgcctaatggtcaccgccgatcacggccctgctgtgtcaggcgcccacaatacaataatttgtgcccgggctgggaaggatctcgtaagtagtttgacatccggcctgctgacaatcggagacaggtttgggggagccttggatgctgcagcgaaaatgttttccaaagcatttgactcaggcatcatacccatggaatttgtaaacaagatgaagaaagagggtaaactcatcatggggattggtcatcgagtgaagtccattaacaacccagatatgcgcgtgcagatccttaaagattacgtgagacaacacttcccggccactcccctgctcgattacgctctggaagtggaaaagatcacaacaagcaagaagcccaatctcatcctgaacgtcgatggacttattggtgtagcttttgtagatatgctgaggaactgtggctctttcacacgagaggaggctgatgagtatatcgatatcggagctttaaacggcatctttgtcttagggagaagcatgggttttattggccactacctcgaccagaagcgcctcaaacaggggctgtatagacatccttgggacgacatttcgtacgtgttgccggagcacatgtcgatgtag

SEQ ID NO: 13924 - DNA, 2493 bp, synthetic construct
  misc_feature 1..2493: note = Description of Artificial Sequence: Synthetic coding sequence
  source 1..2493: mol_type = other DNA
atgtccgcaaaagccattagcgagcaaacagggaaggaactgctgtacaaatttatctgtactacgtctgccattcagaaccgcttcaagtacgcccgggtaacaccagatacagattgggcacgacttctgcaggatcacccctggctgctttctcaaaatttggtagtcaaacctgatcaactgatcaagcggcgcggcaaattgggactggttggcgtgaaccttacccttgatggcgtgaagtcatggctgaaacctcgtctgggccaggaagccacgggcatcgtgcgggcaatccgcgattatcagggcccgctgaaagagcatgaggtgactatatttgtccgccgaggaggccccaattaccaagaaggactgcgagtgatgggcgaggtggggaaaacaacaggaatccccattcacgtttttggcaccgagacacatatgaccgccattgtggggatggcattagggcatcgccctatcccgaatcagcctcctacagcggcccacactgctaactttctactgaacgccagcggcagcaccagcaccccagctccctcgcgcactgcaagtttttccgaatcacgggccgacgaggtcgcacctgctaagaaagctaagcctgccatgccacagggcaagtctacaactttgttctcacgccacacaaaggccatcgtatggggaatgcagacacgtgctgtccagggaatgctggactttgattacgtctgctctcgggatgaacccagcgtggcggccatggtgtacccgttcactggcgaccacaagcagaagttctactggggacataaggagatccttatcccagtctttaagaacatggcggatgccatgaggaaacacccggaggtagatgtacttataaacttcgcaagcctcagatcagcatatgatagtaccatggagacaatgaactacgcccagatccgcacaattgcgatcatcgccgaggggattcctgaggcccttaccaggaaactgattaagaaagcagaccaaaaaggggtgaccattattggccccgccaccgtaggaggaatcaaacccggctgctttaagattggcaatacgggcggtatgctggacaatatacttgcatccaaattgtaccgacccggctccgtcgcttatgtgtcacgcagtggcggcatgagcaatgaactgaataatattatcagccggaccaccgatggggtgtatgagggcgtcgccattggcggcgacagataccctggttcaacattcatggaccacgtgttgcgctaccaagacacacctggagtgaagatgatcgtggtcttgggggagatcgggggtacagaggagtataagatctgtcggggaatcaaagaaggccgtttgactaaacctatcgtgtgttggtgtatcggaacgtgtgccacaatgtttagtagcgaggttcagttcggccacgctggcgcctgtgccaatcaagcttccgaaacggctgttgcgaagaatcaggcgctgaaagaagccggggtttttgtcccgcgatcttttgatgagttgggcgagatcattcagagcgtctatgaggatctagttgctaatggcgttatcgtccctgcccaggaagtgccgccaccaaccgtgccgatggactattcctgggcccgggagctgggtttgattcgaaagcctgcaagtttcatgactagtatctgtgacgagcggggacaagagcttatctacgccggcatgcctatcaccgaagtgttcaaagaggagatggggattgggggagtgcttggcctgctgtggtttcagaagcgactgcccaagtacagctgtcaatttatagaaatgtgtctgatggtgacggccgatcacggcccagccgtgagtggagctcacaacacgattatctgtgcccgcgcaggaaaagacctagtgtccagcctgacaagcggcctgttgaccattggggaccgctttggtggtgcattggatgcggccgctaaaatgtttagcaaggcctttgacagtgggataatcccaatggaattcgtgaacaagatgaaaaaagagggtaagcttattatggggatcgggcatcgcgttaagagcattaataaccccgatatgagagtccaaatcctgaaggactatgtgaggcagcactttcccgctacgcctttgctggattacgccctcgaggtcgaaaagataactacaagtaagaaaccaaacctgattcttaatgtggacgggctcattggtgttgcctttgtcgatatgctgcgcaattgtggatcctttacacgagaagaagccgacgaatacatcgatatcggtgccctgaacgggatcttcgtactgggcaggtcgatgggcttcatcggacactatttggaccagaaaagactgaagcagggtctatatcgacacccttgggacgacataagttacgttttgcccgaacacatgtccatgtag

SEQ ID NO: 13925 - DNA, 1512 bp, synthetic construct
  misc_feature 1..1512: note = Description of Artificial Sequence: Synthetic coding sequence
  source 1..1512: mol_type = other DNA
atgagctccatcctcgaggagagaatcctcggtgccgatacctccgttgacctcgaggaaacagggcgggtgctgtccatcggggatgggatcgccagagtccacggtttgcggaacgtgcaggccgaggagatggtggaattctcttcaggcctgaagggaatgtcgttaaacctcgagccagacaacgtcggtgtggttgttttcggcaatgacaaattgattaaggaaggcgatatagttaagcgaacaggtgctattgtcgacgtgcccgtgggggaggagctattgggaagagtggtcgatgctctgggcaatgcgatagacggcaaaggacccattggatccaagacaagacgcagagtgggtttgaaggctcctggaattattccacgcatctccgtacgtgaacccatgcagaccggcattaaggcagtggatagcctcgtccctatagggcgggggcagagggagctcatcattggagatcgacaaaccggtaagaccagcatcgcgatcgacaccattattaaccagaaaagatttaacgacggaagcgacgagaagaagaagctgtattgtatctatgtggccataggccagaaacgctccacagtggcacaactggttaagcgcctgacagatgccgacgctatgaaatacaccattgttgtcagcgcaaccgccagcgatgcagctcctctccagtacctcgccccatattcaggttgcagtatgggagaatattttagagacaacggaaaacacgccctcatcatctatgacgatctttcaaaacaggctgtggcctatcggcagatgtctctgctacttagaaggcctcctggccgcgaagcttatccaggcgatgtcttctacctgcatagccggctactcgaacgagctgcaaagatgaatgacgcgttcgggggaggctctctcaccgctctgcctgttattgagactcaagccggcgatgtgtctgcttatatccctacaaacgttatctccatcaccgacggccagatttttctggagaccgaactgttttataagggaatccgacctgcaattaacgtgggactttccgtttctcgggtcggctccgctgcccagactcgcgcaatgaaacaggtggctgggacaatgaaattagagttggcacagtaccgcgaagtagctgcgttcgctcagtttggttctgatctcgatgcagcaacgcaacaacttttgtccaggggcgtccgactcactgagctcctgaagcagggccagtatagccccatggctatcgaagagcaggtggcagtcatttatgcgggagtgcgcggctatttggataagctcgagcccagcaaaataactaagtttgaaaacgcatttttgtcacacgtggtgtctcagcatcaggctcttttgggcaccattcgggccgatggaaagatctccgaacagtcagatgctaagctcaaagaaatcgtcaccaattttttagcaggatttgaggcttag

SEQ ID NO: 13926 - DNA, 177 bp, synthetic construct
  misc_feature 1..177: note = Description of Artificial Sequence: Synthetic coding sequence
  source 1..177: mol_type = other DNA
atgctgtccgtgagagtggctgctgcagtggtgcgagccctcccgaggcgagctgggttggtctcccggaacgccctaggctcaagctttatagccgccagaaacttccacgcgagcaatacgcatttgcagaagacaggcaaattgctgttcctatcactcaggaggacgtactag

SEQ ID NO: 13927 - DNA, 1596 bp, synthetic construct
  misc_feature 1..1596: note = Description of Artificial Sequence: Synthetic coding sequence
  source 1..1596: mol_type = other DNA
atgctgtcagtgagggtggcagccgccgtggtgagggccttgcctaggcgagcaggcttggtctcgcgcaacgccctagggtcgagtttcatagccgctcggaacttccacgccagcaacacccacctccagaagaccggaactgccgagatgtcttcgatcctggaagaacggatcctgggggcagatacaagcgtggatctggaggagaccggcagagtattgtccatcggggacggaatagctcgtgttcatggcttgaggaacgtgcaggctgaggagatggttgagttctcgagtggtctgaagggaatgtccctgaatttggaacctgacaatgtcggcgtcgtggtttttgggaacgacaaactgatcaaggagggggatattgttaaaagaaccggagccattgtggacggtccaatcggctcgaaaacgcgaagaagggttgggctgaaggctccagggatcatcccccggataagcgtgagggaacccatgcagactggtataaaggcggtcgattcgttggttccaattggtcggggccaaagagagctcatcattggagaccggcaaaccggaaaaacctcaattgcaattgacactatcataaaccagaagcgctttaacgatggctcagatgaaaaaaagaaactctactgtatttatgttgctatcggccagaaacgttctaccgtggcccagctcgttaaacgcctcaccgacgcagatgctatgaaatataccattgtggtgtcggctactgccagcgacgccgctcctctgcagtacctggccccatattccggctgctccatgggtgagtattttcgggataatggtaaacacgccctcattatttacgacgatctgagtaaacaggccgtggcgtaccggcaaatgtctttgctgcttcgacgtccgcctgggcgggaggcatacccaggtgatgtcttttacctccactccagacttcttgagagagcggcaaagatgaatgacgctttcggcggcggctcactcacagctctccctgttatcgagactcaggcaggggacgtaagcgcctacattcctactaatgtaatttcgataaccgacgggcagatcttcttggagaccgagcttttctataaaggtatccgccctgcaattaatgtcgggctttccgtatcacgcgttgggtccgccgctcaaacccgggctatgaaacaagtcgctggcactatgaagctcgagttggctcagtacagggaggtggctgcctttgcccagtttgggagcgacctagatgccgcaacgcagcagttgctgtcacgcggcgtgcgtttaactgaactgttgaagcaggggcaatactcaccaatggctattgaggaacaggtggccgtgatctacgccggagtaaggggctatctggataaactggagcctagcaagattacaaagttcgaaaatgcctttctgtctcacgtggtgagtcaacaccaagccctcctgggcactatccgggcagacggcaagatttctgaacagtccgacgcaaaactgaaagaaatcgtcaccaattttctcgccggctttgaggcatag

SEQ ID NO: 13928 - DNA, 1662 bp, synthetic construct
  misc_feature 1..1662: note = Description of Artificial Sequence: Synthetic coding sequence
  source 1..1662: mol_type = other DNA
atgttgtctgtccgcgttgccgcagctgtcgtgcgggcattgcctcgtcgagccggactcgtgtcccgtaacgccctgggcagctctttcattgccgctcggaattttcacgcgtccaacactcatttacagaagactggtacggcagagatgtcttctatcttggaggagcgaatcctcggcgcggacaccagcgttgatttggaggaaactggacgcgtgctgagtatcggagacggaattgctcgagtccacgggctgcgaaacgtgcaagccgaagagatggtggagttctcttctgggctcaaggggatgagtttaaacctggaacccgacaatgtgggggtcgtcgtgttcggcaatgataagctgatcaaggaaggggacattgtcaagaggacgggggccattgtggatgtgccagtgggcgaagaactcctgggacgcgtcgtggacgcattaggcaatgcaatcgacggcaagggtcctatcggatctaaaacaagacgacgggtggggcttaaagctcccgggataattccacgcatctccgtccgggaacctatgcaaacaggcattaaagcagtggattctctcgtccccataggacgggggcagcgtgaactgatcattggggaccgacagaccggaaaaaccagcattgccatagataccattattaaccagaaacgctttaatgacgggagcgacgagaagaagaaactctattgcatatacgtggcaataggccaaaagcgatctacagtggcacaattggtgaagcggttaacagatgccgatgcgatgaaatacacaatcgtggtttccgctactgcctcagacgccgctccactgcagtatctcgctccctattccggttgttctatgggagaatactttcgcgacaatggcaaacatgcactgatcatttatgacgacttgtcgaagcaagccgtggcataccgacaaatgtccctgctgcttcggaggccacccggccgagaagcctaccccggcgatgtgttttacctccactcaaggcttctcgagcgcgcggcaaaaatgaatgacgcttttggtggggggtcgctgaccgcattaccggtgatcgagacacaggcaggggatgtgtcagcatatatcccgacaaatgtgatatcaatcacggatggacaaatcttcctcgagaccgaactgttctataagggcatcaggccggctataaacgtcggactatcagtgagtcgggtcggtagcgcagcccagaccagagctatgaagcaggtggccggtactatgaagctcgagcttgcacagtatagggaagtcgcagcattcgcccagttcggttcggacctggatgccgccactcagcagctgttgtcccgcggtgtgaggttgactgagctcttgaagcagggccagtatagcccaatggccatcgaggagcaggtggccgtgatatatgctggcgttaggggatatctggacaaactggagccatcaaaaatcacgaaatttgaaaatgccttcctctctcacgtcgtgagtcagcatcaggccctgctgggaactatccgcgccgatgggaagatctccgaacagtccgacgcaaaattgaaggagattgtgactaacttcttggcgggatttgaggcttag

SEQ ID NO: 13929 - DNA, 1662 bp, synthetic construct
  misc_feature 1..1662: note = Description of Artificial Sequence: Synthetic coding sequence
  source 1..1662: mol_type = other DNA
atgctgtcagtgagagttgctgccgcggtcgtaagggcacttccaaggcgggccggattagtgtcgcgcaacgcactgggaagttctttcatagccgctaggaacttccacgcaagcaacacccatcttcagaagaccggcactgccgagatgagttccatactggaagagagaatccttggagccgacacttcagttgatctcgaagaaacaggccgcgttctatcgataggtgacggaattgctcgcgtgcacggtttgagaaatgtccaggctgaggagatggtggagttcagctccgggttgaaaggcatgtccctgaatctcgagcctgacaatgtcggtgtggtcgtttttggcaacgataaactcatcaaggagggagatatagtcaagcggaccggggccatcgttgacgtacccgtcggagaagagctgctaggtagagtggttgatgcactgggcaacgccatcgacgggaaaggtccgatcggatctaagacaaggaggcgagtaggcttgaaggctcctggaattatccctcgcattagcgttcgcgagcctatgcaaacagggatcaaagcggtggatagcttagtgccaatagggcgaggccagcgtgagctgatcatcggagatcgccagaccggtaagacgtctatcgctatcgacactattattaaccagaagaggtttaatgatggctccgacgaaaagaagaagctatactgcatctatgttgctatcggacaaaagcgaagcacagtggctcagctcgtaaagcgcctgaccgacgcggatgccatgaagtacacaattgtagtttctgctacagcctctgatgctgcccctctccagtatctagccccttactcagggtgttccatgggcgaatatttccgggacaatgggaaacacgcgctgatcatttacgacgatctgtctaagcaagcggtggcatatcgacagatgtctctgctgctaaggagacctccaggaagggaggcatatcccggagatgtgttctatctgcattctagactcctggagcgggccgccaaaatgaatgatgcgtttgggggggggagcctgaccgccctgccagtgatcgagactcaggccggcgacgtctccgcttatatcccgactaatgtgatcagcatcactgatggccagattttcctagagacagaactattctacaagggcattcgtcctgcaatcaatgtgggactttccgtctcgcgggttgggagtgctgcacaaactcgggcgatgaaacaagtggcaggaactatgaagctcgagcttgcacagtaccgggaggtggctgcgtttgctcagtttggttctgacctggatgccgctacccaacagctgctgtcaagaggggttcgccttacagagctgcttaagcagggtcaatattctccaatggcaattgaagaacaggtcgctgtgatctatgccggagtgcgaggatatctggacaaactggagccttcgaagataacaaaattcgagaacgctttcctgtcccatgtcgtaagtcagcaccaagcgctcctgggtactatcagggcggacggcaaaatctctgaacagagcgatgctaagctgaaagaaatcgtaacaaacttcctggcaggattcgaagcttag

SEQ ID NO: 13930 - DNA, 1512 bp, synthetic construct
  misc_feature 1..1512: note = Description of Artificial Sequence: Synthetic coding sequence
  source 1..1512: mol_type = other DNA
atgagttctatcttggaagagcggattctgggggccgacacctcagtcgacctggaggagaccgggcgggtcttatcaatcggagacggaatcgccagagtccatggcttaaggaatgtccaggcagaggaaatggtggaatttagctcaggcctcaaagggatgagcctcaatttagagcctgataatgtgggcgtcgtggtgttcggcaacgacaagttaattaaagagggagacattgtgaaaagaacaggcgcaatagtcgatgtgcccgtaggggaggagctgttgggccgtgtcgtggatgcccttggcaatgcgatcgacggaaaagggcctattggcagcaaaacacgcagacgggtgggcctcaaggctccaggcatcattccacggatctcagtgagagagcctatgcaaaccggcatcaaagctgttgatagcctcgttcctattggcagagggcagcgggagctaatcatcggcgaccggcagaccgggaaaacctcaattgcgatcgataccattatcaatcagaagcggtttaacgacggctcagacgaaaagaagaaattgtactgcatctacgtggccattggtcaaaaacgcagcaccgtggcccagcttgtgaaacggctgactgacgccgacgctatgaagtacacgatcgtggtgagcgcgactgcatccgacgcagcacccctgcagtacttagcgccttacagcggctgttctatgggagagtacttccgagacaatggcaaacacgcactgataatttacgacgacttgtctaaacaggcggtcgcctataggcagatgtccctcttgctgcggagaccacctggaagagaggcttacccgggagacgtcttttacctccacagccggttgctggaacgagctgcaaagatgaatgatgcatttggcggagggtcactgactgcactgcctgtaatcgagacacaggcgggagacgtctccgcttatataccaactaatgtgatttccattaccgacggacagattttcctggagactgaactgttctacaagggaatcagacccgccatcaatgtggggctgtccgtgtctagggtgggatcagcggcccagaccagagcaatgaaacaggtggcaggcactatgaaacttgagctggctcaatatagagaagtggccgcctttgcccagtttggtagcgacctggatgctgcgacacagcaactgttgtctagaggtgtgcgcttgaccgaactgctaaagcagggccagtattccccaatggcaattgaagaacaagtggctgtgatttacgccggtgtccgcggttatcttgataaacttgagccatcgaagataactaagttcgaaaatgccttcctttcccatgtcgtgtcacagcatcaggcactcttgggcaccatcagagccgacggcaagattagcgagcagtcagacgccaagcttaaagagattgttactaacttcttggctggattcgaggcctag

SEQ ID NO: 13931 - DNA, 3843 bp, synthetic construct
  misc_feature 1..3843: note = Description of Artificial Sequence: Synthetic coding sequence
  source 1..3843: mol_type = other DNA
atggacctcgaaggagaccgtaacggaggagcaaagaagaagaattttttcaagcttaacaataaatctgagaaggataaaaaggagaagaaacccacggtgtcagtattctcaatgttccgctacagcaactggctggacaagctttacatggtggtgggtaccttggccgccataatccacggagcgggcttgccactcatgatgttagtttttggcgaaatgacagacatattcgcaaatgcgggaaacctcgaggatctcatgagcaacatcaccaacagatcagacattaatgatacaggattctttatgaatctggaggaagacatgaccaggtacgcttattattacagcggaattggggcgggcgtgctagtggcagcctacatccaagttagcttttggtgcctggcagcgggcagacagatacacaaaatccgtaaacagttctttcatgccatcatgagacaggagatcgggtggttcgacgtgcatgatgtcggcgagctcaataccagacttacggacgatgtatcgaagattaacgaaggaatcggcgacaaaatcggtatgttctttcagtctatggcaactttctttacgggctttattgtggggtttacacgaggctggaaactgaccctcgttattctggctatatctcccgttttaggcctgtctgcagctgtgtgggcaaaaatactctcctcctttactgataaggaactgctggcttacgccaaggccggagccgtggccgaagaggtcctagctgccatcagaacagtaatcgctttcgggggtcagaagaaggaactggaaagatacaacaagaatctagaagaggctaaaagaattggaatcaagaaagcgattacagctaacatcagtataggagctgccttcctgttgatatacgcttcttacgccctggcattttggtacggtaccacccttgtgttgagtggagaatactcaatcggacaggtgctgactgtgtttttctctgtattgatcggagctttcagcgttggccaagcctctccaagtatcgaggccttcgctaacgcaaggggtgctgcctacgaaattttcaagattatagacaataaaccatctatcgactcatatagtaaatccgggcacaagcctgacaacataaagggcaatctcgaatttcgcaacgtgcatttctcttatccctcaagaaaagaggttaagatattaaaaggcctgaatttgaaggtgcagtccgggcaaacagtcgcactcgtcggaaattcagggtgcggcaaaagtaccactgtacagctgatgcaacgtttatacgatccgactgagggaatggttagtgtggacggtcaggacattagaaccatcaatgtaaggttccttagggaaattatcggtgtggtgtcacaggaacctgtgttgtttgcgaccactatcgcagagaatattagatatggaagagagaacgtgacaatggacgagatcgagaaggcagttaaggaggcaaacgcctatgatttcataatgaaacttccccacaagtttgacactctggtgggagagagaggtgcccagctgtctgggggtcagaagcagcgcattgcaattgcacgggcattagtcaggaatccgaagatattgttgctggatgaagcaacctccgctctagataccgagagcgaagccgtggttcaagtcgctctcgataaggccagaaagggccgcactaccattgtaatcgcccacaggctgagtactgtgcgcaatgccgacgttatcgctggcttcgatgatggagtgattgtggaaaagggcaaccacgacgagttgatgaaggagaagggcatatactttaaactagtgaccatgcaaaccgccggaaatgaagtggagctggaaaacgccgcagacgagagcaagagtgagatagacgccctggaaatgtccagtaacgactcccgcagctcactcatcagaaaacggagcactagacgctccgtgcggggatcccaggcccaggatcgcaaactttccacgaaggaggctctggacgagagtataccgccagtgtccttctggcggatcatgaaactgaaccttacagaatggccatacttcgtggtgggtgtattttgcgccattataaacggtggcttacagcctgccttcgctatcatattctccaaaattatcggcgtgttcacaagaatagatgatcccgaaactaagagacaaaattccaacctgttttctcttctgtttctcgctctcggcattatctcatttatcaccttttttctccagggcttcaccttcggaaaggcaggcgagatcctgaccaagcgacttcgctacatggtattcaggagtatgctacgccaggacgtgtcatggttcgacgacccaaagaacactaccggagccttgacaacccgtttggccaatgacgctgcccaagtcaaaggcgccattggtagtcgccttgctgttatcacacaaaatatcgcaaacctgggaactggaattatcattagctttatttacgggtggcagctcactctgctgcttcttgcaatcgtccccatcatcgccatagcaggagtggtggaaatgaaaatgttatcgggacaggccctgaaagacaagaaagagctcgagggtagcgggaaaatagccacggaagctatcgagaattttagaaccgtagtctcgctgacacaggagcagaagtttgaacatatgtacgcccaatctctccaagtgccttatcgaaacagcctgcgaaaagctcatatatttggaattaccttttcctttactcaggcaatgatgtatttcagttatgctggctgtttccgcttcggggcctacctcgtggcgcacaaactcatgtcctttgaggacgttctgcttgtgttctcggccgtggtttttggggcaatggccgtgggccaggtctcctcttttgccccagactacgctaaagcaaagatatccgctgcgcatatcataatgataatcgagaagactcctttgatcgattcttactccaccgagggtttgatgcccaatacactcgagggcaatgttacctttggggaagtcgtgttcaactatccaacccggcccgacattcctgtcctccagggtctctcacttgaggtaaagaaaggacaaacactcgcattggtggggtcttcgggctgcggaaaaagtacggtggtgcaactcctggagcgtttctacgacccactcgctgggaaggtactgttagacggcaaagaaatcaaacggttgaacgtgcagtggcttagggcccacctggggatcgtaagccaggagcctattctgttcgactgcagcattgccgagaatatagcgtatggggacaactcccgtgttgtcagtcaggaagaaatcgttcgagcagccaaggaagcaaacatccacgcttttatcgaaagcctcccaaataagtattctacgaaggtgggcgataaagggacacagctgtcgggcgggcagaagcaacgcatcgccattgccagggctcttgtgcgccagccacatatacttctcttagacgaggctacgtctgccctcgacactgagagtgagaaggtagttcaggaggcactggacaaggcccgagagggtcggacttgcattgttattgcacaccgtttatctacaatccagaacgcagacctaatcgtggtatttcagaacggaagggtcaaggaacacgggacccatcagcagttgctggcacaaaaagggatctacttctcaatggtcagcgtccaggcagggaccaagagacaatag

SEQ ID NO: 13932 - DNA, 69 bp, synthetic construct
  misc_feature 1..69: note = Description of Artificial Sequence: Synthetic coding sequence
  source 1..69: mol_type = other DNA
atggacctcgaaggagaccgaaatggcggggcaaagaaaaagaactttttcaagttgaacaataaatag

SEQ ID NO: 13933 - DNA, 147 bp, synthetic construct
  misc_feature 1..147: note = Description of Artificial Sequence: Synthetic coding sequence
  source 1..147: mol_type = other DNA
atggatcttgagggggatcgaaacgggggggctaaaaaaaagaatttttttaagttgaataacaagagcgagaaagacaaaaaggaaaaaaaacctactgtctcagttttttctatgttcaggtactcgaactggctcgacaagtag

SEQ ID NO: 13934 - DNA, 3186 bp, synthetic construct
  misc_feature 1..3186: note = Description of Artificial Sequence: Synthetic coding sequence
  source 1..3186: mol_type = other DNA
gcacttagtcctgttatgggcgtctccgccgggtactggccaaagatcctgagcagttttaccgacaaggagcttctggcctacgcgaaagctggcgctgttgccgaagaagtgcttgccgcgatccggacggtcatcgccttcgggggccagaaaaaggagctcgagcgctataataagaatctcgaagaagccaagcggatcgggatcaagaaggccatcacagcaaacataagcattggggctgcatttctcctgatttatgcgagctacgctttggccttctggtacggcacaaccctggtgttgtcaggcgagtactcaatcggccaggttcttaccgtctttttctccgtgctgatcggcgcgttcagcgtcgggcaagcctcaccttcaatcgaggctttcgcaaatgctcgaggcgctgcctatgaaatctttaagataatagacaacaaacccagtatagacagttattcaaagtcaggacacaaacccgataacatcaagggaaacttggagtttagaaacgtgcatttctcctacccttccaggaaagaggtgaaaattctcaagggcctgaaccttaaggtccagtctggccaaaccgttgccctggtcgggaactccgggtgcggcaaaagcacgacggtccagctcatgcagagactttacgaccccaccgagggcatggtgagtgtcgacggtcaagatatcaggaccatcaatgtgcgctttctgagggagataataggggtggtgtctcaggagcctgtcctgttcgcaacaaccattgcagagaatatacggtacggaagggaaaatgtgaccatggatgaaatagaaaaggccgtcaaggaagccaacgcatatgacttcatcatgaagcttccccataagtttgacacgctggtcggtgagaggggcgctcagttaagtggaggccagaagcagaggatcgccattgcgagagcactcgtccgcaacccaaaaatcctcctactcgatgaagctactagtgctttggatacagagtcggaggcggtcgttcaagtcgccttggataaagccaggaagggccgcaccacaatcgtgattgcccaccgcctgtcaacagtacgcaatgccgacgtaatcgccggatttgatgatggcgtaatcgtggaaaaggggaatcatgacgagctgatgaaagagaagggtatctattttaagctcgtgaccatgcagaccgctggcaatgaggtcgagctagaaaacgccgccgatgagtcaaagtctgaaatcgacgctctcgagatgtcatctaatgacagtaggagctcactgattagaaagcgatctactcgccgcagcgtgcgcggctcacaggcacaggacagaaagctgagcacaaaggaggctttagatgagagcatcccccctgtctcgttctggcgcattatgaagcttaacctcaccgagtggccctatttcgtggtaggggtgttctgtgccatcattaacggaggcttacagccagcctttgcgatcattttctctaaaatcattggagtattcactcggatagatgaccctgaaacaaaacgacagaatagtaacctgttctctctcctgtttcttgcgctcggaatcatctctttcatcacgttctttctacagggatttacttttgggaaggcaggggagatcctcaccaagaggcttaggtatatggtattcaggtccatgctcagacaggatgtctcctggtttgatgatcctaaaaatacgaccggcgccctgaccactcgactcgccaacgacgccgcacaggttaaaggcgcaatcggatctaggctggctgttatcacgcagaacatcgccaaccttggaacaggcataataatcagcttcatttacggatggcagctgactctgctcctcttggctattgttcccattattgcgattgccggtgttgtcgaaatgaaaatgctctcagggcaagctctgaaggataaaaaggagttagaaggcagtggtaaaatcgccacagaggcgattgagaatttcaggactgttgtgagcctcacccaggagcaaaagttcgaacacatgtatgcccagtccctgcaggtgccctatcgtaactctctacgcaaagcacacatatttggaattacattctcatttactcaggcaatgatgtacttctcctatgccggatgtttccggtttggtgcctacctggtggctcataaacttatgtctttcgaggatgtgctgctcgtcttctctgcagttgtttttggcgcaatggctgtgggccaggttagctccttcgcccctgattacgccaaagcaaagatcagcgccgcacacattattatgattatcgaaaaaaccccgcttatcgattcctactccactgaaggattaatgccaaacaccctcgaaggtaacgtgacttttggggaggtggtttttaactaccctactcggccagacatccctgtgctgcaagggctttctctggaagttaagaagggtcagacactggccttagtgggttcttccggttgcgggaaaagcaccgtggtgcaattgttggagcgcttctatgatcctctggctggcaaggttctgctggatggaaaagagattaagcggcttaatgtccagtggcttcgagcacatctcggaatcgtaagccaagaaccgatactcttcgactgctcaatcgcagagaatatcgcttacggggacaatagtcgggtggtctcccaggaagaaatcgtacgggccgcgaaggaggccaacatccatgctttcatagaaagcctcccaaataagtactcaacaaaggtgggagataaaggcactcagttgtctggaggacagaagcagagaatagccatcgccagagctttggtgagacagccccatatcctactgctggacgaggctacctccgcgttggatacagagagcgaaaaagtcgtccaggaagcgctagataaagcaagggagggtcgaacctgcatcgtgatcgcccaccgcctgagcacaattcagaacgccgatcttattgtggtgtttcagaatggacgcgttaaagagcacggaacccaccagcaactgctggcccagaaaggcatatacttctcaatggtgagcgtgcaggcaggtacgaaacggcagtag

SEQ ID NO: 13935 - DNA, 3651 bp, synthetic construct
  misc_feature 1..3651: note = Description of Artificial Sequence: Synthetic coding sequence
  source 1..3651: mol_type = other DNA
atggatttggagggagacagaaatggaggggccaaaaaaaagaatttcttcaaacttaataacaagagcgagaaggacaagaaggagaagaaacctaccgtgagcgtcttcagcatgtttcggtacagcaactggttagataagctctacatggtagttggcactctcgccgctataatacatggcgccggtttaccgctcatgatgctggttttcggggagatgaccgacatcttcgcaaatgccggaaacctggaggatctgatgtccaatataacgaaccggtcagatatcaatgacacgggattctttatgaatctggaggaggatatgacctctgacgtgagcaagattaacgaggggattggtgacaagattggcatgttctttcagtctatggctacattttttacaggttttattgtaggattcactcggggatggaaactgactctcgttattctggccattagccctgttctgggcctgtcagccgctgtttgggcaaagattctgtcctcgttcacggataaggaactgttagcgtatgccaaagcaggggcggtggccgaggaggtgttggcggccatccggaccgtcattgcctttggcggccagaagaaagagctagagaggtacaacaaaaatctcgaggaggctaagcgtatcggtatcaagaaggccattacggccaatatctcaatcggagcggcctttctgctgatttacgcctcctatgcactagcattctggtacgggaccactctggttctgagcggcgaatatagcatcggtcaggtgctgacagtgtttttctcggttctgataggagccttcagcgtgggccaggcctccccaagcatcgaggccttcgccaatgcacgaggggctgcctatgagatcttcaagataatcgataacaaacccagcattgattcctacagtaagtctggccataagccagataacattaaaggaaatctagagttcaggaatgtgcatttctcctacccaagtagaaaagaggtgaaaatcctcaaaggccttaaccttaaggtccagagcggccaaactgtagcactcgtaggcaattccggatgcgggaaaagcaccaccgtccaactgatgcaaagactctatgaccctactgaaggcatggtctccgtggatggacaagatatcaggactattaatgtgcgctttctgcgggagattatcggcgtcgtctcccaggaacccgttctgttcgctacaacaatagctgagaacatccgctatggcagggagaatgttactatggacgaaatcgaaaaggctgttaaagaggccaacgcgtacgactttattatgaagctgccccacaagtttgatacccttgtaggggagcgcggcgcccaactcagcggcggccagaaacagcggattgctattgccagagcgctggtgagaaacccaaaaatcctcttgctagacgaagctaccagcgcccttgacactgagagtgaggcggtcgtacaggtggcacttgataaagctcggaaggggagaacaaccatcgtcatagctcaccgcctatccacagtgagaaacgccgacgtgatagcaggcttcgacgacggcgtaattgtggagaagggaaatcacgatgaactcatgaaggaaaaaggtatctatttcaaattggtaactatgcaaacagccggcaatgaagtcgagctggagaatgctgcagatgagtctaagtcagagatcgatgctctcgagatgagttccaacgactcgcgcagttctcttatccgtaagcgaagcacccgacgatcagtaagaggctcacaggcccaggatcgcaagctcagcactaaggaagccttggacgagagtatccccccggtatctttttggcgtattatgaaactgaacctgactgagtggccttatttcgtggtaggagtgttttgtgcaatcataaatggtggccttcagcctgcctttgccataatcttcagtaaaattatcggcgtcttcaccagaatagatgatcctgagaccaaacggcaaaatagcaacctgttttcactcctctttctggcacttggaattatttctttcattactttcttcctgcagggcttcacatttggaaaagccggggagattcttaccaagaggctgcgttatatggtctttaggtcgatgctgcggcaggacgtgtcttggttcgacgatcctaaaaacacgaccggtgctctgacaacaaggctggctaatgacgcagctcaggtaaagggggcaattgggagccgcctagctgtgatcactcaaaacatcgctaacctgggcaccggaatcatcatttccttcatctacggatggcagttgacattattactgctggcgattgtacctatcatagctatcgcaggggttgtcgaaatgaagatgctgtctgggcaagcgctgaaagataagaaggagctggaggggagtggaaaaattgcgacagaagcgattgaaaactttagaaccgttgtcagcctcacgcaggaacagaagttcgagcacatgtacgcacagagcctccaggtgccatatcggaactccctacggaaagcgcatatattcggcattaccttcagctttacacaagccatgatgtatttctcatacgctggatgcttcaggttcggggcatacctggttgctcataagttgatgagctttgaagacgtgctgctcgtattctcagcggtggtgtttggcgccatggcagttgggcaggtgagttcattcgcaccagattatgctaaagctaagatttccgccgcccacattattatgatcatcgaaaaaacacccttgattgactcttattccaccgaaggactaatgcccaatacacttgaaggcaatgttacttttggggaagtggttttcaattatcctactcgaccggatattccggtgttacagggactctcgttagaagttaagaaaggacaaacactggccctggttggttcatctggctgcggcaagtcaactgttgtccagttgctggagagattctacgaccctctggccgggaaggtcttactggatgggaaggaaattaaaagactgaacgtgcaatggctgcgcgcccacttgggcatcgttagtcaggagcctatcctgtttgactgctcaatcgcggagaacatcgcatatggtgacaactctcgcgtcgtgagccaggaagaaattgtgagagcggctaaagaagccaatatccacgcttttatagaaagcctccctaacaagtactctacgaaagtcggggacaagggtactcaattatccggggggcagaaacagagaattgccatagccagggctctggttcgccagccacacattttattgttggatgaagctacctctgcgcttgatactgaatccgagaaagtggttcaagaagctctggataaagcacgtgagggacggacgtgcatcgtaatcgcccacagattatcgaccattcagaacgctgacctcattgtagtgtttcagaacggacgcgttaaggagcacgggactcaccagcagctgctcgcacagaagggtatttactttagcatggtgtctgtgcaggctgggacaaagcgacaatag

SEQ ID NO: 13936 - DNA, 4401 bp, synthetic construct
  misc_feature 1..4401: note = Description of Artificial Sequence: Synthetic coding sequence
  source 1..4401: mol_type = other DNA
atggccctgagggggttctgcagcgccgacggatcagatcccctgtgggactggaacgtcacatggaatacatccaaccctgacttcacgaaatgttttcagaatactgttctagtgtgggtgccgtgcttctacctgtgggcctgttttccattttactttttgtacctgtctcgtcacgacagggggtatattcagatgacacccttgaacaaaactaagacagccttgggcttcctcctctggattgtctgttgggctgacctgttttactccttttgggagcgttcacgtggtatttttctggcaccggtgtttctcgtttctccaaccctgttagggatcaccatgcttttggcgaccttcctgatacagctcgagcggcggaagggcgtacagtctagcggtatcatgttgactttctggctggtagcacttgtgtgcgccctggcaattctacggtcaaagatcatgactgcacttaaggaggatgcccaggtagacctgtttagagatataacgttctatgtttatttttctctcctgctgatccagttggttctcagctgtttctcagatagatcccctctcttttcagagaccatccatgatcctaacccctgccctgaaagctctgcgtcttttctgtccaggattaccttttggtggataactggcctgatcgtgaggggttatcgccagcccctggaaggatccgatttgtggtcattgaacaaggaggacacttccgagcaggtcgtgcctgtcctggtcaagaactggaaaaaggagtgtgcaaagactcgcaagcagccagttaaggtcgtgtacagtagcaaggacccagcccagccaaaagaaagttcaaaggtggacgccaacgaggaggtggaggctcttatcgttaaatctcctcagaaagaatggaacccgagtctgtttaaggtcctgtataaaacttttggaccctatttcttaatgtcttttttttttaaggcaatccacgatctgatgatgttttccgggccccaaatcctgaagctgctcataaagtttgtcaatgacacgaaggcccctgattggcagggctatttctataccgtgctcttgttcgtcacggcatgcctccagaccctcgtgctccaccagtactttcatatctgctttgtatctggcatgcgtatcaagaccgctgtgatcggcgcagtctatagaaaggcccttgtgatcaccaatagcgcccggaagtcctcaaccgtgggggaaatagtgaaccttatgagtgtagatgcgcagagattcatggacctggccacatacattaatatgatctggtccgctcctctccaggtgattctagccctctacttgctgtggcttaatctgggacccagcgtgctggctggcgttgccgtcatggtattgatggtccctgtaaatgccgtgatggcaatgaaaactaaaacatatcaagtggcgcacatgaaatccaaagacaatcggatcaaacttatgaatgagatccttaatgggattaaagtactgaagctttatgcatgggagttggcctttaaggataaagttctcgcaatcagacaagaggaactgaaggtgctgaaaaaaagcgcttacctatccgctgttggaacctttacttgggtctgcactccttttctagtggctctttgtacttttgccgtgtatgtaactatcgacgaaaacaacatcctggacgcccagaccgcgttcgtgtctctcgctctattcaacatattaaggtttccactcaacattcttcccatggtgatatccagcattgtgcaagcaagcgtttccttaaagcgcttgcgtatatttttgtcacacgaggagcttgaaccagactcgatagagagacgcccagtcaaagatggcggtggaaccaatagcattacagtgcgcaatgcgacctttacctgggctagatccgacccaccaactttgaacggaatcacattttccatccccgagggagcgttagttgctgtggtcggccaggtgggatgcgggaagagtagcctgctgtccgctctcctcgcagaaatggataaagtggaagggcacgtcgctattaagggttcagtcgcatacgtgcctcagcaggcgtggatccagaacgattctctgcgagagaatattctcttcggatgtcagctggaagagccctactaccgctcagtcattcaggcgtgcgcattgcttccggatctggagattttaccgtctggggataggacggagatcggcgaaaagggtgtcaatctgtccggaggacaaaaacagcgagtttccctggcccgagccgtgtacagtaacgcagacatttatctgttcgatgacccactgagtgccgtagacgcacatgtgggcaagcatatcttcgagaatgtaattggaccaaagggcatgctgaagaacaaaactagaattttagtgactcactctatgagttacctaccccaagtggacgtcattattgtcatgtccggtggaaagatatccgagatgggatcgtatcaggaactgctggctcgggacggggccttcgctgagttcctcaggacctacgcttcaaccgaacaggaacaggatgcagaggaaaatggcgtcactggtgtcagtgggccagggaaggaggcgaagcagatggaaaacggtatgctggtgactgacagcgcaggaaaacaactccagcgtcaactctcctccagcagctcatatagtggagatatcagcagacaccataacagtacagccgagttgcagaaagccgaggccaagaaagaagaaacctggaagctaatggaagctgacaaggctcagacgggacaggtgaagctgtctgtctactgggactacatgaaagccataggactgttcatctcttttttatccatcttcctcttcatgtgtaaccacgtgtcagccctcgcttctaactattggctaagcttatggacggacgacccgatagtgaacggaacacaggagcacaccaaagtaagactttctgtgtacggagccttggggattagccaggggatagcagtgttcggctactccatggccgtgagtatcgggggaatcctggcgagccggtgccttcatgtcgacttgctgcactcaatattacgctcgcctatgtcttttttcgagaggacaccaagcggaaacttggtgaatcgcttttccaaagagctcgatacagtggactccatgatacctgaggtcataaaaatgtttatgggaagcttattcaatgtaattggagcctgtatcgtgatcttgcttgccacacccattgccgccatcataatcccaccactgggtctaatttatttctttgtccagagattttacgtggccagtagcaggcagcttaaacggctggaatctgtgtctcgatcgcctgtgtactctcatttcaatgaaactctcttaggagtgagcgtgattcgggcctttgaagagcaggagcggtttatccatcagagtgatctcaaagtggacgagaaccagaaagcatattacccctcgatcgtcgcaaatcgctggctggcggtgcgcttggaatgcgttggcaactgcattgtgcttttcgctgctctgttcgccgttatcagccgccacagtctaagcgccggcctggtggggctgagtgtgtcttactctttgcaagtgaccacctacttaaattggttagtgaggatgtccagtgagatggaaaccaacattgtcgcagtcgagcgtctgaaggagtacagcgagacagaaaaagaagcaccatggcaaattcaagaaacggctccaccgagctcttggccgcaggtgggtcgggtggagttccggaactattgccttcgataccgcgaagaccttgactttgttttgaggcacataaacgtgactattaatggcggagagaaagtgggcatcgttgggagaaccggggccggcaagtcatcgctgacactcggcctattcagaatcaacgagagcgccgaaggcgaaataattatcgatggcatcaacatagctaagattggattgcacgatctgaggtttaaaattacgatcattccccaggatcccgttttattctccggcagcctgaggatgaacctggaccctttcagtcagtacagtgacgaagaggtgtggacaagtctcgagctcgcccacctgaaggactttgtgagcgccctgcctgacaagttggaccacgaatgcgcggaaggcggtgaaaatttgagagtgattgtcctcgataaaggtgagatccaggagtacggggctccttctgacctactgcaacaaaggggcttattttattcaatggcaaaagatgccgggctggtgtag

SEQ ID NO: 13937 - DNA, 4428 bp, synthetic construct
  misc_feature 1..4428: note = Description of Artificial Sequence: Synthetic coding sequence
  source 1..4428: mol_type = other DNA
atggccttgcgcggattttgtagtgcagatggctcggatcccctgtgggattggaacgttacctggaacacctcgaatcctgactttacaaaatgtttccaaaatactgtcttggtttgggtcccctgtttttacctctgggcatgttttcctttttacttcttatatctgtccagacacgataggggatacatccagatgactccattaaacaaaacaaaaacggccctggggttcctgctctggatcgtgtgctgggctgacctgttctacagcttttgggaaaggagtaggggcattttcctggcccccgtgttcttggtgtctcccactttgttgggaattactatgctgctggctacgtttctcattcaactggaacgtaggaagggggtccagtcatcgggcataatgctgactttctggcttgtggccctcgtgtgtgccctcgcaatcctccgaagcaagataatgactgcactgaaagaggatgctcaagtggacttgtttcgcgacattaccttttatgtctatttcagcctgctgttgattcaactggtcctgagctgtttttctgatagatctcctcttttctctgaaaccatccacgaccctaatccctgtcctgagtcatccgcctccttcctgtctaggattactttctggtggatcaccggactgatcgtgcgtggctatcggcagcccctagaagggtcggacctctggtctctgaacaaggaggataccagcgagcaggtcgtgcccgtccttgtcaaaaattggaagaaagagtgtgctaaaacccggaaacaacctgtgaaggtggtctactcctccaaggatcctgcccaaccgaaagagagcagtaaggtagatgcgaacgaggaagtggaggcgctaattgtgaaaagcccccagaaggagtggaaccctagcctgttcaaagtactctacaagacctttggcccatactttctaatgagttttttctttaaagccattcacgacttaatgatgtttagcggcccccagatcttaaagcttctcattaagtttgtgaacgacaccaaggcccccgactggcagggttatttttatacagtcttgctgtttgtgacagcctgcctgcagaccctggtgctgcaccagtatttccacatctgtttcgtgagtggcatgcgaatcaagacagcagtcatcggagcagtctatcgaaaagcacttgtaattacaaattctgccaggaaaagctccacggttggcgagattgtgaatctgatgtccgtggacgctcagcgttttatggatctcgccacctatattaatatgatctggagcgcgccacttcaagtcatccttgccctctacctgctttggttgaatctaggaccttctgttcttgcgggagtggctgttatggtattgatggtcccagttaatgcagtgatggctatgaagaccaagacctaccaggttgcccatatgaagagcaaagacaaccgtatcaagctaatgaacgaaattcttaatgggatcaaggtgttgaagctgtacgcctgggagctcgccttcaaggacaaggtgctggccattcggcaggaggagctcaaggtgctaaaaaagtcagcatacctgagcgccgtgggcacattcacctgggtgtgtacgccattcctcgtggccctctgtacatttgccgtatatgtaacaatcgacgaaaacaacattcttgacgcacagacggcctttgtgagtctagccctgttcaatatattaaggtttcccctgaatattctgcctatggtgatctcatccattgtgcaggcgtcagtaagcctcaaacggttgaggatatttctgtctcacgaggagctcgagccagacagtatcgaaagaaggccagtcaaggatggtggtggaacaaactctatcacggtgagaaacgctacatttacatgggccaggagcgatccgcccacactgaacggcatcacgtttagtattcccgagggagcattggtcgctgtcgtgggccaagtcgggtgcggtaagagctctctgctttctgccctactcgcagagatggataaggttgaagggcacgtggcaataaaaggatcagtggcctacgtgccacaacaggcttggatccagaacgactcccttagggaaaacattctgtttgggtgtcagcttgaggagccttattaccgttctgtgattcaggcctgtgctctgcttcctgatcttgagattttgccttcaggggacaggacggaaatcggtgagaaaacgcgcatacttgtgacacacagtatgtcttacttgcctcaggtggacgtgatcattgtcatgagtgggggcaagatctcagagatgggctcttaccaggagttgctggctagagacggcgcgttcgccgaattcttgcgtacctacgcttctactgagcaagagcaggatgccgaggaaaatggagttactggcgtgtcagggcccggcaaggaggccaaacagatggaaaatggaatgctcgtcaccgactccgccgggaagcagctgcagcgacagttgtcctcctcctcatcgtacagcggcgacattagtcgccaccacaacagtaccgccgagctgcagaaggctgaggcaaaaaaggaggagacctggaaattgatggaagcagacaaagcccagaccggccaagtaaaactgtcagtgtactgggactacatgaaggcaataggcctctttatcagctttctgtcaatctttctgtttatgtgtaatcacgttagtgcgctggctagcaattactggcttagcttgtggaccgatgaccctatagtcaatgggacacaagagcatactaaggtgcgtctgtctgtttacggcgctctgggcatctcccaaggtatcgccgtctttggatacagtatggccgtttcaattgggggcatcctggccagccgctgcttgcatgtagatttgctccattctatcctcaggagcccaatgtctttctttgagaggactccctccggcaaccttgtgaatcggtttagcaaagagctggacactgtggactccatgatacccgaggtgattaagatgttcatgggatccttgttcaacgtgattggtgcctgtattgtgatcctactggccactcccattgctgctattataatccccccgctgggactcatctattttttcgtgcagcggttttatgtggctagcagcagacagttaaagcggctggagtcggtcagtcggtctccggtgtatagtcattttaacgagacgctgctgggagtctccgtgatcagagctttcgaagagcaggagcgattcatccaccagtctgacctcaaggtcgatgaaaatcagaaggcttactacccgagtattgtagcgaatcggtggttggctgtgaggctagagtgcgtcggcaactgcattgtcctgttcgccgccttattcgccgtgattagcagacactcactgagtgcaggtctggttgggttgagcgtaagctatagcctccaagtcaccacctacctgaattggctagtgcgcatgtcaagcgaaatggaaactaacattgtcgcagttgagcgtttgaaggagtatagcgaaacagagaaggaagccccatggcagatccaggagacggctccgcctagtagctggccgcaggtaggtcgagtggagtttaggaactattgtctgcgctacagagaggatctggattttgtgctccggcacatcaacgtcactatcaacgggggggagaaagttggcatagttggacgcacaggcgctggcaagtcctcacttaccctcggtcttttccggataaatgaatctgccgaaggggaaattattatagacggtataaatattgcaaaaatcggtctccacgacttacgattcaaaataaccataatcccgcaggacccggtcttgttttctggatctctgcgcatgaatttggacccattttctcagtactccgatgaggaggtatggacgtcccttgagctggcccatctgaaggattttgtgtctgcactccctgataaattggaccatgagtgcgctgaaggtggcgagaacctgtctgttggtcagaggcagctggtatgtttggctcgggcccttctccgcaaaacgaagatcctcgtactcgacgaggccactgctgccgtcgatctcgagaccgatgaccttatccagagtaccatccgcacccagtttgaggactgtacagtgttaaccatcgcccatcgcctcaacaccattatggactacactcgtgtgatcgtactagacaaaggagaaatacaggaatatggcgccccgagcgacctgttgcagcaacgcggtcttttctatagtatggccaaggacgcgggccttgtctag

SEQ ID NO: 13938 - DNA, 4251 bp, synthetic construct
  misc_feature 1..4251: note = Description of Artificial Sequence: Synthetic coding sequence
  source 1..4251: mol_type = other DNA
atggccctgcgcggcttttgttcagccgacggtagcgaccctttgtgggattggaatgtgacttggaacacaagcaacccggactttaccaaatgcttccagaatacagtcttagtctgggttccatgcttctatctatgggcttgtttccccttctatttcctctacctgtccaggcatgatcgcggatatatccagatgacaccgctcaataaaaccaaaaccgcccttggcttcttgctgtggatagtctgttgggcggacttgttctactccttttgggagaggtccagagggattttcctggctccagtgtttctggtttccccaacgctgcttggcattacgatgctcctggctacctttttaatccaactggagcgccgaaaaggcgttcagagctcaggtatcatgctgactttctggctggtggcgcttgtttgtgccttagccatactccgaagcaaaatcatgaccgccctcaaagaggacgcgcaagtggacctgtttcgcgacataaccttctacgtatatttttccctcttattgatccaattggtcttgtcatgtttctcagatcgaagcccactgttttccgagacaatccacgatcccaatccgtgtcctgagagctctgctagcttcctgagtagaataacattttggtggatcaccggccttattgtacgaggatacagacagcctctcgaaggtagcgatctctggtccctgaataaggaagatacaagcgagcaagtggtgcctgtgctcgtgaagaattggaagaaggagtgtgcaaagaccaggaaacagccagttaaggtggtgtacagcagtaaggatccagcccagcccaaagaaagctcaaaggttgacgcaaacgaggaggtcgaagcgctgattgtgaaatcgccccagaaggaatggaacccctccttgtttaaagttttatacaaaacctttggcccatacttccttatgtcgtttttttttaaggcgattcacgatttgatgatgttttctggacctcagattctgaagctcctgatcaaattcgtcaatgatacaaaggcccccgactggcaggggtatttttacacagtgctgttgttcgttactgcttgtctgcagaccctcgtgctgcaccagtatttccatatctgtttcgtgtctgggatgaggattaaaaccgccgtcatcggagccgtgtaccggaaggcgctagtgattacaaattcagcccgaaagtcatctactgtgggcgaaatcgttaacctcatgtcggtggacgcccagcggttcatggacttggcgacatatataaatatgatttggtcagccccactgcaagtaatactagcgctgtacctcctttggctgaatctcgggccaagcgtcctcgctggagtggcggtcatggtcctaatggtccctgtcaatgcggtcatggctatgaaaacaaaaacgtatcaggtagcacacatgaagtctaaggacaaccgcatcaagcttatgaatgaaatcctcaacggcatcaaagtcttaaagctctatgcttgggaactggcctttaaggataaggtgttggcaatcagacaagaagagctcaaagttcttaaaaaatctgcgtacctgagtgcggtaggcacttttacctgggtctgcacgcccttccttgtggccttatgcacattcgcagtctacgtgaccatcgacgagaacaacatcctggacgcccagaccgccttcgtgagcttggccctgtttaacatcttgagatttcctctcaacatcctgccaatggtcatatcctcaatcgtacaagcctccgtcagcctgaagaggctaaggatctttctcagccatgaagaactcgaaccggattcaatagaaaggcgccccgtaaaagatggaggcggaacaaattctattacagtaaggaacgccactttcacctgggcccgaagcgatccacctacattaaacggaataacttttagcataccggagggagccctggttgctgttgtgggccaggtcggttgcggcaagtcctcccttctgtccgccctgcttgccgagatggacaaagtggagggccacgtagccatcaagacgagaatcctagttacacactccatgtcttacctcccccaggtggacgtaatcattgtgatgtccggagggaagatctcagagatggggagctatcaggagcttcttgcccgggacggtgcattcgcagagttcttacgcacctacgcctctacagagcaggagcaggacgctgaggaaaatggtgtgaccggcgtgtctggaccaggtaaagaagccaaacagatggagaatggaatgctggtgacagattccgcggggaaacagctccagcgacagttgtcgtcttcatcctcttactctggcgacatctcccgtcatcacaacagtacggccgagctccagaaagccgaagctaaaaaggaggaaacatggaaattaatggaggccgataaggcccagactggccaagtgaagctgagcgtgtattgggactatatgaaggccattggattgtttatcagctttttatctatcttcttgttcatgtgcaaccatgtgagcgcgctggcctccaactactggctttcgctttggacagatgatcctatcgtcaacggcactcaggagcatactaaggtgaggctctcagtctatggagcactcggaatctctcagggcatcgcagtgttcggctactccatggccgtgagcatcggtggcatcctggcgagcaggtgtcttcatgtggatcttctgcattcaatccttcgtagccctatgagcttctttgagaggaccccctcaggcaacctggttaaccggttctccaaggagctggacactgtcgactctatgattcccgaagtaattaagatgttcatgggttccctgtttaatgtgataggcgcatgcatcgttattctattagcaacacccatagccgctatcatcatcccacctctaggactgatctatttcttcgtccaacgcttctacgttgcttcttcgcgacagctgaaacggctggaatccgtgagccggagccctgtgtactctcactttaatgagaccctcctcggggtgagtgtcatccgcgcctttgaagagcaagagcgattcattcatcaatcggatttaaaggtcgacgagaatcagaaggcctactacccttccattgtagccaaccgttggctcgccgtgagactcgaatgcgtcggaaactgtattgtcctgtttgccgccctgttcgccgtgatcagccgccattccctctccgccggtttggttggactgtccgtaagctacagcttacaggttaccacatacctcaactggctcgttagaatgtcctctgagatggagaccaacatcgtggctgtggagagactcaaagaatacagcgagacggagaaagaggctccctggcagatccaggagactgctcctccctcgagctggccacaggtggggcgggtcgaattcagaaattattgcctgcgctatcgagaggacctggactttgtgcttcggcacatcaacgtgaccatcaacgggggagagaaagttggaatagttggccgcaccggggccggaaaaagcagtctgacactggggctttttcggataaacgaatcagccgagggcgagatcatcattgatgggataaacatcgcgaagattggcctgcatgacctgaggtttaagatcaccattattcctcaggatccggtcctgttcagcggatccctgagaatgaatcttgaccctttctctcagtacagcgacgaagaggtgtggacctccctcgagctggcccatttgaaggatttcgtgagtgcattgcccgataagcttgaccacgagtgtgccgagggaggggaaaacctatccgtgggacaacgtcagttagtgtgcctggccagagcactgctgcgcaaaaccaaaatcctcgttctcgacgaggccacggctgccgtcgatctcgagacggacgacctgatacagtcgacaattcggacacagtttgaagattgtacggtcttaactatcgcccatagactgaataccattatggattacactcgggtgatcgtccttgataaaggggagatacaggagtatggtgcaccctctgacctgctgcagcaaaggggactgttctactcgatggcaaaggatgccggtcttgtgtag

SEQ ID NO: 13939 - DNA, 4419 bp, synthetic construct
  misc_feature 1..4419: note = Description of Artificial Sequence: Synthetic coding sequence
  source 1..4419: mol_type = other DNA
atggccctcaggggcttttgttccgcagatggatcagaccctctctgggattggaatgtcacgtggaatacatctaaccctgactttactaagtgtttccagaatactgtgctggtatgggtgccatgcttttatctttgggcatgtttccctttctactttctctatctcagtcggcatgatagaggctacattcagatgacccctctcaataaaacaaaaaccgcactggggtttttactgtggatcgtgtgctgggcagacctgttctactctttttgggagcgttctcggggcatctttctggcacccgtcttcttggttagtcccacccttctgggtattaccatgctgcttgctacatttctgatccagctcgagcgccgaaaaggggttcagtcaagtggcatcatgctaaccttttggctggtcgccctggtttgtgcattggccatcttacgcagcaaaattatgactgccctcaaggaggatgcccaggtcgaccttttcagagatatcacattctatgtctatttttctctgctgttgatccaacttgtgctgtcatgcttctcagataggagccccctgttctcagagacaattcacgatcctaatccttgtcctgagagcagtgcaagtttcttaagtcggattaccttctggtggattactggacttatcgtgcggggctaccggcagccactggagggcagcgatctatggagtcttaacaaggaggatacatccgaacaggttgtgcccgtacttgtgaaaaactggaagaaggaatgcgcaaagactagaaagcagcccgtaaaagtcgtctacagtagtaaggaccctgctcagcctaaggagagctctaaagttgatgcgaacgaagaggtggaagcattaattgtgaagtctccccagaaagaatggaacccctccctctttaaagtgttatataagacatttggcccatacttccttatgtctttctttttcaaagctatccacgatctgatgatgttcagcggcccccagattctgaagctcttgataaagtttgttaatgacacgaaggcacctgattggcagggatacttctatactgtgttattgtttgtcacagcgtgtcttcaaacactggtactgcatcagtatttccatatttgcttcgtcagcggtatgagaatcaaaaccgccgtgattggggccgtctatagaaaagctttggttataaccaatagcgctcgaaaatcctccaccgtcggagagatcgtgaacctcatgagcgtagatgctcagaggtttatggatttggccacatatataaatatgatctggtccgcgccacttcaagtcatactagctctctatctactttggctgaaccttggcccctcagtgctagccggtgtcgctgtaatggtgctcatggtgcctgtcaacgcagttatggccatgaaaaccaagacatatcaggtcgcccatatgaagtccaaggacaaccgtattaagctgatgaacgagattctgaatggcatcaaagtactgaaactgtatgcgtgggagctggccttcaaagacaaagttctcgccatccgccaggaggaactgaaagtgctgaagaagagcgcctacttgtccgcagtggggacctttacatgggtttgtactccctttttggtagctttatgcacattcgcagtctatgtgaccattgatgagaataacattctcgacgcccaaaccgcatttgtgtccctggctctgttcaatatcttgcggtttccgctcaacatcctgccgatggttatctcatccatagtgcaggcttccgtgtctctgaagcggcttaggattttcttatctcatgaagagctggagccggactcaattgagaggcggccagtcaaagacggtggggggaccaatagcatcactgtccggaatgccaccttcacttgggctagatctgaccctcctaccctcaacggtatcacgttctccatcccagaaggcgccctagtagccgtcgtcgggcaggtggggtgcggcaaatcctcactcctttcggctctactggccgaaatggataaagtcgagggccacgttgccatcaagggcgttaacttgagcggtggccagaagcagcgcgtttcactcgctagagccgtctacagtaacgcagatatctacctcttcgacgacccattatccgcggtagacgcccatgtgggaaagcacatatttgagaacgtgattgggccaaagggtatgctgaaaaacaagactaggattttggttacccactccatgtcgtacctgccccaagtggacgtcattattgtgatgtccggcggaaagatcagcgaaatgggctcttaccaggagctactagctcgagacggtgcctttgccgagtttctgaggacatacgctagtactgaacaggagcaggacgccgaggagaatggcgtgacaggagttagcgggccaggcaaggaggcaaaacagatggagaacggcatgctggttaccgattccgctggcaagcagctgcagcgacagctgagctcttctagcagctatagcggggacatctcaaggcaccacaactcaactgctgagctgcaaaaggccgaagccaagaaagaggagacttggaagctgatggaagccgataaggcacagacaggccaagtcaaactttccgtgtactgggactatatgaaggctatcgggctcttcatttcctttctctccatctttctgttcatgtgtaatcatgtgtcagctctggcttcaaactactggctgtctctgtggactgacgacccaatcgttaacggcactcaggaacataccaaggtgagactaagcgtctacggagcgctggggatcagccaaggcatcgctgtgttcggttactctatggctgtctccatcggagggatcttggcctcacgctgcctccacgtcgacctcctgcactccatcctgcgatccccgatgtccttctttgaacggacccccagcgggaacctagtgaatagattttcgaaggagctcgatacagtggatagcatgatacccgaggtgataaaaatgttcatgggttcactgttcaatgttattggagcgtgtatcgtgatccttctggctacaccaatcgctgccattataatccctcccctggggctaatttatttcttcgtacagcgtttctacgtagcatctagcaggcagttgaaaagactcgagtccgtctcgcgctcaccagtctacagtcatttcaatgagaccctgctcggggtgagtgtgatcagggcttttgaggaacaagaacggttcattcatcagtccgatcttaaggtggacgagaaccagaaggcttattatccctcaatcgttgcaaataggtggctcgctgttcgtctcgaatgcgtgggtaattgtatagtgctatttgccgccctgttcgccgtgatctccagacactccctcagcgccggactagtcgggcttagtgtcagctacagcctgcaggtgaccacatatctgaactggctggtgcgcatgtcatccgaaatggagactaacatagtcgctgtggaacgcctgaaagaatactccgaaaccgagaaggaagccccatggcagatacaggagacggcccccccttcctcttggccccaggtgggtagagtggaattccgtaattactgtttgaggtaccgcgaagacctcgattttgtactgcggcacataaacgtaaccattaatgggggcgaaaaagtgggaatcgtcggtaggacgggcgcaggtaaatcatcactcaccttaggcctgtttcggataaacgaaagcgctgagggggagatcattattgacggtattaatatcgctaagatcggcttacatgacctgcggttcaaaataaccatcatcccccaggaccccgtgctgtttagcggctctctgcgcatgaatctcgacccgtttagccaatatagtgatgaggaagtgtggacctctctggaacttgctcacctcaaagattttgtatccgcactgcctgataagctagatcatgagtgcgccgaaggaggagaaaatctaagcgttgggcagcgtcagttagtgtgccttgcgcgagctctcctacgaaaaaccaagattttggtgctcgacgaggccacagctgctgtcgatcttgaaaccgatgatctcattcagtccactatcaggacccagttcgaggactgtaccgtgttgaccattgctcaccgtttaaacactatcatggattatacaagagtaatcgttctggacaaaggcgagatccaagagtatggagccccttcagacttactgcaacagagggggctcttttattcaatggctaaggacgctgggctcgtctag

SEQ ID NO: 13940 - DNA, 4626 bp, synthetic construct
  misc_feature 1..4626: note = Description of Artificial Sequence: Synthetic coding sequence
  source 1..4626: mol_type = other DNA
atggctctgagaggattctgctcagctgatggatccgaccctctctgggactggaacgtgacctggaacactagcaaccctgacttcacaaaatgcttccagaacacagtgcttgtttgggtgccgtgcttctacctgtgggcctgcttcccgttctacttcctttacctctcacgtcacgataggggctatatacagatgacgccactcaacaagactaagacagccctaggcttcctgctgtggatcgtgtgttgggccgacctgttctactctttctgggagcgctctcgcggcatcttcctggcacctgtgtttttggtatctcctaccctgctggggatcaccatgttactagcgactttccttattcagttggaacgaagaaagggcgtgcaatcttctggaattatgctgaccttctggctggtcgccctggtgtgcgctcttgccattctcagatctaagatcatgacagccctcaaggaagacgctcaggttgacctgttcagagatatcacattttacgtatattttagtctccttctgattcagctggtgctgtcatgcttttcggacagatctcctctattctctgaaactattcatgatccgaatccatgcccagagtcttctgcatctttcctatccagaattaccttctggtggatcactggtttgatcgttagagggtataggcagcctctggaagggtctgacctctggagcctcaataaggaggacacctctgagcaagtggtgccggtcttggttaagaattggaagaaggaatgtgccaagacaagaaaacagcctgttaaggttgtgtatagttccaaggaccctgcacaacccaaggagagttccaaggtcgacgcaaatgaggaagtagaagccttgatcgtcaagagtcctcaaaaggagtggaatccttccctgttcaaagttctctacaagaccttcgggccctattttctgatgagcttctttttcaaagctatccatgatctaatgatgttttccggtccgcagattctgaagctcttaatcaagttcgtgaacgacactaaggctccagattggcagggctacttctataccgtcctgctgttcgtgacagcttgtctgcagacactggtgttacaccaatattttcacatctgtttcgtctctggcatgcgaataaagacagccgtcatcggcgccgtatataggaaggccctggttattactaattctgcccgcaagtcttccacagtcggggagattgtgaatctaatgtcggtggatgcccagcgcttcatggacctggccacatatatcaacatgatttggtccgctcccctccaagtcatactggctctgtatctcctgtggctgaacctggggcctagcgttctcgcaggcgtcgccgtgatggtgctgatggtgcctgttaacgccgtgatggcgatgaagaccaagacctaccaagtcgcacacatgaaaagcaaggacaatagaatcaaattaatgaacgagatactgaatgggatcaaggtgctgaaactttacgcctgggaacttgcctttaaggacaaagtgctcgccatacgccaggaagagctcaaggtgttgaagaaatcggcttacttgtccgctgtcggaactttcacatgggtttgcacaccattcctcgtggccctttgtactttcgccgtgtacgtaaccattgacgaaaacaatatattggatgcgcagactgcctttgttagcctcgcgttgtttaatatactgaggttccccctgaatatactgcctatggtgatttctagtattgtgcaagcttctgtgagtctgaagcgcctaagaatctttttaagccatgaagaactcgaaccagattcaatcgagcgaaggcccgtaaaggatggtgggggcacaaattccataaccgttcgcaatgcgacgtttacctgggcacggtcagacccacctacgctaaatggcatcaccttctcgatcccagagggcgctcttgtggcggttgtgggtcaagtcggttgtggcaaaagttccctgctgagcgctctgctcgccgagatggataaggtggagggacatgttgcgatcaaaggttccgtcgcatacgttccccaacaggcgtggatccagaatgacagcctccgcgagaatatcctgttcggatgccaacttgaggaaccctattatcggtcagtgatacaggcttgcgccctgctccccgatttggagattcttcctagcggcgacagaaccgagattggagaaaaaggcgtgaacttgagcgggggtcaaaagcagagggtcagcctcgctcgggccgtatacagtaatgcggatatctacttgttcgatgaccctttgtccgctgtggacgctcacgttggcaagcacattttcgaaaacgtcataggtcctaaaggcatgctcaagaacaagactcgcatattagtcactcactctatgagctatctcccccaggtagacgtgatcatcgtgatgagcggtggcaagataagcgaaatgggaagctatcaggaactgctcgcaagggatggcgcattcgccgaattcctgcgaacctacgcgtcaaccgagcaggagcaggatgcagaggagaacggcagcactgtcatggatgaggaagaagcaggagtgactggtgtgtcaggacctggcaaggaggccaagcagatggaaaatggcatgctcgtaaccgactctgccggaaaacagctacaacgtcaattaagctcctcttcctcctactctggagatattagtcgccatcacaactctaccgccgaactgcaaaaggcagaggcaaagaaagaagagacatggaagctcatggaagccgataaggctcaaacgggacaagtaaagctttcagtctactgggattacatgaaggcgatcggtttattcatctcattcctcagcatcttcctgttcatgtgtaaccacgtgtctgccctagctagcaactactggctctctctgtggacggatgaccctattgttaacggcactcaggaacataccaaggtccgcttatccgtatacggggctcttggtatctcccaggggattgccgtgttcggctactccatggccgtctctattggcggaatcctcgcaagccggtgtctccacgttgacctgctacatagtatcctacgctctcccatgtcgtttttcgaacgcacaccatctggaaatctggtgaaccgctttagtaaggaactggatactgttgattcaatgatcccggaagttattaaaatgtttatggggtcactctttaatgtgattggggcctgcatcgtaatccttcttgcaaccccgatcgccgccatcatcatccctccattgggcctgatttacttcttcgttcagagattttacgtcgcctcctcccgccaactgaagcggctggaaagcgtgtctcgctccccagtgtattcccattttaatgaaaccttgttgggcgtgtcagtgatccgagccttcgaagagcaggaacgcttcatacaccagtcagacttgaaggttgacgagaaccagaaagcctactatcctagcatcgtggctaaccgctggctagccgtcagactggagtgcgtggggaattgcatcgtattatttgccgccctgttcgccgtgatcagtcgccacagcctgtctgcaggtctggtgggtttgtcagttagctatagcctgcaggtcaccacttatctcaactggctggtacgaatgagttcagagatggagacaaatatcgtagcagtagagaggttgaaagaatactccgaaaccgagaaggaggcaccctggcagatccaggaaactgcccccccgagctcatggccccaggtcggtcgagttgagttccgaaattactgtcttcggtaccgcgaagatctggactttgtgctcaggcacattaatgttactattaatggtggagagaaggtgggcatcgtgggcagaaccggggcagggaaatcttcactgacactgggattatttcgaattaacgagtctgcagagggcgagatcattatagatggtatcaatatagccaagatcgggcttcacgatctaagattcaagatcaccatcatcccacaggatccagtcctcttctctggttccttgagaatgaatctggatcccttctcgcagtacagcgatgaagaagtgtggacctcactggaactcgcccatctgaaagatttcgtttctgcactgcctgacaaactcgatcatgaatgcgccgagggcggcgagaacctttccgtcggacagaggcaactcgtctgccttgcccgtgccctactgcgcaagacaaagattttggtgctagacgaggcaaccgctgccgttgacttagaaacagatgatctaatccagtctacaatcagaactcaatttgaagattgcaccgtgctaaccattgcgcatcgtctgaatacaatcatggattatacacgtgtcatcgtccttgacaagggagagattcaggagtatggagcaccttccgatctgctgcaacagcgcggccttttctactccatggccaaggacgccgggctagtgtag

SEQ ID NO: 13941 - DNA, 4596 bp, synthetic construct
  misc_feature 1..4596: note = Description of Artificial Sequence: Synthetic coding sequence
  source 1..4596: mol_type = other DNA
atggcactgagaggattctgttcggctgatggctccgacccactctgggactggaatgtcacttggaacacgagcaatccagacttcaccaagtgctttcagaacactgtccttgtctgggtcccttgcttttacctgtgggcgtgcttcccgttttattttctatacctgagcagacatgatagggggtatatccagatgactccgttaaacaagaccaaaaccgcactcgggttcctgctttggattgtgtgttgggctgacctgttctattctttttgggaacgcagcagaggaatatttctggcacccgtgttcttggtgagcccgactttgcttggcatcactatgctactggcaacatttctgattcagttagagcgccgaaaaggagttcagagcagtgggatcatgctgaccttctggctggtggctttggtgtgtgctctggctatcttacggagcaagatcatgaccgccctgaaggaagacgcacaggtggacttgtttcgggatatcacgttttatgtgtattttagcctcctgctcattcagttagtgctctcttgcttcagcgaccgctcccccctgttttctgagactatccacgaccctaatccctgcccagagagttcagcaagtttcttgagccgcataactttctggtggatcactgggctcattgtaagaggctacaggcaaccgctcgagggcagcgacctctggtctctgaataaagaggatacgtccgagcaagttgtacccgtcctggtgaaaaattggaagaaggagtgtgcgaaaactagaaagcaacctgtcaaagtagtgtacagcagcaaagaccccgcacagccaaaggagtcaagtaaggtggatgcaaacgaggaagtcgaggccctcatcgttaagagcccacagaaggaatggaacccaagcttgtttaaggtcctctacaaaacctttggcccatacttcctgatgtccttcttcttcaaggccatccacgatctgatgatgttcagcggcccccagatcctgaaattattgattaaatttgtgaacgataccaaagcgcctgattggcaggggtatttctataccgtactgctgttcgtgaccgcctgccttcagaccctggtcctgcaccaatactttcacatctgcttcgtctctggcatgaggattaagacagctgtgatcggagccgtctataggaaggcactcgtcattaccaactcggcaagaaaaagcagcacagttggcgaaatcgtgaatctgatgagcgtcgatgcccaaagatttatggatctggctacctatatcaacatgatttggtctgcacccttacaggtcattctcgctctctacctcctgtggctgaacctgggacctagcgtgctcgctggggtagctgtcatggttctgatggtgccagtcaatgccgtaatggctatgaagaccaagacgtatcaggtggcccatatgaaatccaaagataatcgtattaagctcatgaacgaaatcttaaacggtattaaggtgctgaaactgtacgcctgggagctggcctttaaggataaagttttagccataaggcaggaggagctgaaggtcctgaaaaagagtgcatatctgtctgctgtgggaacttttacttgggtgtgtacaccgtttctggtggcactctgtacgttcgcagtttatgttacgattgacgagaacaacatcctggacgctcagaccgccttcgtaagcctcgccctttttaatatcctgagattcccactgaatattcttccgatggtgatttcatctattgtgcaggcgagcgtctctcttaagagacttagaatcttcctgagccacgaggaactcgagcccgattccattgagcggagaccagtgaaggatggaggtggcacaaatagcatcactgtgaggaacgctacttttacgtgggctcggagtgaccctcctactctcaatggtatcacattctccatcccagaaggtgcactggttgctgtagtgggccaggtcgggtgcggaaaaagctctttacttagtgctctgctggctgaaatggacaaggtggagggccacgttgccattaaaggatccgtcgcatacgtgccccaacaagcttggattcagaatgacagcctgagagagaacatcttgttcggctgtcagctagaggagccatattaccgcagcgtaattcaggcttgtgcgctcttgcccgacttggaaatcctgcctagtggagatcgcactgaaattggggaaaaaggcgtgaatttaagcggaggtcagaagcagagggtttcattggcccgcgcagtctactctaacgccgatatttacctatttgatgatcccctctccgccgtggatgctcacgtgggcaagcacatttttgaaaatgttattggaccaaagggcatgcttaaaaacaaaacaaggattctggtaacccattcaatgtcctacctacctcaggttgacgttataatcgtaatgtctggaggaaagatttctgagatgggatcttatcaggaacttctagcccgggacggtgcttttgcagaattcttgaggacctacgctagtaccgaacaagaacaagacgctgaggagaatggagtcacaggagtttcagggccagggaaggaggccaagcagatggaaaatgggatgcttgtgactgacagtgccggcaaacaactgcagcgtcagctctcttcaagttcatcttacagtggggacatcagccggcaccataacagtaccgccgaactgcagaaagctgaagcaaagaaggaagagacatggaaactgatggaagccgataaggctcagacgggccaggtgaagctatctgtgtactgggactacatgaaggccatcggcctatttatttcttttttgtccatctttctgttcatgtgcaaccacgtaagtgccctcgccagcaactattggctcagcctgtggactgatgatcccattgttaacggcacccaggaacataccaaggtgcggctcagtgtctatggcgcactcgggatatctcaggggatcgccgtgtttggatacagcatggccgtgagcattggcgggatcctcgcctcacggtgcctgcacgttgacctgctgcattccatactccggagccctatgtccttttttgaacggaccccaagcgggaacctggttaacaggttctcaaaagagttggatacggtggacagcatgattccagaagtgataaagatgtttatgggttccctctttaacgttataggggcttgtatagtcatactcttggcgacaccgatcgccgcgattataatcccaccactcggcctcatctacttctttgtacagcggttctacgtagccagtagccggcagcttaaacgactagaatcagttagtcggtctccagtttatagccattttaatgaaactttactcggggtcagcgtgatcagggcattcgaggagcaggagagattcattcaccagagcgacctgaaagtggacgagaaccagaaagcatattaccccagcatcgtagccaacagatggttggcggtgaggcttgagtgcgtgggaaattgtattgttctctttgctgccctgtttgctgtcatcagtcgacactcactctcggctggcctcgtgggtctgtctgtcagctactccctgcaagtgactacctatctaaattggctggttagaatgagcagtgagatggaaaccaatatagttgcagttgagagacttaaggagtactcagagacagagaaggaggctccgtggcagattcaagagacagcccctccaagtagttggccccaggttggacgagtggaattcaggaattactgcttgcgttaccgcgaggacctggacttcgttttgaggcacatcaacgtcactatcaatggcggtgagaaggtgggcattgttgggcggacaggggctggaaaatcctcattgacactgggcctcttccgcatcaatgaaagcgcagagggggaaattattattgacggtataaatatagcaaagataggcctacatgatctgcgtttcaagatcacaatcattccgcaagaccctgtccttttcagcgggtctctccgcatgaatttagatcccttctctcagtactccgacgaagaagtgtggacgagtctggagctggcgcacttaaaagacttcgtgtcagccctgccggataagcttgaccacgagtgcgcagagggaggggagaatctgtcggtcgggcaacgtcagctggtatgcctcgcccgcgcactactgcggaagacaaaaattctggttcttgacgaagccacagcagcagtggacctggagacagatgatctgatccagagcacaataagaactcagttcgaagactgtactgtgttgacgatcgcccatcggcttaacactataatggactatacgagagtcatcgtccttgataagggcgaaatccaggaatatggcgctccgtcggatctgctgcagcaacgtggcctgttttactctatggccaaggacgccggtctggtgtag

SEQ ID NO: 13942 - DNA, 3648 bp, synthetic construct
  misc_feature 1..3648: note = Description of Artificial Sequence: Synthetic coding sequence
  source 1..3648: mol_type = other DNA
atgtcttttttcttcaaggcaatacatgatctaatgatgtttagtggcccccagattttaaaactgttaataaagttcgttaacgatactaaggcgccagattggcaaggatacttttatacagtgttactgttcgttacggcatgtctgcagacgctcgtactgcatcagtacttccatatttgctttgtctccgggatgaggatcaaaaccgcagtcatcggcgccgtctaccggaaggccctggtgatcaccaattccgcacggaagtctagcaccgtgggagagatcgtgaatctgatgagcgttgacgctcagcgatttatggatctggcaacctatattaacatgatatggtctgcgcctcttcaggtaatcctcgctttgtacctgctttggttaaacctcggaccttccgtactcgcaggagtcgccgttatggtactgatggtccctgttaatgctgtcatggccatgaagaccaagacctatcaagtcgctcacatgaagtcaaaagataataggatcaagctgatgaatgaaatactcaacggtatcaaggtgctcaagctgtatgcttgggagctcgccttcaaggataaggtactggctattagacaggaggagcttaaagttcttaaaaaatctgcctaccttagcgccgtgggaacattcacctgggtgtgcacgccgttcctggtcgccctatgtacattcgccgtgtacgttacgattgatgagaacaacattctcgacgcccagacggctttcgtatctttggccctcttcaatattctgcgcttccctctgaatatcctgcccatggtgatctcaagtattgtgcaggccagcgtgtcgctaaagcgactacgcatctttctgagtcatgaagagctcgaacccgactcaatcgagaggagacccgtgaaagacggaggtggcacaaacagcataactgtgcgcaatgctacattcacatgggccaggtctgatccccctactctgaatggtataaccttcagcatccctgagggagccctggttgcagtggtggggcaggtgggttgtgggaaaagtagtctgctgtctgctctgttggcagaaatggacaaggttgaaggacatgtggccatcaagggatccgtggcatacgtgccacagcaagcttggatccagaatgactctctgcgagagaacattctcttcggatgccagctcgaagagccctactatcggagtgtgatacaggcctgcgcactgttgccagacctcgaaatccttccatctggcgatcggactgaaattggggagaagggggttaatctttccggtggccagaagcagcgagtttctctggcacgcgccgtctactccaacgctgatatatatttattcgacgaccccttaagcgctgtggacgctcatgtgggaaaacacatttttgagaatgtgatcggcccgaaaggtatgttaaagaacaaaacgcggatactagtgacccattcaatgtcatatttaccacaagttgacgtgattattgtgatgagcggcggaaagatatctgagatggggagctatcaggagttactggcacgcgacggggcgttcgcggagtttcttagaacatatgcttcaactgagcaggagcaggatgcagaagaaaatgggagtacggtaatggatgaggaggaagcaggagtcaccggagtgtcagggccaggtaaagaggccaagcagatggaaaacgggatgctggtaactgattccgctggaaagcagcttcagagacagctgtcaagcagttcctcttatagcggtgacatctcccgacatcacaatagtaccgcggagttacagaaagcagaggcaaagaaagaggaaacatggaagctcatggaagccgacaaggcccagacggggcaggtgaagctttctgtgtactgggattacatgaaggcaatcggcctctttatctcctttctgtcaatcttcctgttcatgtgtaaccacgtaagtgctctcgctagtaactattggctgtcactttggaccgatgatcctatcgtcaacgggacccaggagcacaccaaagtgcgtctcagcgtgtacggagcgttaggtatctcccagggcatcgctgtctttggttactccatggcagtgagcatcggtggcatcctcgcctccagatgtttgcacgtcgacctactgcatagcatcctgcgttctccgatgagcttctttgagcgcacacccagcggaaatttagttaaccggttttccaaggagctggataccgtggactccatgatcccggaagtgatcaagatgtttatggggtccctatttaacgtgattggcgcttgtatcgttatactgctggcaaccccaatcgccgcaattatcatcccccccctgggcctgatctattttttcgtacaacgtttttatgtggctagtagccgccagctaaagagattggagagcgtgagtcgaagcccagtgtatagccattttaacgagacccttctgggcgtatcagtaatccgggccttcgaggaacaggaaaggttcattcaccagagtgacttaaaggtggatgagaaccagaaagcttactatcctagtatagtagcaaatcgctggctagccgttcgcctagagtgtgttgggaattgcattgtactatttgcagccctcttcgcagtcataagccggcatagcctttccgctggccttgtagggttgtccgtgagttacagccttcaggtgaccacatatttgaactggctggtgcggatgtcctccgagatggaaacgaacattgttgctgtggagcgcctgaaggaatacagcgagaccgagaaggaagccccttggcaaatacaggagaccgccccaccaagcagctggccacaagtaggtcgcgtggaattccgaaattactgtttgaggtatagggaggatctggattttgttctgcgacatattaacgtaaccattaacggtggggagaaggttggtatagtcgggcgcacaggcgcgggcaagtcatcgctgaccctgggtctgtttcgaattaacgaatctgctgagggcgaaattatcattgacggaattaacattgcaaaaataggactccatgatctccgcttcaaaataaccattattccccaggatcctgttctcttcagcggcagccttcgaatgaacttagatcctttctcccagtactcggacgaagaggtgtggacctcactcgaactggcccacttgaaggactttgtgtcagccttgccggacaagttagaccacgagtgtgccgaagggggagagaatctgtcagtcggccagaggcaactggtctgcctggccagggcacttctcagaaaaaccaaaatattggtgcttgatgaagctactgccgccgtggatctcgagaccgacgatttaattcagagcacaatccgtacccaattcgaggattgcacagtgttgaccatcgcccatcggcttaatacaattatggattacaccagggtaatcgtgctggataaaggcgaaatacaggaatacggcgctccctccgacctccttcaacagcgcggcttgttctattcaatggccaaagatgccggactggtatag

SEQ ID NO: 13943 - DNA, 1968 bp, synthetic construct
  misc_feature 1..1968: note = Description of Artificial Sequence: Synthetic coding sequence
  source 1..1968: mol_type = other DNA
atgtccagctcaaacgtggaagtattcatcccagtcagccagggcaatacaaatgggtttccggcaaccgcaagtaatgacctgaaggccttcacagagggcgcagtactatcctttcataatatctgttaccgcgtcaaactgaaatctggctttctcccttgtagaaagccagttgaaaaagagatcctgagcaacatcaatggaatcatgaaacctggattaaatgcaattctggggccaaccggcgggggtaagtctagccttttggacgtgctggctgcccggaaggaccctagcggcctgagtggtgacgtgctcattaacggggcaccccggcccgccaattttaagtgcaacagcggatatgtcgttcaggacgatgtggtgatggggacccttaccgtgagagaaaacctgcaattctccgccgccctcagactggcaaccacaatgacaaaccacgagaaaaacgagcggattaacagagtcatccaggaactggggctggataaagtcgcggattccaaagtcggcactcaatttattagaggggtatctggtggagaacgtaaacggacttctatcggaatggaacttattactgatccctctattttgttcctagatgagcccactactggcctggacagcagtacggccaatgccgtgctgctgctgctaaaaaggatgtcaaagcagggacggaccatcattttcagtattcatcagccacggtatagcattttcaagctgtttgactccttgaccttgttagcttctggtcggttgatgtttcacggtcccgcccaagaggctcttggctatttcgagtccgccgggtaccactgtgaagcttacaataatccggcagatttctttctggacataatcaatggtgatagtacagctgtggccttgaaccgcgaagaagacttcaaagcgaccgagatcatcgaacctagcaaacaggacaagcccctgatcgagaagctcgcggagatttatgtgaactcttcattctacaaggaaacaaaggcagagctccaccagctttccgggggcgagaaaaagaaaaagattaccgtgttcaaggagatctcctacaccacctcattttgtcaccagttgaggtgggtgagtaagcgatccttcaagaatctactagggaaccctcaagcttctatagcacagattatcgttacagtagtactgggattagtgattggagccatttacttcgggctcaagaacgactcaaccggcatccagaatagagctggtgtgctgtttttcctgaccacgaaccagtgcttctctagcgttagtgctgtggagctatttgttgtggagaagaaattgtttatacatgaatacattagcggctactatagagttagcagctatttcctgggtaaactactctctgatttactcccaatgcgaatgctcccaagcatcatattcacgtgcatcgtgtatttcatgctgggattgaaaccaaaggccgacgctttctttgtcatgatgttcacgttaatgatggtggcctactccgcatcatcaatggcccttgctatagcggccggccagtccgttgtttctgtagcgaccctcttaatgaccatctgctttgtcttcatgatgattttttctggactcttggttaatctcacaacgatcgccagttggttatcctggttgcagtactttagcatcccaaggtatggctttaccgctctacagcataatgagttcctgggacagaacttctgcccagggctgaatgccacaggcaataacccctgtaactacgcaacatgtactggagaggaatacttggtcaagcaggggattgacctgtcaccatgggggctttggaagaaccacgtcgccctggcttgtatgattgtgatctttctgactattgcttacctgaagctgctattcctgaaaaaatacagctag

SEQ ID NO: 13944 - DNA, 1836 bp, synthetic construct
  misc_feature 1..1836: note = Description of Artificial Sequence: Synthetic coding sequence
  source 1..1836: mol_type = other DNA
atgagtagttctaatgtggaggtcttcattcctgtttcacaaggtaataccaacgggtttcccgcaactgcgagcaacgatctgaaagcatttaccgagggagctgtcctttctttccacaatatttgctatagagtcaaacttaagagtgggtttctgccctgtagaaagcccgtagaaaaagaaatactctctaacatcaatggcattatgaagccgggccttaacgccattttggggcctaccggcggtggaaagagcagcctgctggatgtcctggccgccaggaaggatccgagcggcctgtcgggggacgtgctgattaacggggcaccaaggcctgctaacttcaagtgtaacagtgggtatgtggtgcaagatgatgttgtaatgggcacactcacggtgagagagaatctgcaatttagcgctgcacttcgcctcgccaccaccatgactaatcatgaaaagaatgaacgaataaatcgcgtgattcaggagctgggcttagataaagtcgcggacagtaaagtaggaacacagttcatccgaggcgtaagcgggggagagagaaaaagaaccagcattgggatggaactgatcactgaccctagcattctctttctagacgaaccaacaaccgggctggactcctccacagctaatgccgtcctgcttcttttgaaacgcatgagtaagcagggcaggactatcattttctccatccatcagccccgctactcaatattcaaactttttgactccctcaccctccttgcctccgggaggttgatgttccatgggcctgcccaggaagcactggggtacttcgaatcggctggctaccattgcgaggcatacaataatcccgctgacttctttttagatatcattaacggcgattccaccgccgtcgctttgaatcgagaggaagatttcaaagcaacagagataatagagcctagcaagcaagataaacctctcattgagaagctggccgaaatctatgtgaacagctctttttacaaggaaactaaagctgagctccatcagctgtcgggtggcgagaagaaaaagaaaatcaccgtgttcaaggagatctcttataccacgtctttttgtcaccagttacggtgggtgtcaaagcgcagcttcaagaatctcctcggaaacccgcaagcttctatcgcccagattatcgttacagttgtcctcggactcgttataggtgcgatctacttcggcctgaagaacgacagtactggtattcaaaaccgtgcaggtgtgcttttttttttgacaaccaaccaatgctttagctccgtgtccgcagtcgaactctttgtggttgagaagaaattgtttatccatgagtacatttctggctattaccgtgtttccagctatttcctggggaaactgctctctgacctgttaccaatgcgtatgttgccttctatcatcttcacatgtattgtctacttcatgctgggtctgaaaccaaaggccgatgcttttttcgttatgatgttcacactaatgatggtggcatattccgcatcctccatggccctcgcgattgctgccggccagtcggtagtctcagtggctacactgctgatgacaatttgttttgtgtttatgatggtttgttggtcgataagtcagcctcttcatcttggctgtcatgggtttagtacatcagccttccatgacatggatctcaggctgtgttctataatgaacttttgggacaagacttctgcgcaggattctatgcaacaggaaacgatactggttacaatgcaacatgtgctggccaagaacatttggtag

SEQ ID NO: 13945 - DNA, 1212 bp, synthetic construct
  misc_feature 1..1212: note = Description of Artificial Sequence: Synthetic coding sequence
  source 1..1212: mol_type = other DNA
atggaccgtagcaaggaaaactgtatctcaggaccagtcaaagccacggccccagtgggagggccgaagcgcgtgttggttactcagcaattcccctgtcagaaccctctgcctgtgaacagtggccaagctcaaagagtcctatgcccgtctaacagttctcagcggatccctttgcaggcccagaagctggtgtcctcacataaacccgttcagaaccaaaagcagaagcagctgcaggccacctctgtgccacatccagtctcgagacctcttaataacactcagaaatcaaaacaaccacttccgagtgctcccgagaacaacccggaagaagagctagcgtccaagcagaaaaacgaggagagtaagaagaggcagtgggcccttgaggacttcgagatcggaaggcctctcggcaaggggaaatttggtaacgtctatcttgcaagagaaaagcaaagcaaattcattctcgcactcaaagtactatttaaggctcagttagagaaggctggggtagaacatcagctcaggcgggaggtggaaatccagtcccaccttcggcaccctaacatactccggctctacgggtacttccacgacgccactcgagtgtaccttatcttggagtacgcccccctcggcacagtgtacagggagctgcagaagctctctaaatttgatgagcaacgcacggcgacctatatcaccgaactggctaatgcattgtcttattgtcactccaagcgggtgatacatagggacatcaagccagagaatcttcttttgggatccgctggagagctgaagatcgctgacttcggctggtccgtacacgccccatcaagccggcgaactacactgtgtggtaccctggactacttgcccccagagatgattgaaggccgcatgcacgacgagaaagttgacctttggagcctgggagttctatgctacgaatttctggtcgggaagccacctttcgaggccaatacttatcaagagacctataagcgaatcagtcgagtcgagtttacgtttcctgattttgtaactgagggcgcccgcgatctgattagccgactgctcaagcataacccctctcaacgcccgatgttacgtgaggtcttggaacatccgtggataactgctaattcaagcaaacctagtaactgtcaaaataaggagtcagcctcgaagcagtcatag

SEQ ID NO: 13946 - DNA, 1212 bp, synthetic construct
  misc_feature 1..1212: note = Description of Artificial Sequence: Synthetic coding sequence
  source 1..1212: mol_type = other DNA
atggataggagtaaggagaattgtatctccggtcctgtgaaggcaaccgcacccgtcggaggccccaagcgggtcctcgtcacccagcaatttccttgccaaaacccgttacctgtcaatagcgggcaggcacagagggtgctatgtccctctaatagtagccagcgcatccctctgcaggcgcagaagctggtgagctcccataagccagtgcaaaaccagaaacaaaagcagttgcaagcaactagtgttccccacccagtgagcaggcccctgaacaatactcagaaaagtaaacagcccctgccatcagcacccgaaaataaccccgaggaagagctggcgtcaaagcagaagaatgaagaaagtaagaaaagacagtgggccttggaggacttcgaaatcggccggcccctggggaagggcaagtttgggaatgtgtacctggcccgggaaaagcaaagcaagtttattcttgcgcttaaagtgctatttaaagcacagcttgaaaaagcgggcgtggaacaccaattgcggcgggaagtggagatccaaagtcacctccgtcatcccaatatcctgcgcctgtatggttatttccacgacgccacaagggtatacctgatcctggagtacgcccctctgggaacagtataccgtgagctgcagaaactcagtaagtttgatgaacagcgaactgctacctacattaccgaactcgcgaatgccctgtcatattgtcacagcaagcgggttatccacagggatatcaagcctgagaatcttttacttggaagcgcgggagagctgaagattgccgactttggctggagtgttcacgctccttcctctaggcgcacaacattgtgcggaaccctggattaccttcctccggaaatgatagagggtcggatgcacgacgaaaaggtcgacctttggagtttgggcgtgctgtgttacgagtttttggtgggcaagccccctttcgaagccaatacctatcaagagacatataagagaattagcagggttgaattcaccttccctgatttcgtgaccgagggcgctagagatctcatatctcggctgttaaagcataacccatcccaaaggccaatgcttcgagaagtcctggaacacccttggatcacagccaactcaagtaagccgtctaactgtcagaacaaagagagcgcgagtaagcagagctag

SEQ ID NO: 13947 - DNA, 1212 bp, synthetic construct
  misc_feature 1..1212: note = Description of Artificial Sequence: Synthetic coding sequence
  source 1..1212: mol_type = other DNA
atggatcgatcaaaggagaactgcatttctggccccgtcaaggccaccgcaccggttgggggtccaaaaagagtgctcgtaacacagcagttcccttgccagaaccctctaccagtgaattccggacaggctcagcgagtgctttgcccaagcaacagctctcagcgcatccctctgcaagcacagaagctggtgagctctcacaagcccgttcagaaccaaaaacagaagcagcttcaggccactagtgtcccccaccctgtgagtaggcccctgaataacacccagaagtccaaacaaccgctcccttctgccccagagaacaatcccgaggaggaactggcctcaaagcaaaagaatgaggaatcaaagaagagacaatgggcccttgaagacttcgagatcggtaggccactcggaaaaggcaagtttggaaatgtatacctggcccgggagaaacagagtaaatttatcttggctctgaaggtgttgttcaaagcccagcttgagaaagctggggtggagcatcagctgaggagagaagttgaaatccaaagccacctcagacaccccaatatcctgcgactgtatggatatttccacgacgctaccagggtgtatctgatcctggagtacgctcctctcggcacagtctatagggaacttcaaaaactaagcaagttcgacgaacagagaaccgcgacatacataactgagcttgctaacgcgctgagctattgtcactccaaacgggtgattcacagagatattaaacctgagaatctgctcttgggctcagccggcgaactaaagatcgctgattttggctggtccgttcacgccccaagtagtcgacgtaccacactctgtggaaccctggactatcttccgccagaaatgattgagggcaggatgcatgacgaaaaagtggacctgtggtctctgggcgtgttatgctacgaatttttggtgggtaaacccccattcgaagcaaacacatatcaagaaacctataaaagaatttctcgtgtcgagttcaccttcccagacttcgtgactgaaggcgctcgggatctaatttcacgcctgttgaagcacaatcccagtcagcggcccatgctccgcgaggttctggaacacccgtggattactgccaactcatctaaacccagtaactgccaaaataaggaaagtgccagcaaacagtcatag

SEQ ID NO: 13948 - DNA, 1044 bp, synthetic construct
  misc_feature 1..1044: note = Description of Artificial Sequence: Synthetic coding sequence
  source 1..1044: mol_type = other DNA
atggatcggtctaaagagaattgcatctcggggccagtcaaggccactgcgccagttggcggccccaagcgagtcctcgtgacccagcaatttccctgtcagaatccgctccctgtgaatagcggccaggcacagagagttttgtgcccatccaatagcagtcagaggatccctctccaggcccagaagctcgtgtcatcccataaaccggtgcaaaaccagaagcagaagcagctgcaagcgacaagcgtaccccaccccgtgtcccgccccctgaataacactcagaagtctaagcagcctctgcccagcgcccctgagaataatcccgaggaggagcttgcgtccaaacaaaagaacgaggagtccaaaaaacgccagtgggctctggaagacttcgagattggccggccgttaggaaaggggaagttcggcaacgtgtaccttgctcgggagaagcagtccaagttcattctagctctcaaggttctgttcaaggctcagctggaaaaagccggagtggaacaccagctgagaagggaggtcgagatccagtctcatctgaggcacccaaacatccttcggctgtatgggtattttcacgatgccacacgcgtgtatctgattctcgaatacgctccactgggaacggtgtatcgcgagctccagaagctaagcaagtttgacgaacaaagaacagccacatatattaccgagttagcaaacgctctctcatactgccattccaagcgcgttattcatagagacatcaagccagagaatctgctacttggatctgctggggagctgaagatcgctgactttgggtggtccgtgcatgcccccagtagccgacgcacgacgctgtgtggaacccttgattatcttcctcctgagatgatagagggacggatgcacgacgaaaaggtggatctctggtctctcggcgtgttatgttacgaatttttggtgggcaaacctcccttcgaggctaacacttatcaggagacatacaaacgcatatcccgagtgcgacgcaattag

SEQ ID NO: 13949 - DNA, 1212 bp, synthetic construct
  misc_feature 1..1212: note = Description of Artificial Sequence: Synthetic coding sequence
  source 1..1212: mol_type = other DNA
atggacagatctaaagagaattgtatctccggccccgttaaagccacagccccggtcgggggcccaaaaagagtgctggttactcagcagtttccttgccaaaatcctctccccgtgaattctggtcaagctcagagggtcttatgtccctccaattcttcccaacggattcctctgcaggcccagaaattagtgtcttctcacaaaccggtgcaaaaccagaagcagaagcaattgcaggctacgagtgtgcctcatcccgtaagtcgaccgcttaataacacacagaaatctaaacagcctctgccttcagctcctgagaataaccctgaggaagagctagctagcaaacagaagaatgaagaatctaaaaagaggcagtgggcccttgaggacttcgagataggacggccactgggaaagggcaaatttggcaatgtctatctagcccgggagaagcagagtaaatttatcctcgccttaaaggttctttttaaagcacagttggagaaagccggcgtagagcaccagcttcggcgggaagtggaaattcagtcccatctccggcaccccaatatactgagactgtacggctatttccacgacgccacccgagtttacctcatcctggagtacgcacctctgggcacggtctatcgggagctccagaaacttagtaaattcgacgagcagaggacagctacgtacatcacagaactcgctaacgccctgagttactgtcattctaaacgggtgatccatagagatattaagcccgaaaatctgttgctggggtcagctggagagcttaagattgcggatttcggctggagcgtgcacgccccaagcagccggcgtactaccctgtgcggtacgctagactacctgccccccgagatgattgagggacgaatgcatgacgagaaggtggatctatggagtttgggcgtgctgtgttacgagttccttgtcggaaagccccccttcgaggccaatacctaccaagagacatataagcgaatcagccgggtggaattcacctttccagatttcgtgacagaaggcgcccgagatctgatcagccggctactgaagcacaatccatcgcagagaccaatgttacgggaggtgctcgaacatccctggatcaccgccaactccagcaaacctagtaactgtcagaataaggaatcagcctccaaacagtcctag

SEQ ID NO: 13950 - DNA, 1212 bp, synthetic construct
  misc_feature 1..1212: note = Description of Artificial Sequence: Synthetic coding sequence
  source 1..1212: mol_type = other DNA
atggataggagtaaagaaaactgcatctctggtcccgtgaaggcaacagcccccgtgggcggaccgaagcgcgttttggtcacacagcagttcccgtgtcaaaatcctctacctgtgaactcaggccaggctcagcgagtgctctgcccgtcaaattcgagccagagaattccacttcaagcacagaaattggtgtcatcccataaaccagtgcagaaccaaaagcagaaacagctgcaggccacgagcgttccacatccagtgtcaagacctctgaacaatacccagaagagcaagcagcccttgccatctgcccccgagaataacccagaggaggaactggctagcaaacagaagaatgaagagagcaaaaaacggcagtgggccctcgaagacttcgaaattggcagacccctggggaagggcaagttcggtaatgtctatcttgcccgcgagaagcagtctaagtttatcttagcactcaaggtcctgtttaaagcacagttggaaaaggccggcgttgaacaccagttgaggcgagaagtggagattcaatctcacctccgacacccaaatattctgagattgtacggctacttccacgacgcgacacgcgtgtacctgattctggagtatgccccactgggtaccgtgtaccgggagctgcagaagctaagcaagtttgatgaacaaagaacagctacttacatcactgagctggcaaatgctctctcctattgccatagcaagagagtgatacacagggatataaaacctgagaacctactactggggagcgctggggagctcaaaatcgcagactttggatggtctgtgcatgccccaagttcccggagaacgactctatgcggaacgctagactatttacctcccgagatgattgaaggccgcatgcacgacgagaaggtggacctgtggagcttgggtgtattatgctacgagttcctggtggggaaaccacccttcgaggcaaatacctaccaggaaacttataagagaatctcgagagtagaattcacgtttcccgatttcgtgacagagggagctcgcgatctgattagtaggctgttgaaacacaatccttctcagcgacccatgctgcgggaggtcctggaacacccatggattaccgctaactcctctaaaccctcaaattgccagaacaaagagtctgcttctaaacagtcttag

SEQ ID NO: 13951 - DNA, 1212 bp, synthetic construct
  misc_feature 1..1212: note = Description of Artificial Sequence: Synthetic coding sequence
  source 1..1212: mol_type = other DNA
atggatcgctctaaggagaactgtatttccggacctgtgaaagcaacggcacccgttggcggacctaagagagtcctggtgacccagcagttcccatgccagaaccccttgcctgtgaacagcgggcaggcccagagagtgctgtgcccctctaactccagccagcgcataccactgcaggctcaaaagctcgttagctctcacaaaccggtccagaaccagaagcagaagcagctccaggcaacctctgtcccacacccagtttcaagaccattgaacaatactcagaaaagcaagcagcccctcccaagtgcccctgagaataatccagaggaggagctggcttccaaacagaagaatgaggagagtaagaagagacaatgggcgctggaagatttcgaaattggccgtccactgggaaagggcaagtttggcaacgtatacctggctcgagaaaagcagtctaagttcatactcgcactcaaagtgcttttcaaggctcagctcgagaaagctggagttgagcatcaactgcgacgggaggtggagatacaatcccatctcagacacccaaatatcctgaggttgtatgggtacttccacgacgctaccagggtatatttgatcttggagtacgccccactggggacagtgtaccgcgaactgcagaaactttcaaaattcgacgagcagagaactgctacttatatcacagaactggctaatgccctgtcatattgccactccaagcgcgtgattcatcgcgacatcaaacccgagaatctgcttctgggttccgcaggagagctcaagatcgcggacttcgggtggagcgtccacgctccttctagtagaaggacgaccctgtgcggaaccctagattacctccccccagaaatgatcgaaggcagaatgcatgacgaaaaagtggatctgtggtccctgggagtcctgtgctacgaattcctggtgggtaaaccccctttcgaggctaatacatatcaggagacctataagaggatttctagggtggagtttaccttccctgacttcgtaaccgagggcgcccgggacttaatttctcgtctgctgaaacataacccatcccagaggcccatgctccgggaagtcctggagcacccttggatcacagctaactcatctaagccctccaactgtcagaacaaggagagtgcctccaagcaatcttag

SEQ ID NO: 13952 - DNA, 1212 bp, synthetic construct
  misc_feature 1..1212: note = Description of Artificial Sequence: Synthetic coding sequence
  source 1..1212: mol_type = other DNA
atggaccggtctaaggaaaactgcatctccggcccagttaaagccactgcgccagtcggcggtccaaagcgcgtgctcgttacacaacaattcccctgccagaacccactgcccgtgaacagcggacaggcacagcgcgtgctgtgcccttctaattctagccagagaattccccttcaagctcagaaactcgtatcttcacacaagccggtgcagaaccaaaaacagaagcaactgcaagccacctctgtcccccaccctgtcagccgccctctgaataatacccagaagtctaagcaacccctgcctagcgcaccagagaacaatcctgaggaagagttggccagcaagcagaagaatgaggaatcaaagaagcgacagtgggctctcgaagattttgagatcggccgaccacttgggaaaggaaaatttggaaacgtctatctggctcgcgagaagcagagtaaattcatcttggcactcaaagtgctgtttaaggcgcagctagagaaggccggcgtggagcaccaactgcggcgggaagttgagattcagtcccatctccggcaccccaatattctgcgcctctatggttatttccatgatgcgacccgcgtgtatctgattctggaatacgcccctcttgggacagtttatcgggagcttcagaaattgagcaagttcgatgaacagaggactgccacgtacatcactgaactcgccaacgccttaagctactgtcatagtaaacgagtaattcaccgagatatcaaacccgaaaatctccttttgggatcggcaggggaattaaagattgcagatttcggctggagcgtgcatgctcctagcagcaggcgcactaccttatgcggtaccttggattacctcccccccgaaatgatcgagggccggatgcacgacgaaaaagtggatttgtggagcttgggagtcctgtgctatgagtttctggttggcaagccccccttcgaggcgaatacataccaggagacttataagcggatctctcgcgtggagttcacattcccagattttgtgaccgaaggtgcccgcgacctcatcagcagactgctaaaacacaaccctagccagcgccccatgctcagggaagtgctggaacacccctggatcaccgctaacagttccaaaccttctaattgtcagaacaaggagtcggcttccaaacagtcttag

SEQ ID NO: 13953 - DNA, 1212 bp, synthetic construct
  misc_feature 1..1212: note = Description of Artificial Sequence: Synthetic coding sequence
  source 1..1212: mol_type = other DNA
atggatcgctctaaagagaattgcatttctggccccgtcaaggccacagctccggtaggcggtccaaagcgcgtgctggtcacacagcagttcccatgtcagaatcctttacctgtaaattctggacaggcgcagagggtgttatgtccaagcaattcctcacagcgaattccccttcaggctcaaaaactggtttctagtcataagccagttcagaaccagaagcagaaacagcttcaggctaccagcgtcccacatcccgtctctcgaccacttaataatacacaaaaaagcaagcagccattacctagtgcgccagagaacaatccagaagaagaacttgcatcaaaacagaagaacgaggaatctaaaaaaaggcagtgggctcttgaggacttcgagatcggtaggccccttgggaaaggtaagttcggcaacgtctacctggccagagagaaacagtctaagtttattttagctttgaaagtactatttaaagcccaattagagaaagctggtgttgaacaccagttgaggcgcgaggttgagatccagtcccatctgcgacatcccaacatactgcgcttatacggctacttccacgacgccacgagagtatacttaatcctcgagtatgcccccctggggactgtgtaccgcgagctgcagaagttatcaaaatttgacgagcagagaaccgcgacctacatcactgaactggcaaatgcgctgagctactgtcatagcaaacgagtaatacaccgggacataaaaccagagaacctgctgcttggatcagctggggagttaaaaatcgccgacttcggctggtctgtgcatgccccaagctccaggaggaccacactgtgcggcacactagattatttaccacctgaaatgatcgaggggagaatgcatgatgaaaaagtggacctttggtctctcggcgttctgtgctacgagttcctggtcggcaagccaccttttgaggcaaatacttatcaggaaacatataagcgcataagtagagtcgagttcaccttcccagatttcgtaacagaaggtgcccgggacttaatcagccgtttattgaagcacaacccttcccagagacccatgctccgcgaggtgcttgaacacccttggatcacggcgaattcaagtaaaccctctaattgtcagaataaagagtctgcaagcaagcagagctag

SEQ ID NO: 13954 - DNA, 570 bp, synthetic construct
  misc_feature 1..570: note = Description of Artificial Sequence: Synthetic coding sequence
  source 1..570: mol_type = other DNA
atggaccgatccaaagaaaattgtatctcagggcctgtcaaggccactgctcccgttgggggacccaaaagggtactggtgactcaacagttcccttgccaaaaccctctcccggtaaacagtggacaggcacagcgcgtcctgtgtccaagtaactcttctcaacgtatcccactgcaagcacagaaactggtttcttcacataaacccgtgcagaatcagaaacagaagcagctccaggccacctcagtgccccaccccgtgagtaggccgctgaacaatacacagaagagcaaacagccgctgccttctgccccagagaacaaccctgaagaagaactcgccagtaaacagaagaatgaagagagcaaaaagcggcaatgggccctggaagattttgaaattggtaggcctctggggaaaggcaaattcgggaacgtgtaccttgcccgtgaaaagcagagcaagttcatcttagccttgaaagtgctgtttaaggctcaactggagaaagcgggcgttgagcaccagttaaggagagaagtggaaatccaaagtcacttgcgctag

SEQ ID NO: 13955 - DNA, 444 bp, synthetic construct
  misc_feature 1..444: note = Description of Artificial Sequence: Synthetic coding sequence
  source 1..444: mol_type = other DNA
atggatcgatccaaggaaaactgtatttccggccctgtgaaagccacagcccccgtcggtgggccgaaacgcgtcttagtgacccagcagttcccttgccagaatcccctgccagtcaattccggccaggcacagcgagtgttgtgccccagtaactcatctcaaagaataccactgcaagctcaaaaacttgtaagctctcacaaaccagttcaaaaccaaaagcaaaagcagcttcaagctacatcagtgcctcatcctgtaagccgccctcttaacaacacccagaaatccaagcaaccgttgcctagtgctcccgaaaataaccctgaggaggaactggcatccaagcaaaaaaatgaagagtccaagaagagacaatgggccctggaggatttcgaaattggccgacctttggggaaggggaagttcggaaatgtgtag

SEQ ID NO: 13956 - DNA, 816 bp, synthetic construct
  misc_feature 1..816: note = Description of Artificial Sequence: Synthetic coding sequence
  source 1..816: mol_type = other DNA
atggaccgatcgaaagaaaattgcatcagtgggccagtcaaagctactgccccagttggagggccaaagagggtcttagtcacacagcaatttccctgccaaaacccccttcccgttaatagcggtcaagcccagcgggtgctgtgccctagtaattcctcacagcgtatccctttacaggctcagaagcttgtcagctcacacaagcccgtgcagaatcagaaacagaaacagctgcaggccactagcgttccccacccggtatcgagacccctcaataacacccagaagtctaaacagccgctgccaagtgctcccgaaaacaatccagaggaggaactcgcctctaaacagaagaatgaggagagtaagaagagacagtgggcactcgaggattttgagataggcagacccctcggaaagggaaagtttgggaacgtctacttggcacgcgaaaagcagtccaagtttatcctcgccctaaaggtgttgttcaaggcacagctggagaaggccggcgtggaacaccaattgcggcgagaggtcgagatccagagtcaccttcgtcaccctaatattttgcgcctctatgggtactttcacgacgctacgagggtctacctgatcttggagtatgcccccctcggaactgtttatcgggagctgcagaaactctcaaagttcgacgagcaacgaactgcgacctatatcacagagttagcgaatgctctttcctattgccatagcaagcgggtgatacaccgggatatcaagccagagaacttgctgttaggcagcgctggagaactcaagtag

SEQ ID NO: 13957 - DNA, 240 bp, synthetic construct
  misc_feature 1..240: note = Description of Artificial Sequence: Synthetic coding sequence
  source 1..240: mol_type = other DNA
atggatcgaagcaaggagaactgcatctccgggcccgtgaaagcaactgcccccgtgggcgggcccaagcgggtcctggtaactcagcagtttccgtgccaaaaccccctgcctgttaacagtggacaggcccaaagagtcctgtgtcctagcaattcttcccaacgcatcccgctccaggcccagaaactggtttcctcccataaaccagttcaaaatcagaaacagaaacagctgtag

SEQ ID NO: 13958 - DNA, 321 bp, synthetic construct
  misc_feature 1..321: note = Description of Artificial Sequence: Synthetic coding sequence
  source 1..321: mol_type = other DNA
atggaccgaagcaaagagaattgtatttcaggcccagtcaaagctactgccccagtcggagggccgaaacgcgtcctcgtgacacagcagtttccttgccagaatcccctgcctgtcaattctggccaagcccaacgagtactttgcccaagtaacagtagtcaaagaatccctctccaagcacagaagctggtgtcaagtcataagcccgtccagaaccagaagcaaaaacaactgcaggccacttcggttccccaccctgtaagccgccctcttaataacactcaaaaatctaaacaacccttgccaagcgcaccctag

SEQ ID NO: 13959 - DNA, 1035 bp, synthetic construct
  misc_feature 1..1035: note = Description of Artificial Sequence: Synthetic coding sequence
  source 1..1035: mol_type = other DNA
atggcccagaaggagaatagctacccatggccatatggcaggcagacagcccccagtggcttaagcaccctgccccaacgtgttttaagaaaggagcccgtcaccccttccgccctagtattaatgagccgatccaatgtccagcccaccgcagctcccgggcagaaagtcatggaaaacagcagtggaactcccgacattctgaccagacactttactatcgacgactttgagatcgggaggcctctggggaagggcaagttcgggaacgtgtacctcgccagagagaagaaatcgcacttcatcgtggccctgaaagtgctgttcaaaagtcaaattgaaaaagaaggggttgagcatcagctccgccgggagatagagatacaagctcatctccatcacccaaatattctgcggctgtataattacttttacgacagacgtaggatttatttgatactggagtatgcaccacggggcgaattatataaggagttacagaagtcctgcacatttgacgaacagcgtacagctaccattatggaggagctagccgacgccctgatgtattgccacgggaaaaaggtgattcatagagacattaagccagagaatttgctgcttggactgaaaggagaactcaaaatcgccgacttcgggtggtccgtgcatgcgcccagtcttcggagaaagaccatgtgcggaaccctggattatctgcctccagagatgattgaagggcgcatgcacaacgaaaaggtagacctgtggtgcatcggggtgctgtgttatgagttgctggtgggcaaccccccatttgagtctgcttctcacaacgaaacctaccgcaggatcgtcaaggttgaccttaaattccccgcaagtgtgccgatgggagcccaggacctgatctcaaaattgctacggcacaatccttcggagagactgccactggcgcaagtctcagcacacccttgggttcgggcgaatagccgccgggtcctcccgccatcagctctgcagtctgtggcttag

SEQ ID NO: 13960 - DNA, 912 bp, synthetic construct
  misc_feature 1..912: note = Description of Artificial Sequence: Synthetic coding sequence
  source 1..912: mol_type = other DNA
atgtcccgatccaatgtgcagcccactgcggccccaggccagaaagtcatggagaactcatctggcacccctgacattctgacccgccatttcactatcgacgactttgagattgggaggcccctgggcaagggaaagtttggaaacgtctatctcgctcgtgaaaaaaagagtcacttcattgttgctctgaaggtgctgttcaaatcccagatcgaaaaggagggcgtggaacaccagctccgacgggagatcgaaattcaggctcacctgcaccatcctaatattttaagactgtacaactacttttacgaccggcgcaggatttatttaatccttgagtacgcgccccggggagaattgtacaaggaactccaaaagagttgcacctttgacgagcaacgtaccgccactattatggaagagttggccgatgccttgatgtattgtcacggcaagaaagtgattcatcgtgacatcaagccagagaatttactactgggtctcaaaggggagctcaaaattgccgacttcggctggtccgtgcacgccccgagcctgcgacggaaaaccatgtgtggcaccctggactacctccccccagagatgatcgaaggtcgcatgcataatgaaaaggtggacctatggtgtattggcgtgctgtgctatgagctgcttgtgggaaatccacccttcgagagtgcctcccataacgagacctaccgacgtattgttaaagtggacttgaagttccccgcaagcgtgcccatgggtgcacaggatctaattagcaagctgttgaggcacaatccatccgaaagacttccactcgcccaggttagcgctcatccgtgggttcgagctaattcccgccgagtgcttcctccaagtgccctgcaatccgtcgcttag

SEQ ID NO: 13961 - DNA, 1035 bp, synthetic construct
  misc_feature 1..1035: note = Description of Artificial Sequence: Synthetic coding sequence
  source 1..1035: mol_type = other DNA
atggcacagaaggaaaactcatatccatggccctatggaagacagactgcacctagcgggctttctactctgccccagcgggtgctcaggaaagagccagtgacgcccagcgccttagttctgatgtcacggagcaacgtgcagccaaccgccgctccaggccagaaagtgatggagaacagcagtggcacaccagatatcctcacacgccacttcactattgacgattttgaaatcggtcggccgctggggaaaggcaaattcggaaatgtgtacctggcaagggagaaaaagagccacttcatcgtggcgctcaaagttctattcaagtctcagattgagaaggaaggagtggaacatcaactgcgaagagaaatcgaaattcaggcccatctgcaccatccaaatatccttcggctttataactatttctacgaccgcaggcgcatctatttgattctcgaatacgcccctagaggcgaactctataaggaactgcagaaaagctgcaccttcgatgaacagcggacagcaaccattatggaggagctcgccgacgccctcatgtactgccatggaaagaaagtcattcaccgcgatatcaaacccgaaaacctgctgctgggcctgaaaggggagctcaagatcgcggatttcggatggtctgtgcacgcaccctccctgcgcaggaagacgatgtgcggaactctcgattacctcccccctgagatgatcgagggtcgcatgcacaacgaaaaggtggacctgtggtgcatcggggtcctttgctacgaactgttggtggggaatccaccttttgagagcgcttcacacaacgagacgtacagacgcatagtaaaagtcgacctcaaattcccagcctcagtgcccatgggtgctcaagatttaattagtaaacttttacgccacaaccctagcgagagattgccgctggctcaggtcagcgcacatccgtgggtgcgtgcaaactcacggcgagtcctgccaccttccgccctgcagagcgtagcttag

SEQ ID NO: 13962 - DNA, 930 bp, synthetic construct
  misc_feature 1..930: note = Description of Artificial Sequence: Synthetic coding sequence
  source 1..930: mol_type = other DNA
atgtctagcccccgcgcggtggtccagcttgggaaagcacagcctgctggagaggagcttgccacggctaatcagaccgcccaacaaccaagcagccccgctatgcgcagattaaccgtggacgactttgaaattgggcggccgcttggtaagggcaaatttggaaatgtgtatttggctcggctgaaagagtctcactttatagtggccctgaaagttttgttcaagagccagatcgagaaagaggggctcgaacaccagctgcgtagggaaatcgagattcaagcacacttgcagcatcccaacattttgagactgtataactactttcatgacgcccggagagtgtatctgattctggaatatgccccacgtggcgagctgtacaaagaactccagaagagtgaaaagcttgacgagcaacgtacagctactattattgaggaactcgccgacgcactgacatactgccatgacaaaaaggttatacaccgcgatatcaaacctgagaacttacttttgggctttagaggggaagtgaagatcgcggattttggttggagtgtccacactcccagcctccgtagaaagacaatgtgtggcacactggactatcttccaccggagatgattgagggtcgcacctatgatgaaaaggtggatctgtggtgtattggggtattgtgctacgaactgctggtgggatacccacccttcgagtctgcctcccatagtgagacttacaggcgcatcctgaaggtagacgtgagattcccactctccatgccgttgggggcacgtgatctaatcagcagactgctcaggtaccagcccctcgagcgcctccctttagctcaaattttgaagcacccttgggtacaggctcattctaggcgggttctgccaccatgtgcccagatggcttcttag

SEQ ID NO: 13963 - DNA, 873 bp, synthetic construct
  misc_feature 1..873: note = Description of Artificial Sequence: Synthetic coding sequence
  source 1..873: mol_type = other DNA
atggcaactgccaatcagaccgcccagcagccgagctcccccgctatgcggaggctgacagtggacgattttgaaatcgggaggccgcttggcaaggggaagttcgggaacgtatatctggccagactgaaggaatcacacttcatcgtggctctgaaggtcctcttcaagtcccagatcgaaaaggagggcctggaacaccagctgcgccgcgagatcgagattcaggcacacctccaacatcctaacatcctcaggctgtataattacttccacgacgcacggagagtctatttaatactggagtacgctccccgaggggagctctacaaagaattgcagaagtcagagaagttggatgaacagcggacggccactatcattgaagagttggccgacgccctgacatattgccacgataagaaggtaatacatagggacattaaacctgaaaatctcttgctggggttccgcggcgaagtcaagatcgctgactttgggtggtctgtgcacaccccaagcctacgaagaaagacaatgtgtgggaccctggactacctccctcctgagatgatcgagggaagaacatacgatgagaaggtggacctctggtgcattggtgttctctgttacgagcttctggtgggatacccgcctttcgagtccgcctcgcacagtgagacctacaggcgcatcctgaaagtggacgtgcgatttccgctcagcatgccactgggagcccgcgaccttatctccaggctactcagatatcagcccctagaaagactccccctcgcacaaatcctcaagcacccttgggtgcaggcacacagtcgtagagtgctccccccttgcgctcagatggcatcatag

SEQ ID NO: 13964 - DNA, 828 bp, synthetic construct
  misc_feature 1..828: note = Description of Artificial Sequence: Synthetic coding sequence
  source 1..828: mol_type = other DNA
atgagaagactgacggtggatgacttcgagattggccggcctttgggaaagggcaagtttggtaatgtgtatctggcaaggcttaaagagtctcacttcatcgtggcactgaaagtgttgtttaagtcccagatcgagaaggagggactggagcaccagttaaggcgcgagatcgagattcaggcccaccttcagcaccctaacattctgagactgtacaattatttccacgatgcccggcgcgtgtacctcatacttgagtacgcccctagaggtgagctgtataaggaacttcagaagagcgagaaacttgatgagcagaggacagccaccatcatagaggagctcgccgacgcactgacgtactgtcacgacaagaaggtcattcaccgtgacattaagcccgaaaatctcctgctgggctttcggggcgaggtgaaaatcgctgacttcggttggtcagtgcacacacctagcctaaggcgcaaaaccatgtgcgggaccttggattatcttccccctgaaatgatagagggtaggacgtacgacgagaaagtcgacctctggtgtattggagtcctctgttacgagcttctagtgggctatcctccatttgagtccgcaagtcacagtgaaacctacagacgtattctcaaagttgatgtgcggttcccactgagcatgccactgggggcgagagatctcatatctcggctgctgaggtatcagcctcttgagaggctccctttggcccagattctcaaacatccttgggtccaggcccacagccgtcgcgtcttgcccccatgtgcacagatggcttcatag

SEQ ID NO: 13965 - DNA, 2589 bp, synthetic construct
  misc_feature 1..2589: note = Description of Artificial Sequence: Synthetic coding sequence
  source 1..2589: mol_type = other DNA
atgaatatccaagaacagggttttcctctggacctgggcgcttccttcaccgaggacgcaccccggccccctgtgcccggagaggaaggagaactggtgagcacagacccacgtccggctagttacagcttttgctccggtaagggggtaggcatcaaaggcgagacctctaccgctaccccacgacgaagcgacttggacctgggatatgagcccgaagggagtgcgtcccctactcccccgtacctgaagtgggctgaatctcttcattccttattggacgatcaggatggcatttccctgtttcgaacatttctgaaacaggaaggctgtgccgatctgcttgatttttggttcgcttgtaccggctttagaaagctggaaccatgtgatagcaatgaagagaaacggctgaaactcgcacgggccatctaccggaagtacatcttagacaataatggaatagtgagtaggcagacaaagcccgcaaccaagtcctttattaagggctgcattatgaaacagcttattgacccggcaatgtttgatcaggcacaaactgaaattcaggccacaatggaagagaacacatacccatcattcctcaagagtgacatttacctcgaatacactaggactgggagcgagtcaccaaaagtgtgctccgatcagtcctccgggagcgggaccggaaaaggcatttctggctatctgccaactttgaacgaggacgaggaatggaagtgcgaccaggatatggatgaagacgatggccgagacgcggcaccccccggaaggctaccccagaagctcctgctcgaaactgctgcccccagggttagtagcagccggcggtattcagaaggtagagagtttagatacggatcttggagggaacctgtgaacccttactatgttaatgcaggatatgcccttgcgcccgcgaccagtgccaatgatagcgagcagcaatcactgagctctgacgctgatactttaagcttgacagactcatcggtggatggcatacccccctatagaatcaggaaacaacatagacgcgagatgcaggaatctgtccaggtgaacggtcgagtgcccctgccgcacatccctagaacctaccgagtgccgaaggaagttcgcgtggaaccacaaaaattcgcggaggaactgatccaccgacttgaagcagtgcagagaaccagagaggccgaggagaaactggaagagagactgaagcgcgtaagaatggaggaagaaggggaagatggcgacccctccagcggacccccaggcccatgccataagcttccccctgcaccggcctggcatcactttcccccccggtgtgtggatatgggatgcgctggtctgcgcgacgctcacgaggaaaaccccgaatccatcctagatgagcacgttcagagggttcttagaactcccgggaggcagtctccgggtcccggccatagatccccagactctggacacgtcgctaaaatgccagttgccctggggggcgctgcatctgggcacggtaagcacgttccgaagtctggggctaagctggacgcagccggtttgcaccatcaccgccatgtgcatcaccatgttcaccattcaactgcacgccccaaggaacaggtggaagctgaggccaccagacgcgcccagagcagctttgcctgggggctggagccccattctcatggagctaggagccgtggttactccgaaagcgttggagccgcgcccaacgcctccgatgggctggctcattccggaaaggttggggtggcgtgcaagagaaatgcaaaaaaagccgagagcgggaagagtgcttccactgaggtgcccggagcgtccgaggacgctgaaaagaatcagaaaataatgcagtggatcattgagggggagaaggagatttcacgtcacaggagaaccggtcacgggtctagtggcacgcggaagccgcagccccatgaaaattcccggccactctccctggagcacccttgggctggaccacaacttcgcactagtgttcagccctcccatctgttcatccaagacccgaccatgcccccacaccccgctcctaatcctttgacacagctggaagaagcccgccgccgcctagaagaggaagagaaaagagctagccgggcaccatccaaacagcgctacgtgcaggaagtcatgcgtagagggcgcgcgtgcgtgcggcctgcttgtgcaccagtgttacacgttgttcccgccgtctctgatatggagctctcagagaccgaaacacggtctcagcggaaggtgggcggggggtctgctcagccttgcgactcaatcgtggtcgcttattacttctgtggggagcctataccttatcgaactctcgtgcgggggcgagcggtcactctcggccagttcaaggaactgcttaccaaaaaaggctcttaccgatactacttcaaaaaagtgagtgatgaatttgactgcggggtggtctttgaggaggtccgcgaagatgaagcagtgctccccgtctttgaggagaagatcataggaaaagtcgagaaagtcgactag

SEQ ID NO: 13966 - DNA, 2481 bp, synthetic construct
  misc_feature 1..2481: note = Description of Artificial Sequence: Synthetic coding sequence
  source 1..2481: mol_type = other DNA
atgaatatccaagaacagggctttcctcttgacttaggcgcctctttcacagaggacgctcctaggccgcctgtgcccggcgaagagggagagctggtgtccaccgaccctcggcccgcctcatactctttctgcagcggtaagggcgttggtataaaaggcgagacaagtacagctacacctcgtcgatctgacctggaccttgggtacgagccagagggaagtgcctcaccaacaccgccttatctcaaatgggctgagagtctgcatagcctgctagatgaccaggatgggatttcactgtttcggacgtttttgaagcaggaagggtgtgccgatctcttggatttctggttcgcgtgtacagggtttcgcaagttggaaccgtgcgattctaatgaagagaaaagactcaaattggccagagcgatttatagaaagtacatcctggacaacaacggcatagtgagccggcagaccaaacctgccacaaaaagcttcatcaaagggtgtattatgaagcaattgattgacccagctatgttcgatcaggctcagactgagattcaggcaaccatggaagaaaatacataccctagctttctgaagtccgacatctacctggagtacacgcgcactggcagcgagagccctaaagtctgctctgaccagtctagcggctcgggtactggaaaaggcatctcaggttacctccccaccttgaatgaagatgaagaatggaagtgtgaccaggatatggatgaggacgacggcagagacgctgccccccccgggaggctcccgcagaaactgcttctggagacagccgccccccgagtgagctcaagccgtagatatagcgaaggaagggagtttcgctatggctcctggcgtgaacctgtaaatccttattacgtgaatgcaggatacgcgctcgcgccagcaacttctgcaaacgactcagaacagcaatcattgtcttcggatgccgacacactgtctctaaccgactcaagcgtggacgggatccctccatacaggatcagaaagcagcacagacgggaaatgcaagagtcggtacaggtgaatgggagagtgccgctgcctcatattccaaggacctacagggtccccaaggaggtacgcgtcgagcctcagaaattcgccgaggaattgatccatcgtctagaggccgttcagcgtacaagagaagctgaggagaagctggaggaaaggcttaaaagggtgcggatggaggaggaaggcgaggacggggacccaagcagtggtccaccaggcccctgccataagctgcctcccgcacccgcttggcaccacttcccgccaagatgtgtggatatgggatgcgccggactccgcgacgcgcacgaggaaaatcctgaaagcatcctggatgaacacgtgcagcgtgtccttcggacccctggacggcaatctccagggccaggccatcgcagccctgactctggacatgtggcaaaaatgccagtggcactgggcggagccgcctccggccatgggaagcatgttccgaaaagcggcgcaaagctggacgccgccggtcttcatcaccaccggcatgtccaccaccacgtccatcattccacagccagacctaaagaacaggttgaagctgaggcaacaaggagggcccagtcctcttttgcctggggccttgagcctcacagccatggtgccagatcccgtggctacagcgagagcgtgggggctgctcctaatgcatcagacgggctggcccactctggcaaagtcggagtggcctgcaaaaggaatgctaagaaagcagagtcaggaaagtcagccagcaccgaagtccctggtgcaagcgaagatgcagagaagaaccagaaaatcatgcagtggatcattgagggcgaaaaggagatctctcgtcaccgacgcaccggacatggcagtagcgggacaaggaagccacagcctcacgagaattcccggcccctgtcattagaacacccgtgggcaggcccacagctcagaacctctgttcagcccagccacttgtttattcaagatccaacaatgccaccccacccggccccaaaccctcttactcaactggaagaagctaggcgaaggcttgaggaagaggaaaaacgcgcctcgagggctccgagcaaacagcgcactcgttcccagcgaaaagtgggtggtgggtctgcccagccatgcgacagcatcgtcgtggcctactacttttgtggggaacccatcccatatagaactctggtgcggggaagggccgtcacacttggacagtttaaagagctgctgactaagaagggctcgtaccgctattatttcaaaaaggtatcagatgagtttgattgcggggtcgtcttcgaagaggtgcgtgaagacgaggcagtgctgccggtattcgaagagaaaatcatcggtaaggtagagaaagtcgactag

SEQ ID NO: 13967 - DNA, 309 bp, synthetic construct
  misc_feature 1..309: note = Description of Artificial Sequence: Synthetic coding sequence
  source 1..309: mol_type = other DNA
tgactggaggaggaagagaagcgggccagcagagctccctccaagcagcgcacacgatcccaacggaaggtgggcggaggcagcgcccaaccctgtgactcaattgtggtggcatactatttctgtggagaacctatcccctaccgtacattggttcgcggtagagccgtaaccctcgggcagtttaaagagttgctaacaaagaagggctcctaccggcctccaagccatctccgctgttgtctcctcaccgcactcctcacttccgtcctccagatcctgctgcaagaaagcgagagacgagtgtag

SEQ ID NO: 13968 - DNA, 1824 bp, synthetic construct
  misc_feature 1..1824: note = Description of Artificial Sequence: Synthetic coding sequence
  source 1..1824: mol_type = other DNA
atggtatgcacgcgcaagaccaagactctcgtgagtacctgtgtaatactgtctgggatgactaatattatttgtctgttatacgtcgggtgggttaccaattacatcgctagcgtctatgtgcgtggccaggaacctgccccggacaaaaaactggaggaggacaagggcgacactttaaagattatcgagcgcctcgatcacctagagaatgtcatcaaacaacacatacaagaggcgccagcaaaacccgaggaagcagaggcagagcccttcacagactccagtttgtttgcccattggggtcaagaactctcccctgaaggtaggcgggttgcgctcaaacagttccagtactacggctacaacgcttacttatccgatcggcttcccctagacagaccactgccagacctgcggcccagcgggtgtaggaacctctcattcccagactcacttcctgaggtgtctatcgtgtttatctttgttaacgaggctctcagtgtattgctgcgatcaatccattccgctatggagaggacacctccacatttactgaaagagattattttggtggacgataactcaagcaatgaagaactgaaagaaaaactgacggagtacgtggataaagtgaactctcagaaaccagggttcataaaggtagtccgacatagcaagcaggagggacttattagatcgcgggtatctgggtggagggccgctaccgcccctgtcgttgccttgttcgacgcccacgtggaattcaacgtggggtgggccgaacctgttctcactaggataaaggaaaaccgaaaaaggatcatcagcccgtcttttgacaatattaaatacgataacttcgaaatcgaagagtacccactggctgcacaaggctttgactgggagttgtggtgcaggtacttaaacccccccaaggcatggtggaaactggagaattccacagcgccgattcggagtccagccttgatcgggtgtttcatagtggatagacagtatttccaggagataggcctgctcgacgagggcatggaggtatatgggggcgagaacgtggaactggggatccgggtgtggcaatgcggcggctcagtggaagtgctgccatgcagcaggatcgcgcatattgagagggctcataagccctacactgaagacctgacggctcacgtgcgaagaaacgcactgcgcgtggctgaggtttggatggatgaatttaagtcacatgtgtatatggcgtggaatataccacaggaggactcaggtatagacatcggggatatcaccgctcggaaagccttgaggaaacaactccaatgcaagactttcagatggtacctggttagtgtttaccccgaaatgagaatgtacagcgacataattgcctacggcgtgctgcaaaatagtcttaaaaccgacctttgtctagaccaaggcccagacacggagaatgtgcctattatgtatatttgtcatgggatgacaccccagaatgtgtactacacatcctcccagcagattcacgtagggatcttgagtcctactgtcgatgacgacgacaaccgctgcttggtcgatgtcaacagccgccccagactcatcgagtgctcgtacgcaaaggctaagcggatgaaactccactggcagtttagccagggcggccccatccagaataggaaatccaaaagatgcttagagttgcaggaaaactctgatttggagtttgggtttcagttagtgctacagaaatgcagcggacagcattggtccattactaatgtactcagaagtctcgccagctag

SEQ ID NO: 13969 - DNA, 1710 bp, synthetic construct
  misc_feature 1..1710: note = Description of Artificial Sequence: Synthetic coding sequence
  source 1..1710: mol_type = other DNA
atgtctacctactcgacctttcctgccggagtgcccgttagtgagagaagtttggcacgggccggcttctattataccggcgttaatgataaagtcaaatgcttctgttgcgggctgatgctggacaattggaaattgggagactcgccaattcagaagcataaacagctttacccatcttgttccttcatacagaacctggtgtctgcctcgctgggtagcacctctaaaaacacatcgcccatgcgaaactcctttgcccatagtctgtctccaaccctggagcactctagtcttttcagcggctcctattcctcactgagtcccaaccccctcaactcgagggcagtggaagatatttcctcatcaagaactaacccatatagttacgccatgtctaccgaagaggcgcgattcttgacgtatcacatgtggccgctcacctttctcagcccaagtgaactggccagagcaggcttctactacatcgggcccggcgatcgagtagcttgcttcgcttgcgggggcaaattgagtaactgggaacccaaagatgacgccatgtcagagcatcggcggcatttcccaaactgcccttttctcgaaaactccctggaaacactgcgcttctctatctctaatctatctatgcagacacacgccgccaggatgcgcacgttcatgtactggccatcatctgttccggtacagcccgaacagctcgctagcgctgggttctactatgttgggcggaatgacgatgtcaagtgcttttgctgtgacggcggcctgaggtgctgggagtctggagatgacccatgggtcgagcacgcaaagtggtttccaaggtgtgaatttctcatccggatgaaagggcaggagttcgttgatgagattcagggcaggtatccccatttgctggagcagttattatcgacaagtgatacgacaggagaagaaaatgctgacccgccaattatccacttcgggcctggtgaaagttcctccgaggacgccgtcatgatgaacacccccgtggtgaagtcggccctagagatgggatttaaccgggacctggttaagcagacggtacaaagcaaaatcctgacaactggggagaactacaagactgtgaacgatatagtgtccgcattactaaacgcggaagatgagaagagagaagaagagaaggagaagcaggctgaggagatggcttccgacgatcttagcctgattcgtaagaaccgcatggcactgtttcagcagctcacatgcgtcttacctatcctcgataaccttctaaaggcgaacgtgatcaataaacaggagcacgacatcataaaacagaaaacacagattcccctccaggctcgcgaactgattgatactatcttagttaagggaaatgcagcagctaacatattcaaaaattgcctgaaggagatagatagcactttgtataaaaacctctttgtcgacaagaatatgaagtatatccccactgaggacgtctctggactgtccctggaggaacagctgagaagactgcaagaggagcggacctgtaaggtctgtatggacaaagaagtttctgtcgtgttcatcccctgcgggcatttggttgtttgccaggaatgcgcaccttctctgaggaagtgtccaatatgtagaggaattattaagggaacggtccggacattcctgtcctag

SEQ ID NO: 13970 - DNA, 1794 bp, synthetic construct
  misc_feature 1..1794: note = Description of Artificial Sequence: Synthetic coding sequence
  source 1..1794: mol_type = other DNA
atggaagacagcaccatattgtccgattggacaaactccaacaagcagaagatgaaatacgatttcagctgtgaattgtaccggatgagtacatactcaacgttccccgccggtgtcccagtttccgaacggtctctcgctcgcgccggattctactacactggcgttaatgataaggtgaagtgtttctgttgtggccttatgctcgataactggaaattgggggatagccccatccagaaacataagcagctgtatccaagctgtagctttattcagaaccttgtcagtgctagcttgggatccacttctaaaaacaccagtcctatgcgtaattcattcgcccattccttatcccctactctggaacattcttctctattctccgggtcatacagctccctgtcacccaatccactaaacagcagggctgtggaagatatttcctcttccagaactaatccttattcatatgccatgtctacagaagaggctagatttctgacgtaccacatgtggcctttgaccttcctcagcccttcagagcttgcccgcgcaggcttttactatattggtcctggagatcgcgtcgcctgttttgcgtgcggaggtaagctgagtaactgggagcccaaggacgatgccatgtctgagcatcgccgtcactttcctaattgccctttcctggagaattcgctggagacactacgctttagtatcagcaatctatctatgcagacccatgccgcaagaatgcgaactttcatgtactggcctagtagtgtgcctgtacagcctgaacaactcgcctctgccggcttctactatgtgggaagaaacgacgacgtaaaatgcttctgttgcgatggtggtctgcgctgctgggagtcaggagacgacccatgggttgaacatgctaaatggtttccccggtgcgaattcctgattaggatgaagggccaagagtttgttgatgagatccagggccgttaccctcaccttcttgaacagctgctgtccacctcagataccactggagaggagaacgcggaccccccaataatccactttggcccaggcgaaagcagctcagaggacgcagtgatgatgaataccccagttgtgaagtccgccctagaaatgggattcaacagggaccttgtcaaacagactgttcaatcaaagattttgactacaggagagaattacaaaacggtaaacgatatcgtgtcagctttactcaacgctgaagacgagaaacgagaggaagagaaagaaaaacaggccgaggagatggcctctgacgacttaagcctcattagaaaaaatcgcatggccttgtttcagcagctcacatgtgtactgcccatcctagataatctgctgaaggctaatgttattaacaagcaggaacacgatataatcaaacaaaaaacacagatcccactgcaggcccgcgaactgatcgacaccattctggtgaaagggaacgccgcagctaacatcttcaaaaactgcctgaaagagattgatagcaccctgtacaaaaacctttttgtggataaaaatatgaaatacattccaacggaggatgtatccggattgtcactcgaggaacagctgaggcgcttgcaggaagagagaacctgtaaggtgtgcatggacaaggaagtgtctgtggtgtttatcccctgtggccaccttgtggtgtgccaggagtgcgccccatctctcaggaaatgtcctatctgtagagggatcattaaagggactgtgcgtacatttctgtcctag

SEQ ID NO: 13971 - DNA, 1605 bp, synthetic construct
  misc_feature 1..1605: note = Description of Artificial Sequence: Synthetic coding sequence
  source 1..1605: mol_type = other DNA
atgcacaagaccgcaagccagcgcctgttcccggggccctcctatcaaaacatcaaatccataatggaggacagcacaatcctttctgattggacgaactccaataaacagaagatgaagtacgactttagttgtgaattatataggatgagtacctactcaactttccccgctggagttcccgtctcggagcgttctttagccagagccggattttactacactggggttaatgataaggtgaagtgtttttgttgcgggcttatgctggataactggaaacttggggacagccctatacagaagcacaagcagctgtacccttcttgctccttcatccagaacctcgtttcagctagcctcggcagcaccagcaagaacaccagcccaatgagaaactccttcgcccatagtctgagtcctactttggaacactcttccctgttttcaggctcttactcctccttatcccctaatcccctcaatagccgagctgtggaagatatttcaagtagcagaaccaacccctattcttatgccatgtccacagaggaggctcggttcctcacataccatatgtggccccttacttttttgtcaccctcagaactcgccagagccggtttctattacatcggcccaggcgatagggtggcctgtttcgcttgcggagggaaactgtccaactgggagcctaaagacgatgccatgtccgagcatagacgtcacttccccaattgtcccttcttagagaactcactcgaaaccctgcgattctcaatcagtaatctgagcatgcagactcatgccgcacggatgaggacattcatgtattggcctagcagcgtccccgtgcagccggagcagctcgcctcggcaggattctattacgtgggtaggaatgacgatgtgaaatgcttttgctgcgatgggggtttgaggtgctgggagagcggcgatgatccttgggtagagcacgccaagtggtttcccaggtgtgagttcttgattaggatgaaaggccaggagttcgtagacgaaatacagggaagatatccgcatctgctcgaacagttgctcagtacttccgacacaactggagaggagaacgcagatccccctatcattcatttcgggcctggagaatcaagttcggaagatgctgtgatgatgaatacccccgtcgttaaaagcgccttggaaatgggcttcaatagagacctggtcaagcagaccgtgcagtccaaaatattaacgacgggagaaaactacaagaccgttaacgacatcgtatccgccctgcttaacgctgaggacgagaaacgcgaggaggagaaggaaaaacaggccgaggaaatggcaagcgacgatttgtccttgatcagaaagaaccgaatggctctcttccagcagcttacttgtgtactccctatcctggacaatttactgaaagcaaatgtaatcaacaagcaggaacatgacatcattaaacagaagactcagattcccctccaggctagggaactcatcgatacaatccttgtgaagggcaacgccgcggcaaacatttttaaaaattgccttaaagtgaagcagcgcttttag

SEQ ID NO: 13972 - DNA, 1815 bp, synthetic construct
  misc_feature 1..1815: note = Description of Artificial Sequence: Synthetic coding sequence
  source 1..1815: mol_type = other DNA
atgaatatagtcgagaactctatatttctatccaacctcatgaagtccgctaacacttttgagctcaagtatgatttgtcctgtgaattgtatcgcatgtccacttactctactttcccggctggggtccctgttagcgagcgctccttggctcgggccggcttctattacacgggcgttaatgacaaagtcaaatgcttttgctgtggtttgatgctggacaactggaagcgaggcgacagccccactgaaaaacataagaagttatacccgagctgccggtttgtccagtccctgaactctgtgaataatctggaagccacttcccagccaacttttcccagcagtgtaactaactctactcacagtctgctgccggggactgagaacagcgggtacttcagaggttcctactctaattctccttccaacccagtgaactccagagctaatcaggatttctccgcgctcatgcgctcaagctaccattgtgctatgaacaatgagaatgcgagactcctgactttccaaacttggccactgacctttctgagtcccactgacctggctaaggctggtttttactacatagggccaggcgacagggtcgcgtgttttgcttgcggaggtaaacttagcaattgggagccaaaagataatgctatgagtgagcacctgcgtcactttcccaaatgcccatttattgaaaaccagcttcaagatacctcaagatacaccgtcagcaatctgagcatgcagacccacgcagcaaggtttaagacattctttaattggccttcgtccgtcctggtcaaccccgagcagctggcttccgccggcttttattatgttgggaattccgatgatgtgaaatgcttctgttgcgacggcggactcaggtgttgggaaagcggagacgacccttgggttcaacatgctaaatggtttcccagatgtgagtacctgataagaattaaggggcaggagttcattcgtcaggtacaggcctcatatccccacctactcgagcagctcctaagtacatccgacagtcctggcgatgaaaacgccgagtctagcattattcattttgagcctggggaagaccattcagaggatgccatcatgatgaatacacctgtcataaacgcggctgtggagatgggattcagccggagcctggtaaaacagaccgtgcaacgtaagatactggctaccggggagaactatcgcctggtcaacgacctagttctggaccttctgaatgccgaagacgagattcgagaagaagaaagagagagggctaccgaggaaaaggaaagtaacgacttacttctcattcgtaaaaatcggatggccttgttccagcacctgacctgcgtcattccaatcttagactcactgctcacagccggcataattaacgagcaagagcatgacgtcatcaagcagaagacacaaacgtcattgcaagctcgggaactcatcgacactatccttgtgaagggcaacattgccgctactgtctttcgtaactcattacaggaagcggaggccgtgctgtatgaacatctgtttgtccagcaggatattaagtacatacccaccgaggacgtatctgatctccccgtggaagaacaattaagaagattgcaagaggagcgtacttgcaaagtgtgcatggataaggaagtttcgattgtgtttatcccttgtggtcatctggtggtgtgcaaagactgtgccccgtccctgcgaaagtgtccaatctgccggtcgactattaagggaaccgttcgcaccttcctgtcatag

SEQ ID NO: 13973 - DNA, 1815 bp, synthetic construct
  misc_feature 1..1815: note = Description of Artificial Sequence: Synthetic coding sequence
  source 1..1815: mol_type = other DNA
atgaatattgtggagaactctatctttctgagcaacctcatgaagtctgctaacacattcgagctgaagtatgacttatcctgcgaactataccgcatgtcaacttattctacgttccccgccggggtgcccgtcagcgagcgtagtctggctagagccggtttctactacacaggagtgaatgacaaagtcaagtgtttctgttgcggacttatgcttgataactggaagcgcggcgactctccaacagaaaaacataagaaattgtatccatcttgtcggttcgtccagagcctcaattcagttaataacctcgaggctacctcacagcctacctttccatcaagcgttacaaatagcacccattctctcttaccaggtactgagaactctggctatttccgaggcagctattccaattccccatcgaatccagtgaatagtcgcgctaaccaggattttagcgctcttatgcgctcttcctatcattgcgctatgaacaatgagaacgccaggctgctgacttttcagacctggccgttgaccttcctgtccccaaccgacctggccaaagccggcttttattacattgggcccggagatagagtcgcatgcttcgcctgtgggggcaaactcagtaactgggagccaaaagacaatgctatgagcgaacacctccgtcacttccccaaatgtccctttatcgaaaaccaactgcaagacacatctagatatactgtgagcaacttgtcaatgcagacccacgcagctcgcttcaaaacctttttcaattggccgtcctccgttctagtcaacccagaacagctagcaagcgctggtttttattatgttgggaactcggatgatgtgaagtgtttttgctgtgatgggggactccggtgttgggaaagcggagacgatccatgggtgcaacatgccaaatggtttccccggtgcgaatatctcatacgaattaaagggcaggagtttatacggcaagtgcaagccagctacccgcacctcctcgaacagctgctttcaactagcgactcacctggggacgagaacgcagagtcctcaataattcacttcgaaccaggggaagaccacagcgaggatgcaattatgatgaatacgccggttattaatgccgctgtggagatgggtttttcgcgctccctggtgaagcagacagtgcagcggaagatcctcgctacgggtgaaaactaccggcttgtgaacgatctggtgctggatctactcaatgccgaagacgagatcagagaggaggagagagagagagccacggaggagaaagaatcgaacgatctgctccttatccgaaaaaatagaatggcgttattccagcacctgacgtgcgtgatcccaatcttggactctctcctgacagctggtatcattaacgaacaggaacatgacgttatcaagcagaaaacccagacatctctccaagctagagaactgatcgatacaatcctggtcaagggtaacattgctgccaccgtgttccggaacagcttacaggaggctgaagccgtcttgtacgagcacctctttgtccagcaagatatcaagtacatacctacagaggacgtttctgacctccctgtagaggaacagcttcgcaggcttcaggaagagagaacctgtaaggtctgcatggacaaggaggtgtccatcgtgtttataccctgtggccatctcgtcgtttgtaaggactgtgcaccttccttgaggaagtgtccgatatgccggagtacgatcaagggtactgtgaggacttttttaagttag

SEQ ID NO: 13974 - DNA, 498 bp, synthetic construct
  misc_feature 1..498: note = Description of Artificial Sequence: Synthetic coding sequence
  source 1..498: mol_type = other DNA
atgggcgccccaacattgcctcccgcctggcagccttttctcaaggaccacagaatctccaccttcaagaactggccttttctggaagggtgtgcttgtacacctgaaagaatggcggaagccgggttcatccactgtccaaccgagaatgaaccagatctagcgcagtgcttcttttgctttaaggaactagaggggtgggaaccggatgatgatccgatcggacccggcaccgtcgcgtatgcttgcaatacttccactctgggcgggcgggggggccggattacccgcgaagagcataagaagcactcttcagggtgtgcctttctttcagtcaaaaagcagtttgaggaacttacgctgggcgagttcttgaagctggacagggaaagagctaaaaacaagattgccaaagagacaaacaataaaaaaaaagaatttgaagagacagccgagaaagtccggcgggccattgagcagctagctgcaatggactag

SEQ ID NO: 13975 - DNA, 429 bp, synthetic construct
  misc_feature 1..429: note = Description of Artificial Sequence: Synthetic coding sequence
  source 1..429: mol_type = other DNA
atgggggcaccaacacttccacccgcctggcagcctttcctgaaagaccatcgaatttccacgtttaaaaattggccctttctcgagggctgtgcatgtactcccgaaagaatggccgaggctggcttcatccactgccccacagaaaatgaacccgacctagcacagtgctttttctgctttaaggaactagaaggctgggaacctgatgatgatcccatcgaggaacataagaagcattcaagcggatgcgcttttctgtccgtgaagaagcagttcgaagaacttactctgggtgaatttttgaaactggaccgagagcgggccaagaacaagatcgccaaagaaacaaacaataagaagaaagagttcgaggagactgcggagaaggtgcgccgcgcaattgagcagcttgccgccatggattag

SEQ ID NO: 13976 - DNA, 414 bp, synthetic construct
  misc_feature 1..414: note = Description of Artificial Sequence: Synthetic coding sequence
  source 1..414: mol_type = other DNA
atgggagcaccaacactgcccccagcctggcagcccttcctcaaggaccacagaatttctaccttcaagaactggccatttctcgaaggctgtgcctgtaccccagaacgaatggccgaggctgggtttatccattgccctactgaaaatgagcctgacctcgcccagtgtttcttttgttttaaggaacttgaagggtgggaaccggacgacgatcccatgcagcgcaagccaactatccgtaggaaaaatctcaggaaactgagaaggaagtgcgccgtaccctcttccagctggctgccctggatcgaagctagcggccgatcctgtctggtgcccgaatggctgcaccactttcagggcctcttcccgggggctacctcattgccagttggaccattagcaatgtcctag

SEQ ID NO: 13977 - DNA, 432 bp, synthetic construct
  misc_feature 1..432: note = Description of Artificial Sequence: Synthetic coding sequence
  source 1..432: mol_type = other DNA
atgggggcccctacactacctccagcctggcaaccattcctgaaggatcatagaatctccacattcaagaactggcccttcctggaaggatgtgcctgcacgcccgagaggatggccgaagccggatttatacactgtcccacggaaaatgagcctgatctggctcagtgcttcttttgtttcaaagaactcgagggctgggaaccagatgacgacccaataggtccaggaaccgtggcatatgcttgtaatacctccacgctgggaggtcgtggtgggaggatcaccagagaagaacataagaagcattccagcggctgcgcgttcctctcggtgaaaaagcaatttgaagaactgaccctgggcgaattcctaaagctggaccgggaacgcgccaaaaacaaaatcgagagagccctgctcgccgaatag

SEQ ID NO: 13978 - DNA, 14574 bp, synthetic construct
  misc_feature 1..14574: note = Description of Artificial Sequence: Synthetic coding sequence
  source 1..14574: mol_type = other DNA
atggtgaccggcggcggtgctgcacccccaggaacagtgacagaacccctgccctccgttatcgtcttgtccgctgggagaaagatggccgctgccgctgcagccgcatctggcccaggctgctccagtgcggccggagctggcgctgcaggcgtaagcgaatggcttgtgctccgtgacggctgcatgcattgcgacgctgatggactccactctttgagttatcatccagcactgaacgccatcctcgcagttacgtcgcgcggcacaatcaaggtaatagacgggacttcaggggccactcttcaggcatccgccctctccgcaaaaccaggaggccaggtgaagtgccagtacattagcgcagtagataaagtgattttcgtcgacgactacgctgtgggatgcagaaaggacttgaacgggatcctccttttggataccgccttgcagacacctgtgtcgaaacaggatgacgtggtgcagttagaactgcccgtcaccgaagcccaacagctgctgagcgcatgcctggagaaagtcgacatctcctcgacagaagggtatgacctgttcatcactcagctaaaagatggcctgaagaacaccagccacgaaacagcagccaatcacaaggtggctaagtgggcgacagtgaccttccacctcccccaccatgttctgaaaagcattgcgtccgcaatagtgaatgagctcaagaagatcaaccagaacgtggcagccctgcctgtggcttctagcgtgatggacaggttgtcttatctgttacccagcgccagacccgaactgggtgtggggccaggtcgttccgtcgaccgttcgctgatgtattctgaggcaaacagacgcgaaactttcacaagttggcctcacgtgggctatcgatgggcccagcctgaccccatggcccaagctggtttttaccatcagcccgcctcctctggcgatgatcgtgctatgtgctttacttgttctgtctgtctggtgtgctgggaacccacagatgaaccttggtcagagcacgaaagacattctccaaattgcccatttgtgaaaggcgaacatacccagaacgtgccactgagtgtgacactggcgactagccccgcccagttcccttgtacagacggaactgacaggatatcctgttttgggagcggaagctgcccccatttcctggctgctgccacaaagcgtggaaagatctgtatttgggatgtgtctaaattgatgaaagtccacctgaagttcgagataaacgcttacgaccccgccatcgtccagcagctcatcttgtctggcgaccccagctccggggttgattcccgtcgcccaacactggcttggttggaagattcttcaagttgttcggacatccccaagctcgaaggggactctgatgacctcctcgaagattcagatagcgaggaacacagcaggtccgattctgtgaccggacatacaagtcagaaggaagcaatggaagtgtctctggacatcactgctcttagcatactccaacagccagagaaacttcaatgggagatcgttgctaacgtgctcgaggataccgtcaaagacctggaggaactgggggccaacccttgcctcactaatagcaagagtgagaaaacaaaagagaaacaccaggagcagcacaatatcccttttccctgtctgctcgccggaggtctgttgacctataaaagtcccgccaccagccctatcagcagcaattctcaccggtcactcgacggcctctcccgcacgcagggggagtccatttccgagcagggaagcactgataacgagagctgtacaaactctgagctcaactccccactggttcggcgcactctccctgttctattgttgtactctataaaggaaagtgacgaaaaggccggaaaaatcttctcccagatgaacaacatcatgtctaaaagtctacatgacgacggatttactgtcccccagattatcgaaatggaacttgactcccaggaacagctgctgctacaggacccaccagtgacctacatccagcagttcgcagatgcggcggccaacctcacatcccctgactctgaaaagtggaattccgtgttccccaagcccggcactctggtgcagtgccttagactccctaagtttgccgaggaagaaaacctctgcatcgattcaatcacaccctgcgccgatggaattcacctgctggtaggcctcagaacctgcccagtggagtctctgtccgccattaaccaagtggaggctctgaataatctcaataagcttaatagcgccctgtgcaaccgaaggaaaggagagctcgaatccaatttggccgtcgtcaacggcgctaacatttccgtcatccagcacgaaagccccgccgatgtccaaactccactaataattcagccggagcagagaaacgtcagcggaggttatttagtattgtacaagatgaattatgcaacgagaattgtaacactggaggaggagcccataaaaatccaacatatcaaggatccacaggataccatcactagcctgatactactaccccctgacattctcgataatagagaagacgattgtgaagaacctatagaggacatgcagctcacctcaaaaaacgggttcgaacgggaaaaaacatcagacatctcaactttaggccacctcgtaatcactacacagggcggctatgtcaagatcctcgatctgtcgaacttcgagatattggcaaaagtggagccaccaaagaaggagggtaccgaagaacaggacacattcgtttccgtaatttactgcagtggcaccgatcgcctttgcgcctgcacgaagggcggggagttgcatttccttcagatcgggggcacatgcgatgatatcgacgaagccgatatcctagtggatggctcactgtcaaaaggaattgagccatcatctgaggggagcaagcctctgtccaacccgtcctcccccggaatctcaggtgtggatctcttggtggaccagcccttcaccttggagattctgacttctctcgtcgagttgaccaggttcgaaactttgacaccaagattctcggccacggtgcctccctgttgggtcgaggtccagcaggaacaacagcagcggagacacccccagcatctgcaccaacagcaccacggcgacgcagcccagcatacccgcacatggaaactgcagaccgacagtaacagttgggacgaacatgtgtttgaactcgtgctacccaaagcttgcatggttggccacgtggacttcaaattcgtgttgaatagcaacattacaaatattcctcaaatccaggtgactctgctgaaaaataaggcacctggtttgggcaaggtgaacgccctgaatatagaagtcgagcagaatggcaaaccctcactggttgatttgaacgaggagatgcagcatatggatgtcgaggaatctcaatgtctcagactgtgccccttcctggaggatcacaaagaggatattctctgcggtccggtatggttggccagcggattagatctgtcaggccacgccgggatgctgacattgacatcccccaaactggttaaggggatggctggcgggaagtaccgctcatttctaatccacgtgaaagcggtgaatgaaagaggaacagaggagatatgcaatggcggtatgcgtccagtggtgcgtcttcctagcctgaagcatcagtcaaataagggatatagcctggcatccctcctggctaaagtcgctgccggcaaggaaaaaagttcaaatgttaagaacgaaaatacctctgggacccgaaaatcagagaatctacggggatgcgatttacttcaggaggtcagcgtaactatccgacggttcaagaagactagtatttccaaagagagagtgcagcgatgtgcaatgctgcagttctcagagttccacgaaaagctggtcaacactctctgtcgaaagacagatgatggccagataaccgagcacgcccaaagcttggtcttagacaccctctgttggctcgctggtgttcattcaaacggccccgggagctctaaggaaggaaacgaaaatctgctctcaaagactaggaagttcctgtccgatatcgtgagagtatgctttttcgaggctgggagatcgatcgcgcataagtgcgctagattcttggctctgtgcatctccaacggaaagtgcgatccctgtcagcctgctttcggccctgtgctattaaaggccctcctggacaacatgtcatttctgccagcagccactacaggcggatccgtgtactggtatttcgttctgctgaattacgtgaaggacgaggacctggccggatgcagtaccgcgtgtgctagcctcttaaccgcagtttctagacagctccaggatcgtctgacgccgatggaggctctcctgcaaacaagatacggattatattccagcccttttgacccagtgctgttcgacctggagatgagcggctccagctgcaaaaatgtgtataactcttccattggagtgcagagtgatgaaattgatcttagtgatgttctctctggaaatgggaaggtttcctcttgtactgctgctgagggaagctttacctctctgactggcttattggaggttgagcccctgcactttacttgtgtgtcgacatctgacggtacacgcattgagcgggacgatgccatgtcttccttcggggtcactcccgctgtcgggggtctgagctctgggactgtgggggaggcaagtactgcgctgagctcggctgcacaggttgccctgcagtccctgtcacacgccatggcctccgctgaacagcagctccaggtgctgcaggagaagcaacagcaactcctaaaattgcagcagcagaaagcaaaactggaggccaaactccaccagacaactgctgcagccgctgccgctgcctccgcggttggtccagtgcacaacagcgtgcccagcaatcctgtggcagctccaggattcttcatacacccttctgatgttattcctcccacgccaaagaccacaccgctgttcatgacacctcctttaacccctccaaacgaggccgtttcagtggtgatcaatgccgagttagcgcagttattccccggatcagtcatcgacccacctgccgtcaacttagctgctcacaacaaaaattcaaataaatcccggatgaacccgttaggaagtggcctggcactggctatctcccatgcgtctcacttcctccagcccccacctcaccaaagcataattatagagaggatgcacagtggggcaaggcggtttgtgaccctcgattttggccggcccatcctgctcacagacgtcctgattcctacgtgtggggatctggctagtctgtcaatcgatatctggacactgggggaggaagtggatgggaggcgcctagtcgtcgccacagacatctctactcactcgctcatattgcacgatttgatacccccacccgtttgcagattcatgaagatcacagtgatcggtcggtatggaagcacaaacgccagagcgaaaatccctcttgggttctactacggccacacttacatcctaccttgggagtccgagctaaaactgatgcatgaccctctgaaaggggagggcgagtctgcgaatcagcccgaaatcgatcaacatctcgctatgatggtagcattgcaagaagatatacagtgtagatacaatcttgcttgtcacaggctggagaccctgttgcagtctattgatcttccccccctgaacagcgccaacaacgcccaatacttcctgagaaagccagataaagccgtggaggaggattcccgcgtgttttctgcctatcaagactgcatacaacttcagctccagctgaatctcgctcataacgcagttcagaggctgaaggtggccctgggagcctccaggaaaatgctgtcggagacttcaaaccctgaggatctgatacagactagctccaccgaacagttaagaaccatcattaggtatctgctagacacgctgctgtcattgctgcacgcctcgaatgggcactctgttccagctgtcctgcagtctactttccatgcacaggcttgtgaggagctgtttaagcacctttgtattagtggcacgccaaagatccggctgcacactgggctgttgctggtacaactttgcggcggagagagatggtgggggcagtttctgtccaacgttctccaggaactgtataacagcgaacagctgttgatttttccccaagacagggtttttatgttactgtcatgcattggacagcgcagcctgtcgaatagtggcgtactggagtctttacttaatcttcttgacaaccttcttagcccgctacagccacagctccctatgcacaggcggaccgaaggtgttcttgacatcccaatgatcagttgggtcgtgatgctggtcagcagattacttgactatgtcgccaccgttgaggacgaggccgcggcggctaaaaagcccttgaacggaaaccaatggtcctttattaataacaatctgcatactcagagtttaaacaggagttccaaagggtccagttccttagacaggctgtacagccggaagatacggaagcagttggtccatcacaagcagcagctgaatctccttaaggctaagcagaaggctctggtggaacaaatggagaaagaaaaaattcagagcaacaaggggagctcttacaaattgttagtggagcaggcgaagttaaagcaggcaacaagcaagcacttcaaggacctcatccggctgcgccgcacagcagagtggagccgtagtaatctggacaccgaagtgacaacggccaaggagtcccctgagatcgagcctctcccctttaccctcgcccacgagcgatgcatttcagttgtgcagaaactggtactcttccttctgtccatggatttcacgtgccatgctgacttgctgctgttcgtttgcaaagtcctcgcgcggattgccaacgccactcgaccaacgatccacttgtgtgagattgtgaacgaaccacagctggaaaggctcctgctactcttagttggaaccgatttcaacagaggggatattagctgggggggcgcgtgggcccagtattcccttacctgtatgcttcaggatattcttgctggtgagctgctcgcccctgtggccgccgaggccatggaggagggtacagtgggagatgatgtaggtgccaccgcaggcgattccgacgacagccttcagcagtcctccgttcaactgcttgagacaatcgacgagccactgactcatgatattactggcgctcctccactgtcgagcctggagaaagataaagagatcgatctggaattgttacaagatcttatggaggtggacatcgacccactggacatcgacctggaaaaggaccccttagccgctaaagtgttcaaacccatctcaagtacttggtatgattactggggcgcagattatggtacatacaattacaatccttacatcgggggtctcgggatccccgttgccaagccaccagctaataccgaaaagaacggtagccagacagtgagtgttagcgtgtcgcaggcccttgacgcgaggctagaggttgggctcgaacagcaagctgaactgatgttaaagatgatgtccacccttgaagctgacagtattctgcaggctctaactaacacgagccccacattgagccaatcacctaccgggacagatgatagcctccttggtggcctccaggctgctaaccagacatcccagttgattatccagcttagttcagtacctatgctgaacgtgtgtttcaataaactgttcagcatgttacaagttcaccacgttcagctcgaatctttactgcagctttggctgacgctgtcgctcaacagttcttccacaggcaataaagagaatggcgccgatatctttctgtataatgccaaccggattcccgtgatctctctgaatcaggcgagtattacaagctttctgactgtgctggcatggtaccctaataccctgctccgtacttggtgcctggtcctccactctctcacattaatgacaaacatgcaactcaactccggctcgtcatcagccattggcacccaagagagtaccgcacatctactggtgtccgaccctaatctcattcacgtgctagtgaagtttctgagtggcacgagcccccatgggactaatcagcactcccctcaggtaggtcctaccgccacccaagctatgcaagaattcttaacaaggttgcaggtgcacctgtccagtacttgcccccagatcttctctgaattcctcctgaagctgattcacattctcagcaccgagcggggcgccttccagaccggacaaggaccattggacgcccaggttaagctgctagaattcaccctggagcagaatttcgaggttgtatccgtctctaccatttctgccgtgatcgaatcggtaaccttcctggtgcatcattatataacctgttcagacaaagttatgtcacgatctggctccgattcttccgttggcgccagagcctgttttggcgggttatttgctaacctcatcaggccaggggacgcaaaggccgtctgtggggaaatgacgcgagaccaactgatgtttgacctactgaagctagttaacattctggtgcaactgcccctctccggcaacagagaatatagcgcccgagtgtccgttaccaccaatacgacagatagcgtgagcgatgaggagaaggtttccggcggaaaggatggtaatggttccagcactagtgtccagggctcacccgcctatgtggcagaccttgtgctggccaatcagcaaatcatgtcccaaattctgtcagcactgggtctctgcaactcctctgccatggccatgataatcggagccagtggcctccacctgacaaagcatgagaacttccatggtggcctcgatgcaatatccgtgggtgacggtttgtttactatcctaactactctctctaagaaggcaagcaccgtgcacatgatgcttcagcccatcctgacctatatggcctgtggatatatgggacgtcagggctccctggccacctgtcagttgtccgaacctctgctctggttcatcctgcgggtgttggacacctctgatgctctgaaagccttccacgatatgggcggagtgcagctgatatgcaataatatggtgacaagtaccagagcaatcgtcaacacagcgcgctcaatggttagtactatcatgaaatttttggattctggaccaaataaagccgttgactccacactgaaaacaagaatcctggccagcgaaccagataacgccgagggtattcacaattttgcgcccctgggcaccattacatcaagctctcctacagcgcagccagcggaagttctgttgcaggcgaccccccctcaccgcagggccaggagcgcggcttggagctacatttttcttcctgaggaagcctggtgcgacttgactatccacctgcccgctgcagtgctcctgaaggaaattcacattcaaccccaccttgctagtctcgctacgtgcccatcttctgtcagtgtggaagtgtctgccgatggggtcaatatgttaccactatctaccccagtagtgacttccggacttacctatataaagatacaactcgtcaaggcagaggtcgcctccgcagtctgtcttaggctgcatagaccgagggatgctagcacactgggtctgtcacagatcaaattgcttggacttaccgccttcgggaccacttcatccgccacagtgaacaatccattcctcccatccgaggatcaagtgtcaaagacatccatcggctggctgagactgttgcaccattgcctaacccacatcagcgatctcgagggcatgatggctagcgccgcagccccaaccgctaatctcctccaaacttgcgctgccctgctgatgtccccctattgcgggatgcatagccccaacattgaggtggtgctagtgaaaattggcctccagtcaacacgcatcggcctgaaacttattgacatcttactgcggaattgcgctgcatctggctcggatccaacagacttgaacagccctctcctgtttggtagattgaacggtctaagttcggatagtaccatagacatcctgtaccagttaggcaccactcaggacccaggaaccaaggaccggattcaggctttgctgaagtgggtcagtgatagcgctcgagttgctgccatgaagagatcaggtcgcatgaactatatgtgccctaatagctctactgtggagtacgggttattgatgccaagcccgtctcacctgcactgcgtggctgcaatcctgtggcattcctacgaactcctggtcgagtacgatctacccgcgctgcttgaccaagaactatttgaattactgtttaattggagcatgagtctgccctgcaatatggtgctaaagaaggccgttgactccttgctgtgcagtatgtgccatgtccacccaaattatttcagtctgctgatgggctggatgggcattacccccccgccggtccagtgccatcaccgcttgtcaatgaccgatgacagtaagaagcaagatctgtcaagcagtctaacagacgactcaaagaatgctcaggcacctctggcattgacagagtctcatctcgccaccctcgcttcaagcagccagagtcctgaagcaataaaacaactgctggactcaggtctcccaagcctgttagtgaggtcattagccagcttctgttttagccacatcagctcttctgaatcaatagctcaaagtatcgatattagccaagacaaactgcgtcgacaccatgtaccgcagcagtgtaataagatgcctatcacagctgacctggtcgcacccatcctgcggtttctgactgaggtgggtaacagccacataatgaaagattggttgggcggctcagaggttaatcccctgtggacagctttgctattcctgctctgccatagtggcagcactagcggaagtcacaacttaggtgcccaacagacctctgcacggtccgctagcctgtccagcgccgccaccacagggctgactactcaacaacgcacagccatagagaacgctacagtcgcttttttcctgcagtgcatcagttgccacccaaataatcaaaaattgatggctcaggtgctctgtgaactcttccagaccagccctcagagaggaaacctgccaacatcggggaatatcagtggatttattagaagactcttccttcagctcatgctggaggacgaaaaagtgactatgtttctccagtcgccttgtccattatacaagggccggatcaacgctacttcccatgtgatccagcatcccatgtacggcgctgggcacaaattcagaaccctacatctgccggtgtccacaacactatctgacgtactcgatagggtgagcgacacaccctcaatcactgctaagttgataagtgagcaaaaggatgacaaagaaaaaaagaatcatgaagagaaagaaaaggttaaagctgagaatggctttcaggacaactactctgtggtagtggcctctggactgaagagtcagtctaagagagccgtttccgccacccccccacgtcccccgagccgcaggggaaggactatccccgacaaaatcggcagtacgagtggagccgaagccgccaataagataatcaccgtccccgtgtttcatctgttccacaagctcttagcgggccagcctttgccagctgagatgacactggcccaactattgacgctgctgtacgacaggaagcttcctcagggctataggtccatcgacttgactgtcaaactcggaagccgggtgatcacagatccctcgctgtctaaaaccgattcatacaagcggctgcaccccgagaaagaccatggagacctcttggctagttgcccagaggacgaggcactgactccgggcgatgaatgtatggatggcattttggacgaaagtctcctggagacgtgccccatccagtcccccctgcaggtgttcgctggcatgggcggccttgccttgattgccgagcggctccccatgctttaccccgaagttattcagcaggtctccgcacccgtggtaacgagtactactcaagagaagccaaaggattccgaccagtttgagtgggttactattgagcagagtggggagctcgtgtacgaagccccagagacagtggccgcggagcctccccccattaagtctgcagtccagaccatgtccccgatacctgcccattccctggccgctttcggattgttccttcggctcccaggctacgccgaggtgctcctaaaggagcgcaaacacgctcagtgccttttaaggctagtgctcggcgtgaccgatgacggcgaagggtcccatatactgcagagtccctcagccaatgttttaccaactctgccctttcatgtgttacgctctctgttctcgacgactcctctcaccacggatgacggtgtgctgctccggagaatggcactggagattggagcactgcacctgatcctggtgtgcctcagtgctctgtctcatcacagcccaagagtcccaaacagttctgtgaaccaaactgagccacaggtatcctctagccacaatccaacctctactgaagagcaacaactgtattgggctaaaggaactggatttggcactggaagtacagcctccggttgggatgtggagcaagcactgactaaacaacggcttgaagaagagcatgtgacatgtctcttgcaagtccttgccagctacatcaaccctgtgtcctctgccgttaatggtgaggcgcagtctagccacgagacccgaggccagaattcaaacgctttgcccagtgtgctcctcgaattattgtcacagtcttgtctgattcccgctatgtcgtcttacctgcgaaacgactctgtcctcgacatggccaggcacgtgccattgtacagagctcttctagagcttctgcgagccatcgcttcttgcgccgccatggtccccctcctgttaccactaagtacagaaaatggtgaagaggaggaagaacagtcagagtgccagaccagcgtgggaaccttattggcaaaaatgaagacctgtgttgatacctatacaaatcggttacggagtaaacgggagaacgtaaagacaggagtaaagccagacgcctctgaccaagagcctgagggtcttacactgctcgtgccggatattcagaagactgccgaaatcgtgtacgccgccacaacatctctgagacaagccaaccaggagaaaaagttaggcgaatactcgaagaaggccgctatgaaacccaagccgctgagcgtactgaagtctctggaggagaagtacgtggcagtgatgaagaagctgcagtttgatacatttgaaatggtatctgaggatgaggatggcaagctggggtttaaagtgaattaccattatatgtcacaggtgaagaacgctaacgacgccaacagcgctgcccgcgcacgccgtctggcgcaagaggctgtcactttgtccacatccttgcctctgtcgtcctcttcatctgtgtttgtccgctgtgatgaggagaggttggatattatgaaagtattgattacaggtcctgccgacacaccctatgccaatgggtgcttcgaatttgatgtgtacttccctcaagactatcccagcagtccacccctggttaacctagagactacaggggggcattccgttagattcaatccgaacctttacaatgatggaaaagtgtgcctgtctatcctgaatacatggcacggtcgcccagaagagaaatggaatccccagaccagctccttccttcaggtgctcgtatctgttcagtctttgattttagtcgccgagccatatttcaatgagcccgggtacgagcgctctaggggcacaccctccggtactcagtcttcgagagagtacgatgggaatataaggcaggctacagtgaaatgggccatgctagagcaaatcagaaatccgagtccgtgtttcaaagaggtgatccataagcatttttacctgaaaagggtggagataatggcgcagtgtgaagaatggatcgcagatatccagcaatattcctccgataagagggttggaaggacaatgtcccaccacgccgccgcactgaagcgccacacggctcagttacgcgaggaactgctgaagttgccctgtcccgaagggctggaccctgacactgacgatgctcctgaagtgtgtcgcgccactaccggtgctgaggagacactgatgcatgatcaagtaaagccctcatctagcaaagagctcccctccgactttcagctgtag

SEQ ID NO: 13979 - DNA, 1566 bp, synthetic construct
  misc_feature 1..1566: note = Description of Artificial Sequence: Synthetic coding sequence
  source 1..1566: mol_type = other DNA
atgagtctgagcagaagcgaggagatgcacaggcttactgagaatgtgtacaagacaatcatggagcagtttaacccaagtctccggaattttatcgccatgggtaaaaattacgagaaagccttagccggagttacttatgcggccaagggctacttcgacgctcttgtgaagatgggagaactagcgagcgaaagccaggggagcaaggagctgggtgacgtgctcttccagatggcagaggtccatagacagattcagaaccagcttgaggaaatgctgaagagcttccataacgagttgctgacccagcttgagcaaaaggtggagctggatagtagatacttgagtgcagctcttaaaaaatatcaaacagaacagcgatctaagggagatgctctcgataaatgccaagcggaactcaagaagctccgcaagaagtctcagggcagcaagaaccctcaaaagtatagcgataaggagctccagtatattgacgccataagcaacaagcagggcgagctggagaactatgtatccgatggatacaagactgcccttaccgaggagcgtaggcgattctgctttctggtcgaaaagcagtgcgctgtagctaaaaactcagctgcataccacagcaaagggaaggagctactggcacaaaaattgcctctctggcagcaggcttgcgcggacccatcaaaaatcccggagagggcggtgcaacttatgcagcaggtggcttcaaacggcgcgactctaccctcagccctcagcgcatcaaagtctaacctggttatatctgatcctatacctggggccaaaccattgcccgtacccccagagctcgcaccattcgtcggtaggatgagcgctcaggagtcgaccccaataatgaatggggtaactggaccagatggcgaagactattccccctgggctgaccgaaaagccgcgcagcccaaatccctctctcctccacagtctcagtccaaactgagcgattcttactcgaacacgctgccagtgcgtaagtcagtcacacccaaaaacagctatgctacaacagagaataagacacttcctagatcaagctctatggctgccggacttgagcgcaacgggcgaatgcgggtcaaggccattttcagtcatgctgccggcgacaactcaacccttctctcatttaaggagggcgatctgatcacactcctcgtgcccgaggccagagatggctggcactacggagagtcagagaaaactaagatgcgcggctggtttccctttagctacaccagagttcttgactctgacggaagcgacaggctgcacatgtccctacaacaagggaagtcctcaagcaccggcaatttgctggataaggatgatctagccatcccccccccagactacggagctgcgtcaagggccttccccgcacaaaccgcaagtggctttaagcaaagaccgtactcagtagccgtacctgccttctcacaaggactagatgattacggtgcaagaagcatgagctcaggctccggaacacttgtgagcactgtgtag

SEQ ID NO: 13980 - DNA, 1659 bp, synthetic construct
  misc_feature 1..1659: note = Description of Artificial Sequence: Synthetic coding sequence
  source 1..1659: mol_type = other DNA
atgtcactgtctcgaagcgaggagatgcaccgcctaacagagaatgtgtacaaaactataatggaacaatttaatcccagtcttagaaattttatcgccatgggcaaaaattacgagaaggccctggctggagtgacatacgctgctaaggggtactttgatgccctagtcaaaatgggggagcttgcgtccgaaagccagggttcaaaagaactgggcgatgttctctttcagatggccgaggtccaccgacagattcagaatcagttggaggaaatgctgaagtcttttcacaacgagctattaactcaactagaacagaaggtcgagcttgactccaggtatctttcggcagccctgaaaaagtaccagactgaacagcgcagtaaaggcgatgcactagataaatgccaggcagagttgaaaaaactgcgaaaaaaaagccaggggtctaagaatccacaaaagtattccgacaaagaactccaatatattgacgctatcagcaacaaacaaggcgagttagaaaattacgtgagcgatgggtataagactgccctcacagaagagagacgacggttttgttttctcgtcgagaaacagtgcgccgtggctaagaactcggccgcataccacagtaaaggaaaggaattgctggcccagaagctgcccctgtggcagcaggcttgtgctgaccccagcaaaattcccgagcgtgctgtgcagttgatgcagcaggttgcgagtaatggagcaaccctcccttcagctctttctgccagcaaatccaatctggtgatctccgatcctatacccggcgcaaagccccttccagtgcctcctgagctcgctccatttgtgggacggatgagcgcacaggagagcacacctattatgaacggcgtgacaggacctgatggcgaagactactccccctgggcagacagaaaggcagcccagcccaagtccctgtctcctcctcagtcacagtctaagttgagtgattcctactccaatacgcttcccgttagaaagtccgtcacccccaagaactcatacgctaccacagaaaacaagaccctgccaaggtcttcatcaatggctgccgggctcgagaggaatggccgcatgcgtgtcaaggcgatcttctcacacgcagccggcgacaactccactttattgagcttcaaggaaggcgacctcatcacgctattagtgcctgaggcacgggatggatggcactatggcgagagcgagaagaccaaaatgagaggatggttcccattttcgtatactcgcgtgcttgatagcgatgggtctgaccggctgcacatgtctctgcaacaaggaaaatcatccagtacaggtaatctgctagacaaggacgaccttgcaattccacctcccgattacggggcggccagccgtgcttttccagcgcagacagcttccggctttaaacagaggccctattcagttgccgtccctgcgttttcccaaggattggacgactacggagcaaggagcatgtcccgcaacccgtttgcccatgttcagctgaaacccaccgtaacaaatgaccgatgcgacctgagcgcgcagggcccggagggcagggagcatggcgatggctctgcgcggacgctcgctggccggtag

SEQ ID NO: 13981 - DNA, 1371 bp, synthetic construct
  misc_feature 1..1371: note = Description of Artificial Sequence: Synthetic coding sequence
  source 1..1371: mol_type = other DNA
atggccgaggtccataggcagatccagaatcaactggaggagatgttgaagagcttccacaatgagctgttgacccagttggagcagaaagtcgagctcgacagtagatacctaagcgctgcgctcaagaaatatcagaccgagcaacgaagtaagggtgatgccctggacaaatgccaggcagaacttaagaagctgaggaagaaaagccaaggaagtaagaaccctcagaagtattctgacaaggaactgcagtacatcgatgccattagtaacaagcagggggaactcgagaactacgtgtctgacggatataaaaccgccctgaccgaggaaaggaggaggttctgctttttggttgaaaagcagtgtgccgtagcaaaaaactccgcggcttatcattctaagggaaaggaacttctcgcccagaagctgcctctgtggcagcaggcgtgcgccgacccatcaaaaatccctgagagggccgttcagctcatgcagcaggttgcttcaaatggcgctacgctgccatctgctctaagcgccagcaagtctaatctcgtgataagtgatccaattccgggcgcaaagcccttgcctgtgcccccggagctagcccccttcgtaggccgcatgagtgctcaggaaagtacaccgatcatgaacggtgtaaccggtcctgatggcgaggactattctccatgggccgatagaaaggctgcccagccaaagagcttgagccctccacagtcgcaatccaagctgtccgactcttactcaaacaccctcccagtgagaaaatctgtgactcccaaaaattcctatgccacgaccgagaacaagactctccccagatctagctctatggcagccggcctggaacgtaatggcaggatgagagtgaaggcaatcttctcccacgctgccggggataacagcacactcctgtccttcaaagagggcgatctgattacacttctggtgcctgaggctcgagacggttggcattatggcgagtcagagaagactaaaatgaggggatggtttcctttctcatacacacgtgtgctggattctgacggttcagaccgcttgcatatgagcctccagcaggggaagagctcttccaccgggaacttgctcgataaggacgacctagccatcccacctcctgattacggcgccgctagcagagcctttccagcacaaactgcctcgggtttcaaacagaggccatactccgtggcagtaccggcattctcccagggcctggatgattatggcgctcgatctatgtcccggaaccctttcgcgcacgtacaactgaaacccactgtcacaaacgacagatccgcccctcttctttcttag

SEQ ID NO: 13982 - DNA, 1128 bp, synthetic construct
  misc_feature 1..1128: note = Description of Artificial Sequence: Synthetic coding sequence
  source 1..1128: mol_type = other DNA
atgctccttcccgaagggcagaggcaaagagcactgggatttgggaccgtaacctctacatactcgccagtaggtcagtacatcgacgctatttccaacaagcagggggagctggagaattacgtgtcagatggctacaaaaccgcgctcacggaggagcggcgccgcttctgcttcctggtggagaagcaatgcgccgttgccaagaacagtgcagcttaccactctaaaggcaaagagctcctcgcccaaaagcttcccctgtggcagcaggcctgcgccgatccaagtaagattccagaacgggccgtccagctcatgcagcaggttgcttccaatggtgctacactccctagcgcgttgtccgcctccaagagtaacttggtcatttccgaccccatccctggggcaaaacctctgccagtgccacccgaactcgctccgtttgtcggccgcatgtcggcgcaggagagtacccccatcatgaatggcgtgactggacctgacggtgaggattactccccctgggcagatcgaaaggccgcccagcctaagtcgctgagccccccacagtctcaatccaaactatcggacagttacagtaataccttgccagtccgtaaaagcgttactcccaaaaactcatacgcaactacagagaataaaacactgcctcgatcgagcagcatggccgcaggattggagcggaatgggaggatgagagtgaaggccattttctcacacgccgccggagacaattcaaccctacttagtttcaaagaaggcgatctcatcaccctgcttgtccccgaggctagggatggttggcactacggggaatcagaaaagaccaagatgcgtggatggtttcccttttcttacactagagttcttgactccgatggatcagacagactgcacatgtcactccaacaggggaaaagcagctcgacaggcaacctgctggacaaggatgatctcgctatcccacctcccgactatggggcagcttccagggcatttcctgctcagactgcctctggatttaaacagcggccttattcggtcgctgtaccagccttttctcagggtcttgatgactacggcgccaggtctatgtccaggtag

SEQ ID NO: 13983 - DNA, 1605 bp, synthetic construct
  misc_feature 1..1605: note = Description of Artificial Sequence: Synthetic coding sequence
  source 1..1605: mol_type = other DNA
atgtctctatcgagaagtgaggagatgcataggctaaccgaaaatgtctataagaccatcatggagcagtttaatcctagtttgcgaaattttatcgctatggggaagaactatgaaaaggcgctcgcaggcgtgacatacgcagccaaaggctacttcgacgccctggtaaagatgggcgaactcgcctccgagtcccaaggttctaaggaactgggagatgtgctgttccagatggcggaagtgcacaggcagatacagaatcagctggaggagatgctcaagagttttcacaacgagttactgacacagttggagcagaaagtcgagttggatagccggtatctgagtgccgcgctaaaaaaataccagactgagcagaggtcgaagggtgacgccttggacaagtgtcaggctgagctgaagaagcttcggaagaagtcacagggaagcaagaatccccagaaatactctgacaaagagctccagtacattgacgcaatttctaacaaacagggggagctcgaaaattacgtatctgacggatataagaccgcattgacagaggagagacgcaggttttgcttcctggtggagaagcagtgtgccgttgcaaagaattcagcagcgtaccacagcaaagggaaggaactgcttgcgcagaaactccccttgtggcagcaagcatgtgctgacccctccaagattccagagagagcggtgcagctgatgcagcaggtggcctctaacggcgccaccctgccttctgctctgtcggcttccaagagtaatctggtcataagtgacccaattccgggagccaagcctctgcccgttcctcccgaactggcccctttcgtgggacggatgtccgcacaggagtctacacctataatgaacggtgttacgggccccgacggagaggactacagtccatgggccgataggaaggctgcccaacccaagtcactgtccccgccacagtcccagtctaaactgtctgacagctactcaaatacattaccagtgcggaagagcgttactcccaagaacagttacgcgacgacagagaataagactttgcctcggagcagttctatggcagctgggttggaacgtaatggacgcatgcgggtgaaagccattttctctcacgcggccggcgacaacagtactttactatcgttcaaggaaggggaccttatcactctcctagtacctgaagcacgcgatggttggcattacggcgagagcgaaaagactaagatgcgcgggtggttccctttcagctataccagggtgctcgactccgatggttctgaccgactccatatgtctctccaacaaggaaaatcctccagcacagggaatctgcttgacaaggatgacttggccattcctccacccgactacggtgcagcttcaagggccttcccggcccagaccgctagtgggtttaagcaaaggccttattcagtggccgtcccggctttctcacagggactggatgattacggggccagaagtatgtctaggaatccctttgcacacgttcaacttaaacctacagttacgaatgaccggtcagcacccctgctgagctag

SEQ ID NO: 13984 - DNA, 1563 bp, synthetic construct
  misc_feature 1..1563: note = Description of Artificial Sequence: Synthetic coding sequence
  source 1..1563: mol_type = other DNA
atgtctctgagcaggtccgaggagatgcacagacttacagaaaacgtatacaagacgattatggaacagttcaatccctctctaaggaatttcattgcaatgggcaaaaattatgaaaaggcgcttgccggggtgacttacgccgccaaaggttacttcgacgcactggtgaaaatgggcgaacttgctagcgagtcacaagggagcaaagagctcggcgatgtcctgttccaaatggctgaagtgcaccgacagatccagaatcagctggaagaaatgctgaaaagcttccataatgagttactgactcagctcgaacagaaggttgaactggactcccgatacttgtcagccgcgctaaagaaatatcaaactgagcagaggagcaagggcgacgcactcgacaagtgtcaggccgaactgaaaaaattgaggaagaagtcccaggggtctaaaaatcctcagaagtactccgataaagaattgcagtatatcgacgcaatcagcaataagcagggcgagcttgaaaattacgtgtcagatggctataaaacagcactgaccgaggagagaagaaggttctgttttctagtcgagaagcagtgcgccgtagcaaagaattctgccgcttaccactcaaaggggaaagagcttcttgctcagaaactccccctgtggcagcaggcatgcgccgaccccagcaagattccagagcgcgccgtgcagctgatgcagcaggtggcctctaatggagcaactctccctagtgcacttagtgcatctaagtcgaacctggtgatcagcgatcccattccgggcgctaagcctttgccagtcccaccagaattagccccattcgtcgggcgcatgtctgcccaggagtccacccctatcatgaacggggtgacaggaccagatggggaagattatagtccgtgggccgatcgcaaggccgcccagcctaaatccctgtctcctcctcagtcacaaagcaaactctccgattcttattccaatacgttacccgttcgcaagtccgtgacccccaagaattcctacgccacgacggagaacaagacgcttcccagatcctccagcatggcggccgggctagagcggaatggccgcatgagggtgaaggccatcttttcacatgccgcgggggacaacagtacactgctgtcattcaaggagggcgacttaattaccctgctagtaccagaagcccgggatggatggcattacggagaaagtgaaaaaaccaaaatgcgagggtggttccccttttcttacacaagggtgctagattctgatggcagtgatagactgcatatgtcacttcagcaaggaaagtcctctagcactgggaatctgctggataaggatgacttagctataccccctcctgactacggcgctgctagtcgggctttcccggcccagaccgccagcggtttcaagcagcggccctacagtgtcgctgtcccggccttttctcagggccttgacgattatggagctaggagtatgtcttccgccgacgtagaggtcgcccggttttag

SEQ ID NO: 13985 - DNA, 720 bp, synthetic construct
  misc_feature 1..720: note = Description of Artificial Sequence: Synthetic coding sequence
  source 1..720: mol_type = other DNA
atggctcatgcggggcgtaccggatatgacaatagagaaatcgtgatgaaatatatccattacaaactctcccagaggggatatgagtgggacgccggagatgtcggagccgcaccccccggggccgcgccggcccccgggattttcagctcccagcctggccataccccacaccctgccgcatctcgcgatccagttgcgcgaacatctcctctccagaccccagcagccccaggagccgcagcaggtcctgccctctccccggtccctccagttgtgcacttgacactccggcaggctggagacgatttctcccgtcgctaccggcgcgattttgccgagatgtcttcccagctccatctcactccattcactgccagaggcaggtttgccaccgtcgtcgaagaattattccgcgacggagtcaactggggacgcatcgtggccttctttgaatttggaggagtgatgtgtgtggagagtgtgaatcgagagatgtcacctctggtggataatatagctctctggatgactgaatatctgaataggcatctgcacacttggatccaagacaacgggggatgggatgctttcgtggagctgtacggtccgtcgatgagaccactctttgacttctcctggctctcccttaagactctgctgagcctggccctcgtaggtgcatgtattactttaggcgcttacctaggccacaagtag

SEQ ID NO: 13986 - DNA, 720 bp, synthetic construct
  misc_feature 1..720: note = Description of Artificial Sequence: Synthetic coding sequence
  source 1..720: mol_type = other DNA
atggcccacgccggcaggactggctacgacaaccgagagattgtaatgaagtacatacactacaaactcagccagcgggggtacgagtgggatgccggcgatgtaggggcagctcctcccggggcggctccagctcccggaattttttcaagtcagcccggccacactcctcaccccgcggctagcagggacccagtggctaggaccagtcctcttcagacgccagctgcacctggggccgccgctggtccagccctttcgcccgtgccccctgtggtccacctcacccttaggcaagctggggacgacttctcacggagatataggagggactttgccgagatgagctcacaactgcatctgaccccattcaccgcaaggggccgattcgcaactgtcgtggaggagctgttccgggacggagtcaattggggccgcattgttgcgttcttcgagttcggcggggttatgtgtgtggagtccgtgaaccgagaaatgtcgccactcgttgataacattgcgctctggatgactgagtatctgaacaggcatctccatacgtggattcaagacaacggtgggtgggatgctttcgtcgagctttatggacccagtatgcggccattgttcgacttctcttggttatctttgaagactcttctgtccctcgcactcgttggagcttgtattaccctgggcgcctatctcggccataagtag

SEQ ID NO: 13987 - DNA, 618 bp, synthetic construct
  misc_feature 1..618: note = Description of Artificial Sequence: Synthetic coding sequence
  source 1..618: mol_type = other DNA
atggcacacgctggccggactggttacgataacagggagattgttatgaaatacattcactataaattgagccagcgaggttatgagtgggacgcgggagacgtaggcgccgcacccccaggggccgcaccggctcccggtattttcagtagtcagcctggccacacaccccacccagccgctagcagggaccccgttgccagaacaagtcccttgcagacccctgccgcaccaggcgccgctgcaggcccagccttgtcaccagtaccccccgtggtacatctgacgctgaggcaggctggcgacgatttttccagaaggtaccgcagagacttcgcagagatgagcagccagttgcacttaacgccttttactgcccgggggaggttcgccacagttgtggaagagctttttagggacggagttaactggggccgcatagtggcattctttgagttcggaggagttatgtgtgttgagtccgtgaacagagaaatgagccccttggtcgacaacattgcactgtggatgacagaatatttgaacagacacctgcatacctggattcaggataacggaggatgggtgggtgccttgggggatgtcagcctaggttag

SEQ ID NO: 13988 - DNA, 1578 bp, synthetic construct
  misc_feature 1..1578: note = Description of Artificial Sequence: Synthetic coding sequence
  source 1..1578: mol_type = other DNA
atgaaagcactcatagctgccctgctgctcattacactgcaatattcctgtgctgtttcacccaccgattgctctgccgttgaaccagaggctgagaaggccctcgatcttattaataaacggcgccgggatggctatctgtttcagctcctgcgaatcgccgatgctcatctcgaccgagtcgagaataccacagtgtactacctggttctggatgtgcaggaatcggactgctccgtgctgtcgcgcaaatactggaacgattgtgaaccacctgattcacgaaggcctagcgagatcgttatcggccagtgtaaggtgatcgccacccggcatagccacgagtcccaggatttacgggtgattgactttaattgcacgacgagctccgtctctagtgccctggcgaacactaaagactcacctgttcttatcgattttttcgaagataccgaacgttacaggaagcaggcaaataaggctctcgaaaagtataaggaagaaaatgacgatttcgctagctttagagtggatcgaatcgagagagtcgcacgcgtgcgaggaggggaggggaccggctatttcgtggatttctccgtgaggaactgtccacggcatcacttccccagacacccgaatgttttcggattttgtagagcagatctgttctatgatgtggaggctctggaccttgaaagccctaaaaacttagtcataaactgtgaggtatttgatccccaagagcacgaaaatatcaacggcgtgccgcctcacctggggcacccgttccactggggcggacatgaaaggagctccaccaccaagcctccgtttaagcctcacggttctagggaccatcaccatccacacaaaccacacgagcacggtcctccacccccaccagacgagcgagaccatagtcacggaccaccattgcctcaggggcctcctccgctcctgccaatgtcctgtagctcttgtcagcacgccacgttcggaaccaacggtgcacagcgccattcccataacaataactccagtgatctccatccccataagcaccatagccatgaacagcacccgcacggccaccatccacacgcccaccacccacacgaacatgacacccaccgccagcatccccatggccaccatccccatggacaccacccccacggacatcatccccacggccaccacccacacggccatcatccacattgccacgacttccaggattacgggccctgcgaccctcctccacacaatcagggacattgctgccacggccacggcccaccccctgggcacttgcggaggcgggggcccggaaaaggcccgcgcccattccactgtcgtcaaattgggtctgtttacagactgccaccgttaagaaagggagaggttttacccctccccgaagccaattttccgagcttccctcttccacaccacaaacaccctctcaagcctgataaccaacccttccctcagtccgttagtgaatcgtgccccggtaagtttaaatctggatttccgcaggtgagcatgttcttcacccacacttttccaaaatag

SEQ ID NO: 13989 - DNA, 2121 bp, synthetic construct
  misc_feature 1..2121: note = Description of Artificial Sequence: Synthetic coding sequence
  source 1..2121: mol_type = other DNA
atggcttcaccagctgattcatgcatccagttcacccgccacgcaagtgacgtgttgctgaacctgaatcggctgagaagccgggacattctcactgacgtggtcattgtcgtttcacgagagcagtttagagctcacaagactgtcctgatggcttgttctggtctgttctacagcattttcacagaccagctgaaatgtaatctttctgtcatcaacctggatcccgagatcaaccctgagggcttctgtatacttttagacttcatgtatacaagccgcctgaacctgcgagaggggaacattatggcagttatggcgacagccatgtatttacagatggagcatgtggtcgatacctgcagaaaattcatcaaagcctctgaagccgaaatggtgtccgccatcaaacccccgagagaggaatttctgaattcccgtatgcttatgccccaagatataatggcttataggggtagagaggtcgtcgagaataacctgcccctccgtagtgcccccggctgtgaatcgagggctttcgctccaagcctgtatagtgggctctctacgccccctgcttcgtattctatgtacagccacctacccgtgtcatcactcctgtttagtgacgaggaatttcgagacgtcaggatgccagttgcgaacccattccctaaggagagggctctgccttgcgactcagccaggcctgtgcctggggagtacagccgccccactctggaagtcagccctaacgtctgccattccaacatctactctccaaaggaaacaattcccgaggaggcgagaagtgatatgcactactctgtcgccgaagggctgaagccagcagccccctcggcacgtaacgccccctacttcccttgcgacaaggcctctaaggaagaagaaaggcccagcagcgaggacgagattgctctacacttcgagccccccaacgctcctctgaataggaagggccttgtcagtccccagtctccacagaagtcggattgtcagcctaatagccccaccgaatcctgctcaagcaagaatgcctgtattctccaagcgtctgggagtccgcccgcgaaatcgcccacagaccccaaggcctgcaactggaagaaatataaattcatcgtgctgaattctctgaatcagaatgctaagcccgaagggcccgaacaggcagagcttggccgcctgtctccaagagcctataccgcgccccctgcttgtcagccacctatggagccagagaacctcgaccttcagtcccctaccaaattatcagcgtccggcgaagacagcactatacctcaagcttctaggctgaacaatattgtgaatcgttccatgacgggatcgccaaggtcctcaagcgagagtcattcacctctttacatgcacccccccaagtgtacaagttgcggctcacagtctcctcaacatgcagagatgtgccttcataccgcaggcccgacgttccccgaagagatgggtgagacccagagcgagtactctgactcaagctgtgagaatggcgcatttttctgcaacgagtgcgattgccgattttccgaggaggcatctctgaagcgacacaccctccaaacccatagcgacaagccatacaagtgcgaccggtgccaggcgagctttcggtacaagggcaatctggccagtcacaagacggtgcatacaggcgagaagccctacaggtgcaatatatgcggagcacagttcaataggcccgccaacttgaaaacacataccagaatccactccggtgagaaaccatataagtgcgagacctgcggggcacggtttgtgcaggtcgcacatctgcgggctcacgttctgattcacaccggcgaaaaaccctatccgtgcgaaatctgtggcacaaggttcaggcaccttcagacactgaagtctcatctgcgcatccacaccggcgaaaagccttatcactgtgagaagtgcaaccttcactttagacacaaatcccagctcaggctgcatctgcggcaaaagcacggggctattaccaacaccaaggttcagtaccgcgtaagcgccactgatcttccccccgagcttcccaaggcctgttag

SEQ ID NO: 13990 - DNA, 369 bp, synthetic construct
  misc_feature 1..369: note = Description of Artificial Sequence: Synthetic coding sequence
  source 1..369: mol_type = other DNA
atggctagccccgcagactcttgcatccagttcacccgtcacgcatcggatgtgttgctcaatcttaatagactgagatcgagagacatcttaaccgatgtcgttattgtggtatcccgtgaacaattccgggcacacaagaccgtgctgatggcctgttctggactgttttacagtatttttactgatcagttgaagtgcaatctttcagtcattaacctggatccagaaatcaatcccgagggattttgcatactcctggatttcatgtatacctctcgcttgaacttacgggagggtaacattatggcagttatggccaccgctatgtacctgcaaatggagcacgtggtggacacttgtcggtag

SEQ ID NO: 13991 - DNA, 315 bp, synthetic construct
  misc_feature 1..315: note = Description of Artificial Sequence: Synthetic coding sequence
  source 1..315: mol_type = other DNA
atggcttcgcctgcggacagctgcatccaatttactcgccacgcaagcgacgttttgcttaacctaaatcggctccgttccagagacatcctgacggatgttgtgattgtcgtgtcgagagagcagtttagggctcacaagactgtactgatggcgtgtagtggccttttttattccatcttcactgatcagctcaaatgtaatctttccgtgatcaatctcgacccagagataaatccggaaggtttctgcatcttgctggactttatgtatacatcgaggctgaatctaagagaaggaaatattatggcttag

SEQ ID NO: 13992 - DNA, 1953 bp, synthetic construct
  misc_feature 1..1953: note = Description of Artificial Sequence: Synthetic coding sequence
  source 1..1953: mol_type = other DNA
atggcttctcccgcagattcctgcattcagttcaccagacatgcctcagacgtattgctgaatttgaatcgtctgcgttcaagagatattttgaccgatgtggtgatagttgtgagtcgggaacaattcagagcgcacaaaactgtgctcatggcgtgcagtggcttgttctatagcatcttcacggatcaactgaagtgcaacctgagtgtcatcaaccttgacccagaaattaacccggagggcttctgcattctcttggattttatgtatacgtcacggctcaatctgagggaagggaatatcatggccgtcatggcgactgctatgtacttgcagatggagcacgtggttgacacgtgcagaaagtttattaaagcatcagaggcagaaatggttagtgcaattaagccacctagggaagagttcctaaactctcggatgttaatgcctcaagacattatggcataccgaggtagggaagtcgtggagaataatcttccattaaggagtgcccctgggtgcgagtctcgcgcattcgcgccttcactgtacagcggcttaagcactcctcccgcctcatacagcatgtatagtcatctgccggtgagctccctgctgtttagcgacgaggaatttcgggacgtccggatgccagtggctaacccattccccaaagagcgcgcacttccctgtgattcagccagacccgtgccgggggaatatagccgtcctacgcttgaggtcagtcctaacgtttgtcattccaacatatacagtcctaaggaaactattcccgaggaggctagatccgacatgcattattcagtcgctgaaggcctcaagcccgccgccccttccgccagaaatgccccttattttccgtgtgacaaagcgtccaaggaagaagaacggccgtcttctgaggatgagattgctcttcacttcgaaccccccaacgcccctttaaatcgaaagggattggtgagtccacaatcaccccaaaagagtgactgccagccaaatagccccactgaatcctgcagttccaaaaatgcttgcatcctccaggcgtctggatcaccaccagccaagtcacccacagatccaaaggcatgtaattggaagaaatataaattcatcgtgttaaacagcctgaaccagaacgcgaagcctgaggggccagagcaggctgaactgggcaggctaagtccccgcgcttacaccgcgccccctgcttgtcagccccccatggaaccggaaaatctggatttgcagtcacctacaaaactgtctgcttctggagaagatagtaccatccctcaggctagtcgcctcaataatatcgtgaatagaagcatgactggatcccccaggagtagtagcgagtcccatagccctttatatatgcacccacctaagtgtactagctgtggcagtcagtcaccacaacacgctgaaatgtgtctccataccgccggcccaacttttcctgaagagatgggagaaacacagtcagaatattcggattcatcctgcggagaaaaaccttataggtgcaacatctgcggggcgcagtttaatcggccagcaaatctgaaaacccatacccggatccactcaggagaaaaaccttacaaatgtgagacttgcggggccagattcgtgcaggtggctcaccttcgtgcccatgtgctgatacacaccggagaaaaaccttatccttgtgagatctgtggcacccgcttccggcaccttcagacattaaaaagtcaccttaggatccacaccggcgagaagccgtatcattgcgaaaaatgtaaccttcatttcaggcacaaatctcagctgcggttgcatctgcgccaaaagcacggcgctataaccaacaccaaagtgcagtacagagtttctgcaaccgacctgcctccagaattgcctaaagcctgttag

SEQ ID NO: 13993 - DNA, 306 bp, synthetic construct
  misc_feature 1..306: note = Description of Artificial Sequence: Synthetic coding sequence
  source 1..306: mol_type = other DNA
atgaagttcggaatgggaagcgcacaggcgtgtccctgccaggttccaagagcagctagtactacatgggtcccgtgccaaatctgcgagaccagaggcgcagccgccgctcctccgctgactctggagggccccgttcaatcacaccatggtacacccgccctgacccagggaccacagtctcctcgcgacggcgctcagctcggagcttgcaccagacctgtggacgtgcgcgactctggcggacggcccctgccccctccggacacactggcaagtgcaggtgacttcctctgtactatgtag

SEQ ID NO: 13994 - DNA, 396 bp, synthetic construct
  misc_feature 1..396: note = Description of Artificial Sequence: Synthetic coding sequence
  source 1..396: mol_type = other DNA
atgaaatttgggatgggctcagcgcaggcatgtccctgccaggtgccaagggcagcgagtaccacatgggtgccatgccaaatctgcggaccccagccatcactctctctggcagagcagcacctagagtctcccgtgcccagcgccccaggggcccttgctgggggacctactcaggctgcaccaggcgtgcgtggcgaggaagagcagtgggcaagggagatcggagcccagttacgacggatggcagatgatctgaatgcccagtatgagcgaagacgccaagaggaacagcaaagacaccgcccatccccctggcgcgtcctttacaatttaataatgggcctgctccccctaccacgcggccaccgcgcacctgagatggagccaaattag

SEQ ID NO: 13995 - DNA, 582 bp, synthetic construct
  misc_feature 1..582: note = Description of Artificial Sequence: Synthetic coding sequence
  source 1..582: mol_type = other DNA
atggctagggcccgtcaggagggcagttctccggaacccgtcgagggtctggctagggacggccctcgtcctttcccactagggaggttggttccatccgccgtcagttgcgggctgtgtgagcctggcctggccgctgccccagccgcaccaacattactgcctgctgcttacctatgtgcgcctacagcaccccctgctgtgaccgctgccctgggtggctccagatggccgggtgggcccaggagcaggcctcgaggcccacggcccgatggccctcagcccagcctgagcctggctgagcagcatttagagtctccagttccgagcgcccccggagcgctcgcaggggggccaacgcaggcggctcccggggttcgcggcgaggaagagcagtgggcgagagaaataggtgcccagttacgccggatggcagacgacctgaacgcccaatacgagaggcggaggcaggaggagcaacagcgccaccggccctcgccttggcgagtgttgtacaatcttatcatgggtttgctgccattgccaaggggtcatagagcccccgagatggagccaaactag

SEQ ID NO: 13996 - DNA, 786 bp, synthetic construct
  misc_feature 1..786: note = Description of Artificial Sequence: Synthetic coding sequence
  source 1..786: mol_type = other DNA
atgaaatttggcatgggctctgcccaggcatgcccgtgccaggttccaagggccgcgtccacaacttgggtcccgtgtcagatctgtggaccacgagagcgacacggacctaggacccccggagggcaactgcccggcgcgcgcagaggaccaggacccagaagaccggcccccttgcccgccaggcctccgggtgccctcggctctgtgctgcgccctctccgcgctcgtcccgggtgccgtccccgacgaccacacccggccgctaggtgccttccactgcggccccatcggccgacacgtcggcatagacgcccaggtgggttccctctggcttggggatctccacagcctgcccctcggcctgccccgggccggtcctctgctttagcactggcaggcggagcagcgcctggtgtggccagggcgcaaaggcccggcggaagtggcggccggagccatcccggaggccccggctcaccacgaggaggagggacagtagggccaggagacagagggcctgctgccgctgacggggggcgacctcagcgcacggtgcgggccgcagagacccgcggcgccgctgcggcccccccactgactcttgagggccccgtgcagtctcatcacggtacccctgcccttactcaagggccgcagagccctcgcgatggtgctcagctgggggcctgtacgcgcccagtagatgtgcgcgactctggaggtcgtcccctgccaccccccgacactctggcttctgcgggagatttcctatgcaccatgtag

SEQ ID NO: 13997 - DNA, 1308 bp, synthetic construct
  misc_feature 1..1308: note = Description of Artificial Sequence: Synthetic coding sequence
  source 1..1308: mol_type = other DNA
atgctgtgtggatttcaggaagacgcgacacctccacctcctcctcggcccagaaggctgcaccgacgcttaccccgaccggaggaagtaggaatgcttagtcttccgccaggtctgctgactgtctcaggctcagcagccgccgcggacgccgtgcccttgcgccccggagattgggctggcgtctccacagccgataggggcgagagagcccccctgggcccagctttttgtgacctggctgtcagtcccacatctccggcctggcggggtgaggaagacgaaggcgctaaggcgtcatcaggcgacatcggatccctcgattaccaggagtttgtggtggatatcgagtctcgcctgcgcatggaaggggtggagctcaaagaggaatggcaggatgaagacttccctattccgctgccagaggatgacagcatcgaagccgacattcttgccattaccggccccgaggatcaacctgggtcattagaggtcaatggtaacaaggtccgcaaaaaactcatggccccagatatttccctgactctggatccttctgatgggtctgttttgagcgacgaccttgacgaatcaggggagatagatcttgacggattggatactcccagtgagaatagcaacgagttcgaatgggaggatgatctgcctaagccaaaaacaaccgaggtgattcgaaaggggtcaatcaccgaatatacagccgcagaggagaaggaggatggtaggagatggaggatgttccgaatcggagaacaagaccatagagtggatatgaaggcaattgagccatacaagaaagtgatctcacatggcggctattacggcgacggtcttaacgcaatagtagtttttgcagtgtgctttatgcccgagagctcgcagccgaactaccgctacctgatggataatctgtttaagtacgtgataggaaccctagagttgctggtggcagaaaactacatgatagtgtacttaaatggcgccactaccaggcgaaaaatgccaagtctgggttggttgcgaaagtgttatcaacagatcgataggcgtctacgcaaaaacttgaaatccctcatcatcgtgcacccatcctggtttatccgtaccctgctggctgttacaagaccattcatctcaagcaaattctctcaaaagatccgatatgtatttaatttggcagagcttgccgaactggtaccaatggagtatgttggcattcctgaatgtatcaagcaggtggaccaagaactgaatggcaaacaagatgagccaaaaaatgagcagtag

SEQ ID NO: 13998 - DNA, 1131 bp, synthetic construct
  misc_feature 1..1131: note = Description of Artificial Sequence: Synthetic coding sequence
  source 1..1131: mol_type = other DNA
atggaaccctgtccaagcagtgctcctccaccattttacccaggcgtgggagaggtcgctgggcttaggtggttctcaatttacgaccagaggccaagctggtataggactaaaaagctgggactcttggacatcggatcattggactaccaggagttcgtcgtagacatcgagtccaggctgagaatggaaggagtggagcttaaagaagaatggcaagatgaagatttccccatcccccttccagaagacgacagtattgaggccgatattctcgccattacaggtccagaggaccaacccggatccctggaagttaatggcaacaaggttaggaaaaagctgatggcccctgacattagcctgacactggatccgtccgacggatcagtgttgtcggatgacctggacgagagtggtgagattgacctagacggccttgatacaccttctgaaaacagcaacgagtttgaatgggaagatgacttacccaagcctaaaaccaccgaggtgattcggaagggttctataaccgaatacaccgcagcggaggagaaggaggatggtagaaggtggcggatgtttcgcattggtgagcaagaccatcgggtggacatgaaggcgatcgagccatataaaaaggtaatttcacacgggggttactatggggatggactaaacgctattgtagtgttcgccgtgtgttttatgcccgagtcctcccagcccaattatcggtatctgatggacaacctcttcaaatatgtgattggaacactcgaactgctggtcgcagagaattatatgatcgtttacctgaatggggctacgacccgacgcaagatgccatctcttggctggcttaggaagtgttatcagcagatcgaccgcagacttagaaaaaatcttaaaagtttaataattgtccaccctagttggtttattcggacactgttagccgtgacacggccattcataagctcaaaattctctcagaaaatccggtacgttttcaatttagcagagttggcagagctcgtgcctatggaatatgtgggcattcccgagtgcattaagcaagttgatcaggagttaaatggcaaacaggatgagccaaagaatgagcaatag

SEQ ID NO: 13999 - DNA, 939 bp, synthetic construct
  misc_feature 1..939: note = Description of Artificial Sequence: Synthetic coding sequence
  source 1..939: mol_type = other DNA
atggccaaagtattcagcttcatcttggtcacaacagcgctcactatgggcagagagattagtgccctggaagattgcgctcaggaacagatgcgcctgagggctcaagttagactcctggagactagagtgaagcagcagcaagtgaagataaaacagctgttacaagagaatgaagtccagtttttggataaaggggatgagaacacggtcatcgatctgggttccaaaaggcagtacgccgattgctcggagattttcaacgacggctacaagctgagtggtttctacaagatcaaacctctacagtcccctgccgagttcagcgtctactgcgatatgtccgatggagggggatggactgtgatccagagacgttccgacggaagtgaaaatttcaatcgcggatggaaagattatgaaaacgggtttgggaactttgtgcagaagcacggagagtactggctcgggaacaagaatcttcacttcttgactactcaagaagattacaccttaaagatcgacctagcggatttcgaaaagaattcacgctatgcccagtataagaacttcaaggtgggggacgagaagaacttctatgagctgaatataggcgaatatagcggcacggctggggatagcctggcaggtaacttccatccggaggttcagtggtgggcttctcatcagcgaatgaagttctcaacttgggaccgcgatcacgataactacgagggcaattgcgccgaagaagaccaatccggatggtggttcaataggtgccactccgccaatctgaacggggtttactacagtggaccatacactgctaagactgataacggaatcgtctggtatacctggcatgggtggtggtactctttgaaatcagtcgtgatgaagatcagacccaatgactttatcccaaatgtaatttag

SEQ ID NO: 14000 - DNA, 660 bp, synthetic construct
  misc_feature 1..660: note = Description of Artificial Sequence: Synthetic coding sequence
  source 1..660: mol_type = other DNA
atgtcttcgcacctggtagagccacctcccccactgcataacaacaataacaattgcgaggagaatgaacaaagtttacccccaccagccggactcaactcctcctgggttgaactgcccatgaattcatctaacggcaatgataatggtaatggcaagaatggcggcctagaacatgttccgtctagttcaagcatccacaacggtgacatggagaagatcctgctggacgctcagcatgaatctggacagtcgtcaagccgcggctcctcgcactgcgactcacccagccctcaggaggacggacaaatcatgtttgacgttgagatgcatacaagccgggatcatagttctcagtcagaggaagaagtggtcgaaggagaaaaagaagtggaggcacttaagaaaagcgctgactgggtcagcgactggtcatctaggcccgagaatatcccgcccaaggagtttcattttcgccaccccaaacgcagtgttagcctcagcatgcgtaaatctggggcaatgaaaaagggggggattttctctgctgagttcctgaaggtatttatcccctccctctttctcagccatgttttggccctgggcctgggaatatacatcgggaaaaggctgtctactccatcagctagtacctactag

SEQ ID NO: 14001 - DNA, 540 bp, synthetic construct
  misc_feature 1..540: note = Description of Artificial Sequence: Synthetic coding sequence
  source 1..540: mol_type = other DNA
atgaattccagtaacggcaatgacaatggaaacggcaaaaatggcgggctagagcatgtgccctcctcttcctccatacacaacggagacatggagaaaatactgctggacgcacagcacgagagtgggcagagctccagccgaggctccagtcactgtgattctccctcccctcaagaggacggccagataatgttcgatgtggagatgcacaccagccgggatcactccagtcagtctgaagaggaggttgtggagggtgaaaaagaagtggaggcgttgaaaaagagcgccgactgggtgagcgactggtcttccaggcccgagaatataccgccgaaggagttccatttcaggcacccaaagcgctccgttagcctctcgatgcgcaagtccggggctatgaagaagggaggcatattttccgcagagtttttaaaggtttttattccgagtctgtttctgtcacatgtcctggctctcggcttaggcatttacatcggtaagcgattatccactccaagcgcctctacatactag

SEQ ID NO: 14002 - DNA, 540 bp, synthetic construct
  misc_feature 1..540: note = Description of Artificial Sequence: Synthetic coding sequence
  source 1..540: mol_type = other DNA
atgaattcttcgaacggtaatgacaacggcaacggtaagaacggtggactggaacatgtgccctctagtagttctattcataacggcgacatggagaagatcctgctcgatgcccaacatgagagcggccagtcttcgagtaggggatccagtcactgcgattcccccagtcctcaggaggacggccagatcatgttcgatgtggagatgcataccagtcgcgaccattcctcccagtccgaggaggaagtagttgaaggagagaaagaggtggaagcgttgaaaaagagcgccgactgggtttccgattggtcttccagacccgagaatatccctcctaaggagttccactttcggcatcctaagagatctgtaagtctcagtatgcgcaaatctggcgcaatgaaaaaggggggtatcttttccgccgaatttttaaaagtgtttattccatcacttttcctgtcccatgtgctggctttgggactgggcatttacatcggcaaaaggctgagcactccatctgccagcacctattag

SEQ ID NO: 14003 - DNA, 540 bp, synthetic construct
  misc_feature 1..540: note = Description of Artificial Sequence: Synthetic coding sequence
  source 1..540: mol_type = other DNA
atgaacagttctaacggaaatgacaatgggaacggaaagaacggcggccttgaacacgtaccatcctcatctagtattcataatggggacatggaaaaaatcctactagatgcacaacacgagtcgggacagagcagctctagaggcagttctcattgtgactcacctagccctcaggaggacggtcagatcatgttcgatgtcgaaatgcataccagcagggatcactcttcccagagtgaggaggaggtcgtagagggcgaaaaggaggttgaagccctgaagaaatctgcagactgggtctcagattggtccagtcgcccagaaaacatcccccctaaggaattccactttcggcatccgaagcgcagcgttagtctgtctatgaggaagtctggcgccatgaaaaagggaggcatcttctcggctgagttcctgaaagttttcatcccctcgctgttcctgtcccatgtgctggctctcggcctgggcatctatattggaaaaagactctcaaccccgtccgcttcaacgtactag

SEQ ID NO: 14004 - DNA, 636 bp, synthetic construct
  misc_feature 1..636: note = Description of Artificial Sequence: Synthetic coding sequence
  source 1..636: mol_type = other DNA
atggccagcggacaggggccaggtccgccaaggcaggagtgcggcgagccggcactgccttctgccagtgaggagcaggtggcgcaagataccgaggaggtgttccgtagctatgtgttttaccggcatcagcaggaacaggaagccgaaggggtggccgcacctgcagacccggaaatggtgacgctgccccttcagccctcttcaactatgggccaagtgggacgtcagctcgctattataggggacgatattaaccggagatacgatagcgaattccagactatgctgcagcatctgcagccaacagcggagaatgcttacgaatactttacaaaaattgccacttccctgtttgaaagcgggataaattggggccgagtggttgctctgctgggatttgggtaccggctcgcccttcatgtctaccagcatggactgaccggcttcctcgggcaggttacccgttttgtggtggatttcatgctccatcactgcatcgccaggtggatcgcccagaggggagggtgggttgctgccctgaacctggggaatggaccaatcctgaatgtcttggttgtgttgggggtagtactgttgggccaatttgtggtgaggcggttcttcaaaagttag

SEQ ID NO: 14005 - DNA, 576 bp, synthetic construct
  misc_feature 1..576: note = Description of Artificial Sequence: Synthetic coding sequence
  source 1..576: mol_type = other DNA
atggcctcggggcagggaccaggtccacctcggcaggagtgtggagaaccagcgctgccctctgcttctgaggagcaggtagcccaggacacagaagaggtttttcggagttacgtgttctaccgccaccagcagcaaccgtcctctactatgggccaggtgggccggcagctggccattataggtgatgatataaataggagatatgactctgagtttcagacaatgctgcaacacctacagcccacagccgagaacgcttatgaatacttcaccaagattgctaccagtctgttcgaatctggaataaattggggccgggtggtcgctctgctcggcttcggatatagacttgcactccacgtgtaccaacacgggttgacgggctttctgggacaggtgacccggttcgtggtggacttcatgcttcatcattgcatcgctcgttggatagcccaacggggcggctgggtcgccgcattgaatttagggaacggccctattctgaacgtgctggttgtactgggggtggtgctcttggggcaattcgtagtgaggaggtttttcaagagttag

SEQ ID NO: 14006 - DNA, 636 bp, synthetic construct
  misc_feature 1..636: note = Description of Artificial Sequence: Synthetic coding sequence
  source 1..636: mol_type = other DNA
atggcttcaggtcagggcccggggcctccccgacaggaatgcggggagcctgcccttccatccgcttctgaggagcaggtggcccaagataccgaggaagtttttcgatcttatgtgttctatcggcatcagcaagaacaggaagcagagggagtggccgctcccgcggatcctgagatggtgacacttcctctgcaaccatcatctactatgggccaggtggggcggcaattggcgattatcggagacgatatcaatcggaggtacgactcagaatttcagacaatgctgcaacatctgcagcctactgcggaaaacgcatatgaatattttaccaaaattgctaccagcctgttcgagtcaggcatcaattgggggcgcgtggttgccctgttaggctttggctacagacttgccctgcacgtgtaccaacacggcctcactgggtttctggggcaggttacccgtttcgttgtagacttcatgctgcaccactgcatcgcacgctggatcgcccagcgaggaggttgggttgcagctcttaatcttggaaacggccctattcttaatgtgttggtggtcttaggcgtggtgctgctggggcagtttgttgtgcgacgtttcttcaagtcttag

SEQ ID NO: 14007 - DNA, 462 bp, synthetic construct
  misc_feature 1..462: note = Description of Artificial Sequence: Synthetic coding sequence
  source 1..462: mol_type = other DNA
atggctagcggccagggccccggccccccgagacaggagtgcggagagcccgcgctgcctagcgcatccgaggaacaggttgctcaggatactgaagaagtgttccggtcttacgttttctatcggcaccaacaggaacaggaagcagagggtgtcgccgcgcccgctgaccctgaaatggtgacattgcccctccagccctccagtacaatgggtcaagtgggccggcagctggctattatcggggatgatattaataggagatacgacagcgagttccagaccatgctgcagcatctccagcctacggctgagaacgcttacgagtatttcacgaagatcgccacaagacctgctgccactcccaccgcctgcctgcgggtggcaagcatcggagccgtctggtggttattttgggcctctgctaccgtgtggccctatactagcacttctatggcctag

SEQ ID NO: 14008 - DNA, 507 bp, synthetic construct
  misc_feature 1..507: note = Description of Artificial Sequence: Synthetic coding sequence
  source 1..507: mol_type = other DNA
atgttccagatccccgagtttgagccaagcgaacaagaagactcaagcagcgcggagagagggttagggccttccccggccggggacggtccaagtgggtctgggaaacatcatcgtcaagcgcctggtttactgtgggatgcctctcaccagcaagagcagcctactagtagcagtcaccacggcggcgcaggcgccgtggaaattcgaagccgtcattcctcctaccctgcagggacagaagacgatgagggaatgggcgaggaaccttcacccttccgcggtcgttcacgaagcgcaccccctaacctgtgggctgcgcaaagatacggccgggagttaaggaggatgtcagatgagttcgtggactccttcaagaaaggcctgccacggccaaagtctgcgggcactgccacgcaaatgcgccagtccagcagttggactcgggtttttcagtcatggtgggaccgtaatcttgggcgtggcagcagtgctcccagccagtag

SEQ ID NO: 14009 - DNA, 507 bp, synthetic construct
  misc_feature 1..507: note = Description of Artificial Sequence: Synthetic coding sequence
  source 1..507: mol_type = other DNA
atgttccagatacccgagtttgagcctagcgagcaggaggatagctcttccgccgagcgtggcctcggccctagtcccgccggcgatggaccatccggatcaggcaaacaccatagacaggcccctggcttgctctgggacgcctcacaccagcaagaacagcctacatcatcctcccatcacggaggggctggcgcagtagagatcaggagccgccacagttcttatcccgccgggaccgaagatgatgagggcatgggtgaggaaccctcgcctttcagagggcgttctaggagcgcaccccccaatctctgggcagctcagcggtacggaagagagctccggagaatgagcgatgagtttgtggactcatttaagaagggcttgcccaggccaaagtccgcgggcacagcgacacagatgagacaaagctccagctggacaagggtgttccagtcttggtgggaccgtaaccttgggaggggctcctcagctccctcacagtag

SEQ ID NO: 14010 - DNA, 450 bp, synthetic construct
  misc_feature 1..450: note = Description of Artificial Sequence: Synthetic coding sequence
  source 1..450: mol_type = other DNA
atgttccaaatccctgagttcgaaccaagcgagcaggaggattcgagtagcgctgagcgaggcctggggcccagccctgcaggcgacgggccaagtggatccggcaaacaccataggcaagcccccggattgctctgggatgccagtcatcaacaggaacagccaacctcctcctctcaccatgggggggctggtgctgtggagatcaggagcaggcattcttcctatccggcaggaactgaagatgatgaaggaatgggcgaagaacctagcccttttcgtggccggagccggagcgccccccccaatttatgggccgcccaacgctacgggcgtgaactgaggaggatgagtgatgagtttgtggacagtttcaagaagggcctgcctagacctaagagcgctggcacagctacacaaatgcgccagtcgtccaggcggctgcggtag

SEQ ID NO: 14011 - DNA, 591 bp, synthetic construct
  misc_feature 1..591: note = Description of Artificial Sequence: Synthetic coding sequence
  source 1..591: mol_type = other DNA
atgaacaggagtcaggaggtgacccgcgatgaagaatcaaccagatccgaggaagttactcgcgaggagatggcagctgctggactgaccgtgaccgtcactcattctaatgagaaacacgatctgcacgttacatcccagcaaggttccagtgaacccgtggtgcaagatctggcacaggtggtcgaggaagtcatcggagtaccccagtcctttcagaagctcatctttaagggaaagtcactcaaggagatggaaacgccactatctgccctggggatccaggatggctgccgggttatgttaatcggaaaaaaaaattccccgcaggaggaagtcgagctcaagaagctcaagcatctggagaagtcagtcgagaagattgccgaccagctggaagaattgaacaaggaattgaccggaatacagcagggcttcctgcccaaggacctacaggccgaagccttgtgtaaactcgatagaagggtcaaggcgacgatagaacagttcatgaagatactggaggaaattgacaccttgatcctccccgaaaatttcccgactctgaccctggtcttaaatgaaaaatag

SEQ ID NO: 14012 - DNA, 693 bp, synthetic construct
  misc_feature 1..693: note = Description of Artificial Sequence: Synthetic coding sequence
  source 1..693: mol_type = other DNA
atgaatcgatcacaggaagtcacgcgcgatgaggagtcaacaagatccgaagaagtcacacgcgaggagatggccgctgctggactgaccgtcacagtaacccacagcaacgagaagcatgatctccacgtaacctctcaacaggggtccagcgaacctgtggtgcaagatctggcgcaggtggtcgaggaggtgatcggagtgccacaatcttttcagaaactgatttttaagggcaagtcactgaaagagatggagacgccgctgtccgctctcggcattcaagacggctgtagagtgatgctcataggaaagaagaatagtccccaggaagaagtggagctgaagaagctcaagcatctggaaaagagcgtggaaaaaatcgccgatcagctggaggaactcaacaaggagctaaccggaatccagcaggggttcctgcctaaagatctccaggccgaggctctatgcaaactggataggcgggtgaaggctactatagaacagtttatgaagatcctcgaagaaatagataccctcattctcccagagaacttcaaggactctcgtctgaaaagaaagggtctggtgaaaaaggtccaggctttcttggctgagtgtgacacagtggagcagaacatttgccaggaaacggaaaggctgcagtctaccaactttgccttagccgaatag

SEQ ID NO: 14013 - DNA, 1038 bp, synthetic construct
  misc_feature 1..1038: note = Description of Artificial Sequence: Synthetic coding sequence
  source 1..1038: mol_type = other DNA
ctcgcccagaggggaggcgccaggaggcccaggggcgatagagagagacttggctctcgtctccgcgcacttcgcccaggccgcgaaccaagacagtccgagccccctgcacaaagaggtcccccgccttcgggacggcccccggctcgtagcaccgcaagtggtcacgacagaccaacccgcggagctgcagccggcgccagacgaccccgcatgaagaaaaagacaaggagacggtctacgaggagcgaagagctgactcgctccgaggaactgactctttctgaagaggccacatggtccgaagaagctacccagtcagaagaggcaactcagggcgaggagatgaatcgcagtcaagaggtgacccgtgacgaggaaagtacccggagcgaggaagtaacacgggaagagatggcagcggcgggccttacggtgaccgtcacgcacagcaacgaaaaacacgacctgcacgtgacatctcagcaaggaagttcagagcccgtcgttcaggacctcgcccaggtagtggaggaggtaatcggtgtgccgcagtccttccaaaaactaatattcaagggtaagagtctgaaggagatggagacccctctctccgctctcggcatacaggatggctgccgcgtgatgctgattgggaagaaaaactccccacaggaggaggtggagctgaaaaagctgaagcacctcgaaaaatccgtggaaaaaatagcagaccagctggaagagctcaataaagagctgactgggatccaacagggctttctgcctaaagaccttcaggcagaggcactgtgtaaactcgatagaagggtgaaggccaccatagagcaatttatgaaaatactggaggaaatcgatactctaattctaccagagaacttcaaagattctcggctcaaacgcaagggcctggtcaaaaaggttcaggccttcctcgcagaatgtgatacagtcgagcagaatatctgtcaggagactgagcggctacaatccacgaattttgctctcgcggagtag

SEQ ID NO: 14014 - DNA, 1728 bp, synthetic construct
  misc_feature 1..1728: note = Description of Artificial Sequence: Synthetic coding sequence
  source 1..1728: mol_type = other DNA
atgtcggctgccacacatagtccgatgatgcaggtcgccagcggaaacggcgatagagaccctttaccacccggttgggaaatcaaaattgatcctcagacagggtggccattctttgtcgaccataatagccgaaccactacctggaatgatccgagggtcccgtccgaggggcccaaagaaacaccctcctcggcgaatgggccatctcgcgaaggcagccgtcttccgcctgcacgtgagggacatcccgtttacccacagctcagaccagggtatatccccataccagtcctccacgagggggccgaaaaccggcaggtccatccttttcacgtgtatccgcaacccggaatgcaaagatttaggaccgaagccgctgccgcggctccgcagagaagtcaatcccccctaaggggtatgcccgaaactacccagccagataagcaatgtggacaggtagccgctgcggcagctgcccagccccctgcttcccacggccccgaacgcagtcagagtcccgccgcaagcgattgctctagttctagcagcagcgccagcttaccttccagcggcagaagcagtctcggctcacaccagctgccacgaggctatatctctatccctgttatccacgaacagaatgttacacgtccggccgcccaacctagctttcatcaagcccagaagacgcactaccccgcgcagcaaggggagtatcagactcatcagcccgtgtaccataagattcagggcgacgattgggaacctaggcctttgcgtgcagcctcgccgtttcggagctcagtgcagggagcttcatcacgggagggtagtccagcgagaagttccacacccctccattccccgtccccaattcgtgtccataccgtagtggaccggccacaacagcccatgacccaccgcgagacagctccagtatcccagccagagaacaagcccgagtctaagccgggacctgtgggacctgaactgcctccgggtcacatcccaatacaagtaattaggaaggaggtggatagtaaacctgtctctcagaagcctccacctccttcggaaaaggtggaggtcaaggtgccccccgcgccagtgccctgtcctccgccaagccctggaccatctgccgtgccatcaagccctaaatctgtggctacagaagagagagccgctccttcaactgcacctgcagaggcaactccgcctaagcccggcgaggccgaggcccctcccaagcatccgggcgttctgaaggtggaggcaatactagaaaaagtgcagggtctggaacaggccgtggacaattttgagggtaagaagacagataaaaaatatctcatgattgaggagtatcttaccaaggaactgcttgctctggactctgtcgatccagaggggagagccgatgtacgccaggccagacgggatggcgtgcgcaaggtacaaactattttagagaaacttgaacagaaggccattgatgtgccaggacaggttcaggtctatgagctgcaaccctcgaaccttgaagccgaccagccactgcaggccattatggagatgggtgcggtggccgctgacaaaggcaagaagaacgcaggcaatgcagaggacccacacaccgagacgcaacagccggaggccacagctgccgccacttctaatccctcttcaatgactgacacaccaggaaatcccgccgccccctag

SEQ ID NO: 14015 - DNA, 978 bp, synthetic construct
  misc_feature 1..978: note = Description of Artificial Sequence: Synthetic coding sequence
  source 1..978: mol_type = other DNA
atgcaggagaccccaagcagcgccaatggcccaagccgagagggaagccgcctgcctcccgcccgagagggccacccagtttatcctcagctacgaccgggctacattccgattcccgtattacatgagggtgctgagaacagacaggtgcaccccttccatgtgtaccctcaacctggcatgcagcgattccgcacagaggccgccgctgccgcgcctcaacggtcacagtccccattgagggggatgcccgagactacccagccagataaacaatgcggtcaggttgccgcagccgccgccgcacaacccccagcctcacatggccctgagaggagtcaaagccccgccgccagtgattgcagtagttcttctagctcggcaagccttccctcttccggacggtcgtcacttggaagccatcagctgccaaggggctatatcagcattcccgtgatacatgagcagaacgtgacaagacccgcggcccagccaagctttcatcaggcacagaaaacccactacccagctcaacaaggtgaataccagactcatcaacccgtttatcataaaatacagggggacgattgggagccccgtcctctgagggccgcatcacccttcaggtcttctgtccaaggtgcttcctcaagggagggcagtcccgcgcgctcctctactccacttcacagcccttcaccgattcgagtgcacaccgtagttgatcgcccccagccaatgacacaccgtgagaccgctccagtgagccagcccgagaacaaaccggagagcaaaccaggccctgtaggtcccgagctgcctccgggtcatatcccaatccaggttattcgcaaggaagtcgactctaaaccagtctcacagaaaccccccccaccttccgagaaagtggaagtgaaagtgcctccagcacccgtgccctgcccaccgccttcgcctgggccatctgcagtcccctag

SEQ ID NO: 14016 - DNA, 657 bp, synthetic construct
  misc_feature 1..657: note = Description of Artificial Sequence: Synthetic coding sequence
  source 1..657: mol_type = other DNA
atggacggatcaggtgaacagcctcgaggagggggaccaacaagttccgagcagatcatgaaaacaggagcactgctgttgcaagggtttatccaggacagggctggaagaatgggcggggaagccccagagttggcactcgatcccgtgcctcaggacgcctcaacaaaaaagctgagcgagtgtcttaagaggattggagacgagcttgatagtaatatggaactgcagaggatgatcgctgctgtggacaccgacagcccccgggaagtcttttttcgcgtggccgctgacatgttcagtgacggcaattttaattgggggcgcgtggttgcccttttttacttcgcctccaaactagtgttgaaagccctgtgtaccaaagtccccgagttgataaggaccatcatggggtggacccttgattttttaagagagagactgctgggatggattcaagaccagggcggatgggtacggctgctcaagccaccccaccctcatcacagggcattaacaaccgctcctgccccaccatctttaccacccgccacacccctgggtccatgggcattttggtcacggtctcagtggtgccctctgccgattttcagatcttccgacgtggtttacaatgcattctccctacgcgtctag

SEQ ID NO: 14017 - DNA, 579 bp, synthetic construct
  misc_feature 1..579: note = Description of Artificial Sequence: Synthetic coding sequence
  source 1..579: mol_type = other DNA
atggacgggtctggggagcagcctcggggcggggggcccacctcgagcgagcaaatcatgaaaacaggagcgttactcctccagggattcatacaagacagagcaggccggatgggtggcgaggccccggagctggccctcgatcccgtgcctcaggatgcctcaacaaagaagctctccgaatgtctgaaacgtatcggggacgaattggactccaatatggagctgcagcgcatgatcgcagcagtagacacagacagcccgcgggaggtgttctttcgtgtagccgctgacatgttctctgatgggaattttaactggggaagagtggtggctctattctattttgcgagcaagctcgtcctcaaggcactgtgcacaaaagtgcctgaacttatcagaaccattatgggctggaccctcgattttctccgcgaaagactgctggggtggattcaggatcagggcggatgggacggtctcctgagttacttcggtactccaacctggcagaccgtgacaattttcgtcgcaggcgtgctaactgcctctttgactatctggaagaagatgggatag

SEQ ID NO: 14018 - DNA, 432 bp, synthetic construct
  misc_feature 1..432: note = Description of Artificial Sequence: Synthetic coding sequence
  source 1..432: mol_type = other DNA
atggatggatctggggagcagccccgcggcggcggtccgacctccagcgagcagattatgaagactggggccttgctcttacaaggcatgatcgccgctgtagataccgatagccctagagaggtcttttttagggtggctgccgatatgttcagtgatggaaacttcaattggggacgcgtcgtcgcactgttctactttgcaagtaaactggtgcttaaggcactttgcactaaggttcccgaactcattcggactattatgggatggacactggacttcctgcgagaacggctgctggggtggattcaggaccaaggggggtgggatggattactatcttacttcgggactcccacttggcagacagtcaccatattcgtggccggcgtgctgactgcctccctgacaatttggaagaaaatgggctag

SEQ ID NO: 14019 - DNA, 126 bp, synthetic construct
  misc_feature 1..126: note = Description of Artificial Sequence: Synthetic coding sequence
  source 1..126: mol_type = other DNA
atggatggcagtggagagcagcccaggggtggagtcagctcacgcattgaacagggcgaatggggcggccgccatccctcctggccatggaccaggtgtctgagaatgcggccaccaagatcgtag

SEQ ID NO: 14020 - DNA, 540 bp, synthetic construct
  misc_feature 1..540: note = Description of Artificial Sequence: Synthetic coding sequence
  source 1..540: mol_type = other DNA
atggacgggtctggcgagcagcccagagggggtggccctacatcatccgaacaaattatgaagacaggcgccctgctgctccagggatttatccaggaccgagcagggcgaatgggcggcgaggcccctgagcttgcgctggatcccgttcctcaggacgccagcaccaaaaagctcagcgagtgtctcaaaagaataggtgacgagctagactctaacatggaattgcagcggatgatagcagcagtcgacactgactcaccaagggaggttttcttccgcgtggcggccgacatgttttccgatggaaactttaactggggacgtgtagtcgcattattttatttcgcctccaaacttgtactcaaggccctatgcaccaaggtgcccgaattgatccgaacaatcatgggttggacactggatttcctcagggaaagactactgggctggattcaggatcaggggggctggacagttacaatttttgtggcaggcgtccttactgcaagcttgaccatatggaaaaagatgggatag

SEQ ID NO: 14021 - DNA, 495 bp, synthetic construct
  misc_feature 1..495: note = Description of Artificial Sequence: Synthetic coding sequence
  source 1..495: mol_type = other DNA
atggacggtagcggcgagcagccacgggggggtggccctacctcctcagagcagataatgaagacaggcgctctgcttctgcagggattcatccaggaccgtgccgggaggatggggggtgaagcaccggaacttgcactagatccagttccgcaagacgcttctaccaagaaattgtccgagtgtctgaaaaggatcggggacgaattagactcaaatatggaattgcaaagaatgatcgcagccgttgacactgactcaccacgggaggtgtttttcagagtggcagctgacatgttcagtgacggcaacttcaattggggacgggtcgtagctctgttttatttcgcatctaagttagttctgaaggccggggtcaagtggagagaccttggctctttacagcccctcccacctggatttaagcggtttacatgcctttcaattccccggtcttgggattatcgcccatgtgcaccccgctgtcggaattag

SEQ ID NO: 14022 - DNA, 1806 bp, synthetic construct
  misc_feature 1..1806: note = Description of Artificial Sequence: Synthetic coding sequence
  source 1..1806: mol_type = other DNA
atggcatacgacgattctgtaaagaaagaggactgttttgacggggatcacactttcgaggacatagggctggccgcaggacgaagtcagagggaaaagaaaagaagctataaggactttctgagggaggaggaagagatagccgcacaagtcagaaacagtagtaaaaaaaagttgaaagacagtgaactgtacttcctgggcactgacacacataagaagaagcgcaaacacagctctgacgattactattatggagacatctcatccctggaatcctctcagaagaaaaagaagaaaagctccccccagtctacggacaccgccatggatcttctcaaggctattacaagcccactggccgcaggcagtaagccctccaaaaaaactggggagaagtcttcagggtctagctcacatagtgagtctaaaaaagagcatcaccggaagaaagttagcggctcatcaggcgagctgccactcgaagacggggggagccataaatctaaaaagatgaaacctctatacgttaacacagagactctcactctgcgtgagccagatggcctcaaaatgaaattgattctctctcctaaagaaaagggatcttcaagcgtcgacgaagagtctttccagtacccgtcccaacaggccaccgtgaagaaatccagcaagaaatctgctcgcgatgagcagggagcactcctgctgggtcacgagcttcaatcttttctcaagacagcgcgtaaaaaacacaaaagcagctccgatgcccatagttcccccggacccgaggggtgtggttcagacgctagccagtttgctgaatctcattcagctaatcttgacctgtctggactcgaacccattttagtcgaaagcgattcctccagcggtggtgaactagaagccggcgagctggtgatcgatgactcatacagagagatcaaaaagaaaaaaaaaagcaaaaaatctaagaagaagaaggacaaagagaagcacaaggagaagaggcattccaaatcaaagcggtccctgggactctccgccgtcccggtgggcgaggtgacggtgacaagcggccctcctccatctatcccttatgcaggtgctgccgcgccgccattgcccttacctggcctccataccgacggacactctgaaaagaaaaagaaaaaagaggaaaaagacaaggaaagagagagaggtgagaaacccaagaagaaaaatatgtcggcttaccaggtgttttgtaaagaatacagagtgactatagtagcggatcacccaggaattgattttggcgaactgagtaagaagctggctgaagtgtggaagcagctgcccgagaaagacaagcttatctggaagcagaaggcccagtatttgcagcacaagcaaaacaaggccgaggctaccacagtaaaacggaaagcaagcagctcggaggggtccatgaaggtcaaagcttccagcgttggtgtcctgtctccacagaagaaatcacccccgaccactatgctcctgccagccagccccgcgaaggctccggaaacagagcctatcgacgtcgctgcacatctccagttactgggcgaatcactgtcactgattggtcaccgactccaggaaacagagggaatggttgccgtgagtggatccctgtccgtgctgcttgattcaatcatctgcgcacttggtcctttggcatgccttactacacagctgccagaactgaatgggtgtcctaaacaggtgttgagcaataccttggacaacattgcttatatcatgccaggcctctag

SEQ ID NO: 14023 - DNA, 702 bp, synthetic construct
  misc_feature 1..702: note = Description of Artificial Sequence: Synthetic coding sequence
  source 1..702: mol_type = other DNA
atgtcccaaagtaacagggaactcgtcgtggatttcctgtcctataagttgagccaaaaaggctatagttggagccaattctctgacgtggaagaaaaccgaactgaggcaccagagggaactgaatccgagatggagacacccagcgccattaatggaaaccccagctggcatctggctgattctcccgctgtgaatggagctacaggacactctagctctttagacgcgcgggaggtcatccctatggccgccgttaaacaggctcttagggaggcaggcgacgaatttgagctccgttatcgtagagcatttagtgacttaacctcgcagctccacataacccccggcacagcctatcaatccttcgagcaagtagtcaacgagctgttccgggatggtgtcaattggggcagaattgtagcattcttctcttttggaggggctctgtgcgtggagtcagttgataaggagatgcaggttctggtttccaggattgcagcatggatggctacctacttgaatgaccatctagaaccttggatccaggaaaatggcgggtgggatacgttcgtagaactttacggcaacaacgccgccgccgagtctagaaaaggtcaggaacggttcaaccgctggtttctgacaggtatgactgtggccggagtcgtgctgctggggtctttgttcagcaggaaatag

SEQ ID NO: 14024 - DNA, 513 bp, synthetic construct
  misc_feature 1..513: note = Description of Artificial Sequence: Synthetic coding sequence
  source 1..513: mol_type = other DNA
atgtcgcaatcgaacagggaacttgtggtcgatttcctgtcttacaagctctcccagaaaggttattcatggtcacagttcagcgatgttgaagagaaccgcactgaggcgccggagggaacagagagcgagatggagactccatccgccatcaatgggaatccgagctggcacctggcagactcgcctgccgtcaacggagcaacagggcatagcagttctcttgatgctcgcgaggtgattcccatggcagccgtgaaacaagcgctcagagaggcgggcgacgagttcgaactaagatatagacgagcctttagtgacttaacctctcagctgcatatcacaccagggacagcttaccagtcattcgagcaggacacattcgtcgagctgtatgggaacaacgcagctgcggagagccgcaagggccaggagagatttaaccgctggtttttgaccggcatgacagtggccggcgtcgttcttctgggttccttgttttcaaggaagtag

SEQ ID NO: 14025 - DNA, 702 bp, synthetic construct
  misc_feature 1..702: note = Description of Artificial Sequence: Synthetic coding sequence
  source 1..702: mol_type = other DNA
atgagtcaaagcaatcgtgagctggtcgtcgattttttatcctataaactatcccaaaaaggatactcttggtcccagttttcagatgttgaagaaaaccggaccgaagcgcctgaaggcactgaatctgagatggagactccctctgccatcaacgggaatccaagttggcacctggcagattcgcccgctgtgaacggtgcaaccgggcattcatcctccttggacgccagagaagtgatccctatggcagctgtgaaacaggccctgagagaggcaggggacgagtttgaactccgatacaggcgggccttctccgatctgactagtcagctgcacatcacaccaggaaccgcttaccagagcttcgagcaggtggtcaacgagctcttccgcgatggagtcaattgggggcgtattgtggccttcttcagttttggcggagctctgtgcgtggaaagtgtggacaaggaaatgcaggtgctggtctctcggatcgccgcctggatggcaacatatcttaacgaccatttggaaccctggattcaagagaacggtgggtgggacactttcgtggagctgtatggaaataacgcggccgccgagagtcgtaaaggacaggagaggtttaaccggtggtttctgactggaatgaccgtggcgggcgtggtcttgcttggctctttatttagtcgcaaatag

SEQ ID NO: 14026 - DNA, 567 bp, synthetic construct
  misc_feature 1..567: note = Description of Artificial Sequence: Synthetic coding sequence
  source 1..567: mol_type = other DNA
atgtctcagagcaatcgcgaactggttgtcgatttcttgagctacaagttatcccagaagggatactcctggtctcaattttccgatgttgaggaaaacaggacagaggcgcctgaaggcacagaaagtgaaatggagacaccctctgccatcaacggaaaccccagctggcacctggcggactctccagctgtgaatggcgccactggacatagctcctcactggatgctcgcgaggtaatacctatggcagctgtcaagcaagccctgcgcgaggccggcgacgaatttgagctgcgctatcgacgcgcattctcagacctgacctcacagcttcacataacacccggcaccgcctatcagagctttgagcaggtcgtgaacgagctttttagagacggggtcaactggggtagaatcgtagcatttttttccttcgggggagcactctgtgtcgagagtgtagataaagagatgcaggtgctggtttccagaatagcagcctggatggctacctacttaaacgatcacctggaaccttggattcaggagaatggtggatggtag

SEQ ID NO: 14027 - DNA, 702 bp, synthetic construct
  misc_feature 1..702: note = Description of Artificial Sequence: Synthetic coding sequence
  source 1..702: mol_type = other DNA
atgtcccagagcaaccgagaacttgtggtggatttcttgtcctacaaactttcacagaaggggtattcttggtctcagtttagcgacgtcgaggagaacagaacagaggctcccgagggaacagagtcagagatggaaactccctctgccataaacggtaatccaagctggcacctggctgatagccctgccgtgaacggagcaaccggccatagtagtagcctggacgcccgcgaggtgatccccatggcagcagtgaagcaggccctcagggaagcgggggacgagttcgagctgagataccgcagagcgttttctgacctcacaagccagttgcatattacacccggtactgcttatcagtcttttgagcaggtcgtcaatgaactgtttagagatggcgtgaactgggggcgcattgttgcgttcttttcttttgggggtgctctctgtgtggagtctgtggacaaggaaatgcaggtcctggtgtctcgaattgccgcctggatggctacgtacttaaacgaccacctggagccatggattcaggagaatggagggtgggatacctttgttgagctctatgggaacaacgccgccgcggagagtcgcaaaggtcaggaacgctttaatcgttggttcctgactggaatgactgtggcaggagtcgtgctgctgggcagtctgtttagtaggaagtag

SEQ ID NO: 14028 - DNA, 567 bp, synthetic construct
  misc_feature 1..567: note = Description of Artificial Sequence: Synthetic coding sequence
  source 1..567: mol_type = other DNA
atgtcacaaagcaaccgcgagctggtggtagactttctaagctacaagctgagccagaaaggttactcttggagtcagttttcagacgttgaggagaatcggacagaggctccggagggtacagaatccgaaatggaaaccccttctgcaattaacggcaacccttcctggcatctagccgactcccctgcagtcaatggagctacgggacacagcagtagcctcgacgcccgcgaggtgatccctatggccgctgtgaagcaagcgctgcgcgaggccggtgatgagtttgaactgaggtaccggcgcgcattcagcgacctaaccagccagctacacataacgccaggaaccgcttaccagtcatttgagcaggtagttaacgagctgttccgagacggcgtcaattggggcagaatcgtggctttctttagcttcggaggggcactttgcgttgagagtgtcgataaggaaatgcaggtgctggtgtccaggatcgctgcctggatggccacctacctgaatgatcacctagaaccgtggatacaggaaaatggcggttggtag

SEQ ID NO: 14029 - DNA, 147 bp, synthetic construct
  misc_feature 1..147: note = Description of Artificial Sequence: Synthetic coding sequence
  source 1..147: mol_type = other DNA
atgtcccagagcaaccgggaactagtggttgacttcttgtcctacaaactgagccagaaggggtattcgtggagtcagttttccgacgtagaggagaaccggaccgaggctcctgagggcactgaaagcgagatggaaacgccttag

SEQ ID NO: 14030 - DNA, 546 bp, synthetic construct
  misc_feature 1..546: note = Description of Artificial Sequence: Synthetic coding sequence
  source 1..546: mol_type = other DNA
atgagccagtcaaaccgggaactggtcgtcgatttcctgagttacaagctctctcagaagggctactcgtggagccagttcagcgacgtggaggaaaaccgcacagaagctcccgaaggcacagagagcgagatggagacaccttccgccattaacgggaacccaagctggcatttagccgactcaccagccgtaaacggcgccacagggcacagttcctctctggatgccagagaggtcatcccaatggctgcagttaagcaggccttacgcgaggcaggagatgagttcgagctgcgatatagacgagccttttccgacctaaccagccagctgcatatcacccctgggaccgcctatcagtcctttgagcaggttgttaatgagctgttccgagacggggtgaattggggccgcatcgttgcattttttagcttcggtggggctctgtgtgtggaatctgtagacaaggagatgcaggttttagtctcacgaattgcagcgtggatggccacttatcttaatgatcatctggaaccctggtag

SEQ ID NO: 14031 - DNA, 618 bp, synthetic construct
  misc_feature 1..618: note = Description of Artificial Sequence: Synthetic coding sequence
  source 1..618: mol_type = other DNA
atgtcccagtccaatagggaactcgtggtggattttctgtcgtacaaactctcacagaagggatacagctggtctcagttttccgatgtggaggagaaccggactgaagcccccgaaggcaccgaatctgaaatggagacaccttctgccataaatgggaacccctcctggcacttagctgattcccccgccgtgaacggagcaacagggcactcttcttccctggatgctagagaagtcatccctatggctgctgtcaagcaagctctgagggaagctggagatgaattcgaactacgatacaggagggctttttctgatctgacctctcagttacatataactcctggaaccgcctatcagtccttcgagcaagtcgtaaatgagctgttcagagatggcgtgaactggggccgaatcgttgctttcttttctttcggaggcgcgttgtgcgtggagagcgtggataaggagatgcaggttctggtcagtaggatcgccgcttggatggccacatatctaaacgatcatttagaaccttggatccaagaaaacggagggtgggacaccttcgttgagctgtatgggaataacgccgcggcagagtctagaaagtag

SEQ ID NO: 14032 - DNA, 567 bp, synthetic construct
  misc_feature 1..567: note = Description of Artificial Sequence: Synthetic coding sequence
  source 1..567: mol_type = other DNA
atgtctcagtcaaaccgagagctggttgtagacttcctttcctacaaactgagccagaagggatacagctggtcacaatttagcgatgttgaggagaatagaaccgaggcacctgaggggacggagagcgaaatggagactccttccgccatcaatggcaatccttcatggcacctggcggatagcccagccgttaatggagcaacggggcattcatcgtctctggatgcacgagaggtgatcccaatggctgctgtcaaacaagctctacgcgaggcgggcgacgagttcgagctccgctacaggagggcattcagtgacttaactagccagctgcatatcaccccaggcactgcttaccagagttttgaacaagtggtcaatgagctttttagagatggggtgaattggggaagaattgttgccttcttctcgtttgggggtgcactttgcgtggaatccgtggataaggaaatgcaagtactggtgtcccgcattgcggcgtggatggccacctatttgaacgaccatctggagccatggatccaagaaaacggagggtggtag

SEQ ID NO: 14033 - DNA, 615 bp, synthetic construct
  misc_feature 1..615: note = Description of Artificial Sequence: Synthetic coding sequence
  source 1..615: mol_type = other DNA
atggtagatcagctgagagagcggacaactatggccgaccccctccgggaaaggacagagttactcctagccgattatctgggttattgtgcaagagagccagggactccggagcccgccccttccacccccgaagccgcagtgttgagatcagccgcggcgaggctaaggcaaattcacagatctttcttttctgcctatctcggctacccggggaatagatttgagttggtggctttaatggctgactcggttctgtccgactcacccgggcctacatggggacgtgtcgtaactcttgtgacattcgctggaaccctgctggaaagggggccactcgtgactgcacgctggaagaagtggggcttccagcctaggctgaaagagcaggagggcgatgtcgctagggattgtcagagactcgtggccctgctttcatctaggttgatggggcaacaccgagcatggctccaagctcagggcggctgggatggtttttgtcacttctttagaacaccgtttcccttagccttctggcgaaagcagttagtccaggctttcttatcctgccttctgacaacggcatttatttacctctggaccagactgttgtag

SEQ ID NO: 14034 - DNA, 417 bp, synthetic construct
  misc_feature 1..417: note = Description of Artificial Sequence: Synthetic coding sequence
  source 1..417: mol_type = other DNA
atggccaagcagccttcagacgtcagttccgaatgcgatcgagaaggcagacagttgcagccagccgagcgtcctccgcagcttcggcccggggccccaactagcttgcagaccgaaccccaagatcgttccccagcgcctatgagttgcgacaagagcacgcagacaccctcacctccctgtcaggcctttaatcactacctgagtgccatggccagcatgaggcaggctgagcccgccgacatgagacccgaaatctggattgcccaggaactgcgccggataggtgatgagttcaacgcctattacgctcgccgagtctttctcaacaactatcaagcagctgaagatcatccccggatggtcatcctgagactgttgcggtatatagtgcgattggtgtggcggatgcactag

SEQ ID NO: 14035 - DNA, 339 bp, synthetic construct
  misc_feature 1..339: note = Description of Artificial Sequence: Synthetic coding sequence
  source 1..339: mol_type = other DNA
atggctaaacagccctcggacgtctccagcgagtgcgatcgggaaggccggcagttacagccagcagaaaggccgccacagcttcggcctggcgccccaacctctctccagacagagccacaggaccgaagtcccgctccgatgagctgcgataaatccacccaaacaccatcacctccttgccaggctttcaaccactacctgagcgccatggttgtaatactggaggatataggcgacctgtccctctgtttcggttttatatttaccggcctcgatctgtacgggcatcaccatagtcaggatactgagcaattgaaccacaaagacttcagttag

SEQ ID NO: 14036 - DNA, 519 bp, synthetic construct
  misc_feature 1..519: note = Description of Artificial Sequence: Synthetic coding sequence
  source 1..519: mol_type = other DNA
atggctaaacagccatccgatgtaagctctgagtgtgatcgggagggacgccagctgcagcccgccgaaagaccaccacagctgagacctggagcgcctacctcactccagacagagcctcagggcaaccctgagggtaatcatggcggggaaggtgatagttgcccacacggaagcccccagggaccactggctcctccagccagccctgggccattcgccacgcgttctcccttattcatctttatgaggagatcttctctgttgagcaggagcagtagtggatactttagctttgacacagaccgctccccagctccaatgagttgtgacaagtctacgcaaacccccagtcccccatgtcaggccttcaaccactatctgtcagccatggcctctatgagacaggccgagcctgcggatatgcgaccagaaatttggattgcccaggagctcaggagaatcggcgatgagtttaacgcctactatgctcgccgcatgcctctccccccagattag

SEQ ID NO: 14037 - DNA, 219 bp, synthetic construct
  misc_feature 1..219: note = Description of Artificial Sequence: Synthetic coding sequence
  source 1..219: mol_type = other DNA
atggctaagcagccctccgacgtctccagtgaatgcgacagggaaggccgacagctgcagcccgcagagcgtccgcctcaacttagacctggcgccccaacttcactgcaaacagaacctcaagggaaccccgaggggaatcacgggggggaaggggattcgtgcccccatgggtcaccgcagggacccctggcacccccggcgagcccaggaccttag

SEQ ID NO: 14038 - DNA, 258 bp, synthetic construct
  misc_feature 1..258: note = Description of Artificial Sequence: Synthetic coding sequence
  source 1..258: mol_type = other DNA
atggccaaacagcccagcgacgtgtcatctgagtgtgatcgtgaggggagacaactgcaaccagccgagcggcctccccagctgcgcccaggcgcaccaacaagcctgcagaccgagccacaggcgagcatgcggcaggccgaacctgctgacatgagaccagagatttggatagcccaagagctgaggcgtatcggagacgagtttaacgcatactatgccaggcggctggccaaactcctggcctcatcaacttag

SEQ ID NO: 14039 - DNA, 597 bp, synthetic construct
  misc_feature 1..597: note = Description of Artificial Sequence: Synthetic coding sequence
  source 1..597: mol_type = other DNA
atggccaaacagcctagtgatgtgagcagtgaatgcgatcgagagggcaggcaactgcaaccggctgagcgccctcctcagcttagaccaggggcacccacgtctctgcagactgaaccgcaggggaatcccgaaggtaatcacgggggggaaggggattcctgtcctcacggcagccctcaggggccgctggcccccccggcgagtccaggaccttttgccactcgcagtcccttatttatctttatgcggagatcatcactgctttctaggtccagctccggatatttttcattcgatacagacagatccccagcacctatgagttgtgacaagtcaacacaaactccatcgccgccgtgtcaggcattcaatcactacctcagcgccatggcttccatgcgccaggcagaacctgccgacatgaggcctgagatttggatcgcccaggaattacggagaattggagatgaatttaacgcttactacgctcgtcgcgtgtttctgaataactaccaagccgccgaagaccatccccggatggtgatcctgagattgttgcgctacatagtcagactagtttggcggatgcactag

SEQ ID NO: 14040 - DNA, 369 bp, synthetic construct
  misc_feature 1..369: note = Description of Artificial Sequence: Synthetic coding sequence
  source 1..369: mol_type = other DNA
atggctaagcagccctcagacgtgtcaagtgaatgcgatagggagggccggcaactgcagcccgccgaacgccctcctcagctgcggcccggggcccctacatctttacagacggagcctcagggcaacccagagggcaaccacgggggggagggcgattcatgtccgcacggcagccctcagggcccattggcccctccagcttcccctggtccgttcgcaactagatcacccctgttcatctttatgagaaggtcgtccttactaagtagatctagctccggatacttcagcttcgatacggaccggtcaccagcccctatgagttgcgacaaatccacacagactcccagtccaccctgccagtag

SEQ ID NO: 14041 - DNA, 222 bp, synthetic construct
  misc_feature 1..222: note = Description of Artificial Sequence: Synthetic coding sequence
  source 1..222: mol_type = other DNA
atgcggcaagccgagccggccgacatgcgaccagaaatctggatcgcccaagaactaagacgaattggcgatgaattcaatgcttactacgctcggcgtgtcatgatgttcagcctgcccgcattcctcctcacgccctctcccagcactctctattttttcaaaaagaccgtcactagttgcaattacatgttaattctggagatgattactgtggcctag

SEQ ID NO: 14042 - DNA, 243 bp, synthetic construct
  misc_feature 1..243: note = Description of Artificial Sequence: Synthetic coding sequence
  source 1..243: mol_type = other DNA
atggccaagcagccctccgatgtttcatcggaatgtgatcgcgaaggtcgacagctccagccagccgagcggcctccacaacttagacccggagcgccgacatccctgcagaccgaacctcaggatcggtccccagctccaatgtcttgcgacaaatcgacacagacaccctccccaccctgccaggctttcaatcactacctcagcgctatggttagagaaatcgaggaggttgtggtgtag

SEQ ID NO: 14043 - DNA, 408 bp, synthetic construct
  misc_feature 1..408: note = Description of Artificial Sequence: Synthetic coding sequence
  source 1..408: mol_type = other DNA
atggcaaaacagccttccgacgtgtcttcagaatgtgaccgggagggaagacaactgcagcccgccgagcgacccccacagcttcggccaggagcacctacctcgctgcagacggaaccccagggaaatcctgagggcaatcacggaggagagggggactcatgtccccatggctctccacagggacccctcgcgccccctgcctctccaggacctttcgccacccggagcccacttttcattttcatgcggagatcctctctgctttctcgttcaagctcaggttacttcagctttgacaccgacaggtcccctgccccgatgtcttgcgacaaaagcacccagaccccttcaccgccctgtcaagcatttaatcattacctgtcggcaatggccaactgggactag

SEQ ID NO: 14044 - DNA, 423 bp, synthetic construct
  misc_feature 1..423: note = Description of Artificial Sequence: Synthetic coding sequence
  source 1..423: mol_type = other DNA
atggccaaacagccttctgatgtgagctcagagtgtgaccgcgaagggcgacaactccagccggccgagagaccaccacaactccgtcccggggcacctacctcacttcagaccgaacctcaggggaacccagagggtaatcatgggggcgaaggcgactcctgtcctcacggtagccctcaaggccctttagcaccacctgcctcgccaggcccttttgcaacgagatcacccttgttcatctttatgcgtaggtctagtcttctatctcggtcctcttccggatatttctcattcgacactgaccggtcacccgcaccgatgtcctgcgacaaaagcactcagaccccgtcaccgccttgccaggcttttaatcattacctatccgccatggtaagagagatagaggaggtagtggtgtag

SEQ ID NO: 14045 - DNA, 291 bp, synthetic construct
  misc_feature 1..291: note = Description of Artificial Sequence: Synthetic coding sequence
  source 1..291: mol_type = other DNA
aaacagccttccgacgtctcaagtgagtgtgatagggaagggagacagctgcaacccgcggagcggcccccccagctcagaccaggagctcctaccagcttacagaccgagcctcaggacagatcaccggctcctatgtcttgtgataagtcaacacaaacgccctctcctccatgtcaagccttcaaccactacctcagtgctatggacgactccgcaggctcttcattgcggatagccctgcatcgcgaggttcaatggcccctcaagtggctggccaaaagttcttag

SEQ ID NO: 14046 - DNA, 249 bp, synthetic construct
  misc_feature 1..249: note = Description of Artificial Sequence: Synthetic coding sequence
  source 1..249: mol_type = other DNA
atggcaaagcagcccagcgatgtgtcatccgagtgtgatagagaaggtcggcagctgcagccagccgaaagacccccacagctgcggcccggggcgcctacatcactccagactgaaccccaggcgagtatgcgtcaggctgaaccagctgatatgcggccagagatttggatagctcaggagcttcgacgtatcggagacgagttcaacgcctattacgccaggcgcatgcctttaccccccgactag

SEQ ID NO: 14047 - DNA, 582 bp, synthetic construct
  misc_feature 1..582: note = Description of Artificial Sequence: Synthetic coding sequence
  source 1..582: mol_type = other DNA
atggcaacacccgcctcggcccctgacactcgggctctcgtcgcagatttcgtcggatataaactcaggcagaaggggtacgtatgtggcgccgggcctggcgagggtccagctgccgacccactgcaccaggccatgagagccgccggcgacgagttcgagacacgctttcggcggacattcagtgatctggcggcacagctgcatgtgacccccggttcagcccaacaacggttcacacaggtctcagatgagctgtttcagggcggcccgaattggggccgcctcgtggctttcttcgtgttcggagcagcactgtgcgccgaatcagtgaacaaagaaatggagcccctggtagggcaggttcaagagtggatggtcgcctacttagaaactcaactggctgactggattcattcttcaggcggctgggccgagttcactgccctgtatggcgacggggctctcgaggaagctcgtaggctcagggaaggtaactgggccagcgttcgaaccgtcctgaccggggcggtggccttgggcgccctggtcacagtaggagcatttttcgcttctaagtag

SEQ ID NO: 14048 - DNA, 156 bp, synthetic construct
  misc_feature 1..156: note = Description of Artificial Sequence: Synthetic coding sequence
  source 1..156: mol_type = other DNA
atggctacgcctgccagtgcccccgatactcgagctcttgttgccgactttgtgggctataaattgaggcagaagggttacgtatgcggtgctggaccaggggagggcccagccgctgacccgctgcaccaagccatgcgcgccgccggcgattag

SEQ ID NO: 14049 - DNA, 219 bp, synthetic construct
  misc_feature 1..219: note = Description of Artificial Sequence: Synthetic coding sequence
  source 1..219: mol_type = other DNA
atggcaacccccgcatccgcccccgacacaagagctctggttgccgacttcgtgggatacaaactgcgccagaaggggtatgtctgtggcgctggcccaggtgagggacctgcggcagatccactgcatcaggccatgagggccgccggtgatgagttcgaaacgcgatttagacgcaccttcagcgaccttgctgctcagctgcacgtaacaccctag

SEQ ID NO: 14050 - DNA, 450 bp, synthetic construct
  misc_feature 1..450: note = Description of Artificial Sequence: Synthetic coding sequence
  source 1..450: mol_type = other DNA
atggctacccccgctagcgcacccgatactcgggcattagtcgcagattttgtggggtacaagctgagacagaaaggttatgtgtgcggcgcagggcctggagaagggccagctgcagatcccctgcatcaggccatgagggccgctggagatgagttcgagactcggtttcgtcgcacttttagtgacctagcagctcagctgcatgtgacccctggcagcgcccaacaacgctttactcaggtcagtgacgagctcttccaaggcggccccaattggggccgcttggttgcctttttcgtctttggggccgctctgtgtgctgaaagcgtgaacaaggagatggaaccactagtcggtcaggtgcaggagtggatggtcgcatatcttgagacacaactcgccgactggattcactcaagtggcggatgggcagaattcactgcctag

SEQ ID NO: 14051 - DNA, 435 bp, synthetic construct
  misc_feature 1..435: note = Description of Artificial Sequence: Synthetic coding sequence
  source 1..435: mol_type = other DNA
atggccacccccgcctcagcacccgacacacgtgcactggtggccgacttcgtgggttacaagctccggcagaagggttacgtgtgtggtgccgggcctggcgaaggccccgctgcagatccccttcaccaagccatgagagccgctggtgacgagttcgagacacgctttcgacggactttttccgacctggccgctcagttacatgtcactccagggtccgcccaacagcgattcacacaggtaagcgacgagctttttcagggcggaccaaactggggccgtctggttgcgttcttcgtcttcggagccgccctgtgcgcggagtcagtaaataaggaaatggagccactggttggtcaggtacaggaatggatggtggcctatctggagacccagctggcggactggatccactcttcaggcggctggtag

SEQ ID NO: 14052 - DNA, 528 bp, synthetic construct
  misc_feature 1..528: note = Description of Artificial Sequence: Synthetic coding sequence
  source 1..528: mol_type = other DNA
atgacagactgcgagtttgggtacatttatcgcttagctcaagattatttgcagtgtgtgcttcagattccacagccaggcagcgggcccagtaaaactagccgggtcctccagaatgtggccttctccgtgcagaaggaagtggaaaagaatcttaaatcttgtctcgataacgtgaatgttgtatcggtagatacggctagaacccttttcaaccaggtgatggagaaggaatttgaagatgggataatcaattggggccggatagttaccatcttcgctttcgagggaattctgattaaaaagttgcttaggcagcagattgcccccgacgtcgatacctataaagagatcagctattttgttgcagagtttattatgaataatacaggtgaatggatccggcagaacgggggctgggagaacgggttcgtgaaaaaattcgaaccaaaatcgggatggatgacattcctagaggtcacaggcaaaatatgtgagatgctgagccttctaaagcagtactgctag

SEQ ID NO: 14053 - DNA, 492 bp, synthetic construct
  misc_feature 1..492: note = Description of Artificial Sequence: Synthetic coding sequence
  source 1..492: mol_type = other DNA
atgaccgactgcgagttcggctacatatatagactggctcaggattatcttcagtgtgtacttcagattccgcagccaggatccggtcctagtaagaccagtagggtgctgcaaaatgtggcctttagcgtgcaaaaggaagttgagaaaaacctgaagtcgtgtctcgataacgtcaacgtggtgtccgtggatacagctcggacactcttcaaccaggtcatggagaaggaatttgaagacggcatcattaactggggacgcattgtgaccatttttgcctttgagggaatcttaattaagaaactcctgagacagcagatcgcccctgacgtggatacctacaaagagatctcttattttgtcgcggagtttatcatgaataataccggcgagtggattcgtcaaaatggaggctggggcaagtggcacaatcacacacccatgctagtcgaaagcgttgctcataaaaagcgaaagatggctttatag

SEQ ID NO: 14054 - DNA, 726 bp, synthetic construct
  misc_feature 1..726: note = Description of Artificial Sequence: Synthetic coding sequence
  source 1..726: mol_type = other DNA
atgtgcagcggggccggtgtgatgatggcccgctgggcggctaggggtcgagccggatggcgatctacagtgcggatcctaagccccctgggtcactgcgagccaggagtttcgaggtcctgcagagccgcccaggccatggattgcgaggtgaacaatggatcgtcactccgcgacgaatgcataaccaatctgcttgtctttgggtttctgcagagttgttctgacaacagctttcgaagggaattggatgccctagggcacgaactgccagtgttggccccgcagtgggaaggctacgatgaacttcaaacagacggaaatcggtcctcccacagcaggctcggacgaatagaagctgattccgagtcccaagaggacatcatccggaacatcgctcgtcacctggctcaggtcggtgactcaatggatagatccatccccccgggactggttaacggtttggcccttcagctgaggaataccagccggagtgaggaagacaggaaccgcgacctggccacagctctagagcagctcctccaggcctatccgcgagacatggagaaagagaagaccatgctagtccttgcactgctgcttgctaagaaagtggcatcacatacgccgtcattgctgagagatgtctttcacaccactgttaatttcatcaatcagaacctccggacctatgtgagatcccttgctcggaatggtatggactag

SEQ ID NO: 14055 - DNA, 414 bp, synthetic construct
  misc_feature 1..414: note = Description of Artificial Sequence: Synthetic coding sequence
  source 1..414: mol_type = other DNA
atggactgcgaggtaaacaatggctcctctctcagggatgaatgtattaccaatttactggtttttggatttctccagagctgctctgataactcttttcggagagaactcgacgcgcttggtcacgagttacccgtgctggcccctcagtgggaagggtacgatgaactccagactgatgggaacaggtcaagtcattccagactcgggcggatagaagcaggtgcctctgacaataatactgcctcagctgaagaggaaaccgaagccgctggatctgtggctgtcgagagaggcttgcatggagctgccacagtgattctgaaagtgaagaagacaagcagcggcattctgcctggcaccagtccccggtctggaacagcatggacggtcgcaagcctgcgggcctggtag

SEQ ID NO: 14056 - DNA, 300 bp, synthetic construct
  misc_feature 1..300: note = Description of Artificial Sequence: Synthetic coding sequence
  source 1..300: mol_type = other DNA
atggaccggtctattccccccggcttagtcaacggcttggcgttacaactgcgcaacacttcacgaagcgaggaagaccggaaccgtgacctggcaaccgccctcgaacagctgcttcaggcatacccccgcgacatggagaaagagaaaaccatgctggtcttggcactcttactggcaaaaaaagttgcatctcatacaccgtccctgctcagagatgttttccatacgaccgtcaacttcattaatcagaatcttcgaacctatgttcggagtttagccagaaacgggatggattag

SEQ ID NO: 14057 - DNA, 300 bp, synthetic construct
  misc_feature 1..300: note = Description of Artificial Sequence: Synthetic coding sequence
  source 1..300: mol_type = other DNA
atggacaggtccataccaccagggctcgttaatggacttgcgctccaactcaggaataccagtaggtctgaggaggaccgtaaccgagacctggctacagctttggagcaactgctccaagcctacccacgagatatggaaaaggagaagaccatgctcgtcttagccttgctgcttgctaaaaaagtagctagtcataccccttcactgctgagggatgtgtttcacaccactgtgaacttcattaatcaaaatctgaggacgtatgtcagaagcctcgcgagaaatggaatggactag

SEQ ID NO: 14058 - DNA, 588 bp, synthetic construct
  misc_feature 1..588: note = Description of Artificial Sequence: Synthetic coding sequence
  source 1..588: mol_type = other DNA
atggattgtgaagtgaacaacggttcttccctcagagacgagtgtattacaaatctgctggtgttcggcttcctacagtcttgctcagacaatagctttcgccgagaactcgatgctttgggccacgagctgcctgttctcgccccacagtgggagggatatgacgaattgcagactgacggcaaccgatccagtcatagccggctcggccgtattgaggcagatagcgagtctcaggaagatattataagaaacattgcacggcaccttgctcaggtcggggactcaatggatcggtctataccaccgggactcgtgaacggccttgctctacagctgcgtaataccagtcgctccgaggaggaccggaatagagatcttgctactgcccttgagcaactgcttcaggcttaccctcgagatatggagaaagagaaaaccatgttagtattggcacttctcctggctaagaaggtcgcctctcacaccccaagcctgcttcgggatgtcttccacacgacggtgaatttcattaaccagaacttgcggacctatgtgaggtctctggctcggaatggcatggattag

SEQ ID NO: 14059 - DNA, 588 bp, synthetic construct
  misc_feature 1..588: note = Description of Artificial Sequence: Synthetic coding sequence
  source 1..588: mol_type = other DNA
atggattgtgaagtcaacaatggctctagcctgagggatgaatgtatcacgaacctgctggtgtttgggttcctccaaagctgttccgacaattcctttcgaagagagctggatgcattggggcacgagctgccggtgctggccccccagtgggaggggtatgatgagctgcagaccgacggaaatagatcctcccactcccggttgggccgtatagaggcagattcagagagccaggaggatatcatccgaaatattgctcgccacctggcccaggtcggagactctatggacagaagtatcccgcctgggctggttaatggtctggcattacagctgaggaacacctccagatccgaggaggaccgcaatagggaccttgctacagccctggagcagctcctgcaagcctacccacgagacatggagaaagagaaaacgatgctcgtgctggctctgctgctcgccaaaaaggtagcctcccacaccccaagcctgctacgcgatgtgtttcatactaccgtgaatttcatcaaccagaatctgcgcacatatgtgagaagcctagctaggaatggaatggattag

SEQ ID NO: 14060 - DNA, 1353 bp, synthetic construct
  misc_feature 1..1353: note = Description of Artificial Sequence: Synthetic coding sequence
  source 1..1353: mol_type = other DNA
atggaggaaccccagaagtcatacgtgaacactatggatctagaacgagacgagcccttgaagagcacgggcccgcagatctccgtgtctgaatttagttgccactgttgctatgatatacttgtcaacccaacaactcttaattgtggccactctttctgccgccactgtctggctctctggtgggcaagctccaagaaaaccgagtgcccagaatgccgggagaagtgggaggggttccctaaggtgtccatcctgctcagggatgcaatagagaagttgttccccgatgctatcagactgcgttttgaggacatccagcaaaataatgacattgtgcagagcctggctgcatttcagaaatatggcaacgaccagattcccctggcgcccaacaccggacgtgccaatcagcaaatgggtggggggtttttttctggtgtgttgaccgcacttaccggcgtggctgtggttctcctggtgtatcattggagttctcgagagtccgagcacgacctgctagtgcacaaggcggtcgccaaatggaccgccgaggaagtcgttctgtggctggagcaactcggtccatgggccagcctgtaccgagaaaggttcctttccgaacgcgtcaatggacggctgctgctgactctcacagaagaagagtttagcaagacaccctataccatagagaacagctcacaccgcagagccattctgatggagcttgagagagtaaaagctctgggcgtgaaaccaccgcagaacctttgggagtacaaggctgtcaatcctggacgcagtctttttctattgtatgccctgaagtccagtcccagactttcactcctatacttatacctgtttgactacaccgatacctttcttcccttcattcacacaatttgccctttacaggaggattcctccggagaagatatagttacaaagttgctcgaccttaaggagccaacctggaagcagtggagagaattcctagtgaaatattcattcctgccgtaccagctgatagcggagtttgcctgggactggctggaggttcattattggacaagtcgttttttgattattaacgccatgctgctgagtgtgctggaactgttctctttctggcggatttggtcaaggtcagagttgaagactgtcccacagcgtatgtggtcccacttctggaaagttagtactcagggccttttcgtcgctatgttctggcccttgatcccgcagttcgtgtgtaactgcctgttttactgggctctttacttcaatcctatcatcaatatagacctggtcgtaaaggaactgaggcgcctggagactcaagtcctgtag

SEQ ID NO: 14061 - DNA, 969 bp, synthetic construct
  misc_feature 1..969: note = Description of Artificial Sequence: Synthetic coding sequence
  source 1..969: mol_type = other DNA
atggtcggtatattcaaggagaacaggatgtcgcgaatgcagaggaagatggggcgctttccgcaatctcaatatagcccccaggtggtgctcctggtttaccactggagcagtcgcgagagcgaacatgatctgctcgtacacaaggcagttgccaagtggacagcggaagaagtcgtcctttggcttgaacagctgggaccttgggcgagtctgtaccgggagcggtttctgtcagaacgagtcaacggccgcctcttgctcactctaaccgaagaggaattctcgaaaaccccatacactatcgagaactcctcccacagacgagctatcctcatggagctggagcgggtgaaagccctcggagtgaaacccccccagaacttgtgggaatacaaggccgtcaatccgggaagaagcctttttctgctttatgctctgaagagttctccacgtctaagtcttctatacctgtatttatttgactatacggatactttcctgcctttcatccataccatttgtcccctgcaggaggacagttccggggaggatatcgtgacaaaactgctggacctcaaggagcctacatggaagcaatggagggagttcctggtgaaatacagtttcctcccgtaccagttaatcgcagaatttgcttgggactggctggaagttcactactggacctcacggtttctgataataaacgctatgctgctcagtgtgctcgagttgtttagcttttggagaatctggtccaggtccgaacttaagaccgttcctcagagaatgtggagccatttttggaaagtctccacccaagggctgttcgtcgctatgttctggcccctcattccacagtttgtgtgcaattgcctgttctattgggcattgtattttaaccccatcattaatatagacctggtcgttaaggaattgaggcgcctggagacccaggtcctgtag

SEQ ID NO: 14062 - DNA, 4254 bp, synthetic construct
  misc_feature 1..4254: note = Description of Artificial Sequence: Synthetic coding sequence
  source 1..4254: mol_type = other DNA
atggccgccgtgccccagaacaatctgcaggaacaactggagcgccactctgcgagaaccctgaacaacaagctctcattgagcaagcccaagttttccggttttacgttcaaaaagaagactagtagcgacaacaacgtcagcgtgaccaatgtttcagttgctaagaccccagtgctccgtaacaaggacgtaaacgttacagaagactttagtttttcagagcccctgccgaatactactaatcagcaaagggtcaaggatttttttaagaatgcgccagccggacaggaaacacagcgcggagggagtaagtctctgctccctgattttctgcagactccaaaggaggtggtttgcacaacccagaacactcctacggtaaaaaagtcccgcgatactgcactgaaaaaattagagttctcctcaagtcctgatagcctcagcaccatcaatgattgggatgacatggacgattttgacacctctgaaacttcaaagtcttttgtcactcccccccagtcccacttcgtgagagtgagtactgcccagaagtcaaagaaggggaagcgcaacttttttaaagctcaactctatacaaccaataccgtcaagacagacctgccaccgccctcatccgaatccgagcagatagacctgaccgaagaacagaaagatgactcagagtggttatcctccgatgttatctgcatcgatgatgggcctatcgcagaagtccacatcaacgaggatgctcaggagtccgatagtctgaagacacatctggaggacgaacgagacaacagtgagaagaaaaaaaatctagaagaagcagagctccattctacggagaaagtcccttgcatcgagtttgatgatgatgattacgacacagatttcgttccccctagccccgaggagattattagtgcctcgtcgagctctagcaagtgcctgtcaaccctgaaagatctcgacacatcggatcggaaggaggacgtgttgtctacttccaaagacttgctgtccaaaccagagaagatgtcgatgcaagagctgaatcccgaaactagtacggactgcgatgcccggcagatatctctgcagcaacaactcatccacgtcatggagcacatctgcaagctcattgatacgatccctgacgataagctcaagctcctagactgcggaaatgagctcttgcagcagaggaatattagaaggaagcttctcacagaagtggatttcaacaaaagtgatgctagtctgctggggagtttatggaggtaccggcctgacagcctcgatgggcctatggagggggattcctgtccgactggcaactctatgaaagaactgaactttagtcacttgccttccaactccgttagccccggggattgtctgctgactacaaccctgggcaagacggggttcagcgcgaccagaaagaatctattcgaacgcccgctgttcaatactcacctgcaaaagagcttcgtttcttccaactgggctgagactcctagactcgggaaaaagaacgagagttcatacttcccaggcaacgtcctgacatccactgccgtgaaagatcagaataaacatactgcatcgataaacgacctggaaagggagacccaaccaagctatgacatagacaattttgatatcgatgattttgatgacgatgatgattgggaggacattatgcataacctggccgcttctaaaagttccaccgctgcctatcagccaataaaagaaggcagaccaatcaagtctgtgtcagagcgcctgtcttcagccaaaacggattgtctgcctgtgagttctactgcgcagaacatcaattttagtgaaagcattcagaattacacggacaagagtgctcaaaacttggcaagtcgcaatctgaagcacgaaagatttcaaagtctttcattcccccatactaaggagatgatgaagatttttcataagaagtttggtctccacaacttcaggactaatcaattggaagcaatcaatgcggcgctccttggagaggactgcttcatccttatgcctacaggcggcgggaaatccctctgctaccagcttcccgcgtgcgtcagcccaggggtcaccgttgtgatctcaccccttcgcagcctgatcgtcgaccaggtgcaaaagttaacatcactggacatcccagccacctacctcactggcgataagacagactctgaggcaaccaacatttatcttcagctcagcaagaaagatcccatcattaagctcctgtacgttacacccgagaagatatgtgcttctaaccggttgatctctaccttggagaacttatacgagcggaaactccttgctagattcgttatagacgaggctcattgtgtctctcagtggggacacgattttcgacaagattacaagagaatgaatatgttaaggcagaagttcccctcagtgcccgttatggccctaacagcaaccgccaaccctagggtgcaaaaggacatcctcacgcagctgaaaatactgcgaccacaggtgttctccatgagcttcaacagacacaacctcaagtattacgtattgcctaaaaagcccaagaaggtggccttcgactgtctggaatggatcagaaagcatcatccatatgactctggcattatctattgtttgagtcgaagagagtgtgacacaatggccgatactttgcaacgagatggcctcgcagccttagcttatcacgcagggctcagtgattctgccagggatgaggtgcagcagaagtggatcaatcaagatggctgtcaagtgatttgcgccaccatcgcattcggaatgggtattgataagccagacgtgaggtttgtgattcacgcaagtctgcccaagtccgttgagggctactaccaggagtccggcagggcaggaagggacggggaaatctctcactgcctgctcttctacacgtatcatgacgtcacccggttaaagaggttgattatgatggaaaaagacggtaatcaccatacccgagaaacgcattttaataatctgtactccatggtgcactattgtgagaatattacagagtgtagaagaattcagctcctggcctattttggcgagaatggatttaatccagacttctgcaaaaagcatccagatgtgtcctgcgacaattgttgcaaaacgaaggactacaagactagagacgtaactgatgacgtgaaatccatagtccgcttcgtgcaggaacacagcagctcccagggcatgcggaacatcaaacacgtcggcccctccggacggtttactatgaatatgctggtggacatctttcttgggtctaagagcgcaaaaattcagtcagggatctttggcaagggttctgcgtattctcgccataatgccgaacgtctttttaaaaagctgatcctggacaaaatcctagatgaagatttgtacatcaatgccaacgaccaagctattgcatatgttatgctggggaataaggcccaaacagtattgaacgggaacctgaaggtagactttatggagactgagaattctagcagcgtcaagaagcagaaggccctggtcgcaaaagtctcacagcgcgaagagatggtgaaaaaatgtctcggtgaacttacagaagtttgcaaaagtctaggaaaagtttttggagtacactactttaatatttttaatacagtgacacttaagaagttagcggagagcctttctagcgaccccgaagtcttactgcagatcgatggagtcacagaagacaaactagagaagtacggcgctgaggtcatatccgtactgcaaaaatatagtgaatggacctcacctgcggaggatagtagcccagggatttccctaagttcctctcgaggcccgggtcgatctgccgccgaggaattggacgaagaaatacctgtgtcctcacattacttcgcgtcaaaaacgcggaatgagcgaaagcggaaaaaaatgcccgcttctcaacgttcaaagaggcgcaaaactgctagcagcggttctaaggcaaagggaggatccgctacttgcagaaagatctcctctaagactaagtcctccagcatcattggcagctcatccgcctcacacacttcacaggcaaccagcggcgccaactcaaaacttggaatcatggcacccccgaaaccaatcaatcgacctttccttaaaccctcctacgctttttcatag

SEQ ID NO: 14063 - DNA, 3144 bp, synthetic construct
  misc_feature 1..3144: note = Description of Artificial Sequence: Synthetic coding sequence
  source 1..3144: mol_type = other DNA
atgtccatgcaggaattaaatcctgaaacttccacggactgcgacgctcgccagatttcattgcagcagcagctcatccacgtgatggagcacatatgcaaactgatcgacactatacccgacgacaagctcaaactgctcgattgcggaaatgaactgttacaacagagaaacataagaaggaagcttctcacagaggtggactttaacaaaagcgacgcgtcgttgctgggctcactctggcggtatcgaccggacagcctagacggccctatggaaggggatagctgtccaacaggaaatagcatgaaagaactgaatttctctcacttgccgtccaatagcgtgtcacccggagactgcctgttaaccacaaccctgggcaagacgggatttagtgccacacgcaagaacctgttcgaacgtcccctgttcaatactcatctgcagaagtccttcgtgtcatccaactgggcggagactcctagactgggtaagaagaacgaatctagctacttccctggtaacgttcttacttcaacggcggtcaaggatcagaataaacataccgcgtccatcaatgatctagagcgggagacccagccttcctatgatattgataattttgatatcgacgattttgacgacgatgacgattgggaggatataatgcataacctcgctgcaagcaaatcctcgaccgccgcatatcagccaatcaaggaaggacgtccaataaagtctgtgtccgaaaggctgtcgagcgctaagactgactgcttgcccgtctcaagcaccgctcagaatattaacttctcagagtcaattcagaattacactgacaagagcgcacagaatttagcctcaaggaatttaaagcacgagagattccagagtttatcttttccacacacaaaagagatgatgaagatatttcacaagaaattcggcctgcataactttcggaccaatcaacttgaggccattaacgctgctttgcttggagaagattgcttcatcctcatgcccacaggaggagggaagtcattatgctaccagctccctgcatgcgtgtcccccggtgtcacagtcgtgattagtcctcttagatctcttattgtggatcaggtgcagaagctcacttcgctggacatccctgccacatacctcacaggagataagaccgattccgaggcaacaaacatttacctgcaattgtcaaagaaggaccctatcattaagctgttatacgtgactcccgagaaaatttgtgcctccaatcgccttatctccaccttggagaatctctatgaacgcaaactcctcgctcgctttgtgatcgacgaagctcattgcgtcagccagtggggtcacgactttagacaggattataagagaatgaacatgttgaggcaaaagtttccttccgtccccgtgatggcactcacggcgaccgccaaccccagggtccagaaagacattttaactcaactgaaaatcttgcgcccccaagtgttctccatgtcgttcaatagacacaacttaaaatactatgtcctgccaaaaaaacccaaaaaggtggccttcgattgtctagagtggattaggaaacatcatccttacgatagcggaatcatatactgcctgagtcgcagagagtgcgacacaatggcagataccttgcagaagtggattaaccaagacggctgtcaggttatctgtgccaccatcgcctttggcatgggcatcgacaagccagatgtgaggttcgtaatccatgccagcttgccaaaaagcgtcgaggggtattaccaggagtcgggccgagcgggacgtgatggagaaatatcccactgcctgttattctatacctaccacgatgtgacgcggctgaaacggctgataatgatggaaaaagatgggaatcaccatacgcgcgagacccacttcaacaacctgtattcaatggtacattattgtgaaaacataacagaatgccgcagaattcagctgctagcctacttcggggaaaacggctttaatccggatttctgcaaaaaacaccccgacgtttcctgcgataactgttgcaagacaaaggattacaagacccgcgatgtaaccgacgatgtgaagagtatcgtacggttcgttcaggagcacagcagtagccagggtatgaggaacatcaaacacgtgggacctagtggtcggttcactatgaatatgctggtcgatatattcctgggaagtaagagcgcaaagatccagagtggaatctttggaaaggggtccgcctactcccgacataatgccgagaggctgtttaaaaagctcatcctcgacaagatcttagatgaggacctgtatattaatgctaacgaccaggctattgcctatgtgatgctcgggaataaggctcagactgtcctcaacggaaatctcaaagtggacttcatggagactgagaactcttctagcgtgaagaaacagaaagccctggtagccaaagtttcacagcgagaagaaatggtgaagaaatgccttggagaactaaccgaggtgtgcaaaagcctgggcaaggtgtttggtgtgcactatttcaatatcttcaacactgttaccctcaagaagttagctgaatcactgtcttccgaccccgaagtactcctccagatcgacggtgttacggaagacaagctggagaagtatggagctgaggtgatttcagtgcttcagaagtattctgaatggactagccctgctgaagactcgagcccagggatcagtctgagcagctcaagaggccctggccggagtgcagccgaggaacttgatgaagagatccctgtcagttcccattacttcgctagcaaaacccgcaatgaaagaaaaaggaagaaaatgcctgcgagtcagagatccaaacgacggaaaaccgccagcagcggttctaaggctaagggcggatctgctacctgcagaaaaatttcatctaagaccaagtcttcttcgattattgggtcctcctcagctagtcacacatcccaggccacctccggcgccaatagtaaactgggaatcatggctccacctaaacctattaatagaccctttttaaaaccttcgtacgccttttcctag

SEQ ID NO: 14064 - DNA, 1560 bp, synthetic construct
  misc_feature 1..1560: note = Description of Artificial Sequence: Synthetic coding sequence
  source 1..1560: mol_type = other DNA
atgaatatgctgcgccagaagtttccatcagtacctgttatggcattgactgcaaccgccaacccccgggttcagaaagacatcctcacccagctgaaaatcctgcggccccaggttttcagcatgagctttaaccgtcacaacctgaagtactatgtgctgcccaaaaagcccaaaaaggtcgcattcgactgcctggaatggatcagaaaacaccacccatacgattccggcatcatctattgcctgagccggcgggagtgtgacaccatggctgatactcttcaaagagacggattggctgcactggcttaccatgccggtttgtccgactctgcccgggacgaggttcagcagaagtggattaatcaggacggttgtcaggtcatctgtgctaccatagccttcggaatggggattgacaagcctgacgttcggtttgtgattcatgcgagcctgccaaagtctgtcgaagggtactatcaagagagcggaagggctggaagggatggagagatttcccactgcctgctcttttatacttatcacgacgtgactcggctcaaacgtttgatcatgatggagaaggacggcaaccaccacacaagagaaactcattttaacaatctctattccatggttcattactgcgaaaatattacagagtgccggcgcattcagttgctcgcgtacttcggcgagaacggctttaacccagacttttgtaagaaacatcctgatgtttcgtgtgacaattgttgtaaaacaaaagactataagactagagatgtgaccgacgacgtgaagagcattgttaggtttgtgcaggagcatagcagctcccaaggcatgcgcaacatcaagcatgtgggtcctagcggacgcttcaccatgaatatgctcgtggatatttttctcggctcaaagtctgcaaagattcaatcagggatttttggaaaaggttctgcgtactctagacataatgccgaaaggctgttcaaaaaattgatcctcgataagattctggatgaggacctctacatcaatgccaatgaccaagcaatagcatacgtaatgctgggaaacaaggctcaaaccgtgctgaatggtaatctcaaagtggacttcatggaaaccgaaaacagctctagtgtgaaaaagcagaaggcactggtcgccaaggtgtcccaacgcgaagagatggtgaaaaagtgcttgggggaactgaccgaagtttgtaaatctctgggtaaagtgtttggtgtgcactatttcaatatttttaacacggtgaccttgaaaaaactcgctgaatctctgtcctctgatcccgaggttctactgcagattgatggtgtcaccgaggataagcttgaaaagtatggcgcggaagtaattagtgtgctgcagaagtacagtgagtggacaagccctgcggaggatagctctcctggaatcagcctgagcagctctcgtgggcccggcagaagtgccgccgaggaattggacgaagagatccccgtcagctcccattatttcgcgagcaagacgagaaactag

SEQ ID NO: 14065 - DNA, 981 bp, synthetic construct
  misc_feature 1..981: note = Description of Artificial Sequence: Synthetic coding sequence
  source 1..981: mol_type = other DNA
atgcaccgaaccacaaggatcaaaatcacagagctgaaccctcatctgatgtgtgtactgtgtggaggttacttcatcgatgcgacaacgattatcgagtgtctacactccttctgtaaaacgtgcattgttagataccttgaaacatcaaagtactgccctatctgcgatgtgcaagtgcacaagactagacctttattaaatattcggtctgacaaaaccctgcaggatatcgtgtacaaattggttcctgggctatttaagaatgaaatgaagaggcgccgggacttttacgccgcacatccatctgccgacgccgccaacggctcaaacgaggacaggggggaggtcgcagatgaggataaaagaataatcaccgatgacgagatcatcagccttagcattgagttcttcgaccaaaatcgactggatagaaaggtgaataaagataaagagaaatcaaaagaagaagtgaacgacaagcggtacctgcgctgccccgccgccatgactgtcatgcacctaagaaagttcctgcgatccaagatggatattcccaataccttccaaatcgacgtaatgtacgaggaagagcctctgaaggattactataccctgatggacatcgcatacatctacacctggagacgcaatggtcctttacccctcaagtatcgcgtgaggccaacctgtaaacggatgaagatttcccatcaaagggacggactaaccaacgctggtgaattggaatctgattccggaagcgacaaggccaactcaccagccggtggtattccctccacttccagctgcctgccctcccctagtacccccgtacagtccccacaccctcagttccctcatatcagctcgactatgaacggcacaagcaattccccatcgggtaatcatcagtcaagttttgccaaccgccctagaaaaagcagcgtcaatggctcctccgccacctcctctggatag

SEQ ID NO: 14066 - DNA, 717 bp, synthetic construct
  misc_feature 1..717: note = Description of Artificial Sequence: Synthetic coding sequence
  source 1..717: mol_type = other DNA
atgtgcgtcctgtgtggtggatactttattgacgccacaacaataattgaatgcctgcattccttttgcaagacctgcatcgtgagatatctggagacctcaaagtactgcccaatctgtgacgtccaggtccataaaacccggccactgttgaatattagactggatcggaaggtgaataaggataaggagaaatccaaagaggaagtaaacgacaagcgatacctacggtgtcctgcggccatgaccgtcatgcaccttagaaagttcctcaggtccaaaatggacattccaaacacttttcagattgatgtcatgtatgaagaagaaccattgaaagattattacacactgatggatattgcttacatctatacctggcggcgtaatggcccgctccctctgaaatacagggttaggcccacgtgcaagcgaatgaagatctcccaccagcgagacggcctgaccaacgccggagaattagagagtgatagtggttctgacaaggccaattcgccagccggcggcatacccagtacatctagctgtctgcccagccccagcaccccagtccagtctccacaccctcagtttccacacatttctagtactatgaacgggaccagcaattcaccttctggcaatcatcagtcctcgttcgccaaccgaccacgtaagtcttccgtcaacggaagttcggccaccagctccggctag

SEQ ID NO: 14067 - DNA, 318 bp, synthetic construct
  misc_feature 1..318: note = Description of Artificial Sequence: Synthetic coding sequence
  source 1..318: mol_type = other DNA
atgcaccggaccacccggattaagataaccgaactgaatcctcatctgatgtgtgtgctgtgcggcgggtacttcatagacgctactacaatcattgagtgcctccatagtttctgcaaaacatgcatcgtacgctatctcgaaacgtcaaaatactgcccgatctgcgatgtccaagtgcacaaaacacgccccctcctgaatatcagatccgacaagaccttgcaagacatagtgtataagcttgttccaggcttattcaagaatgagatgaagcggaggcgagacttttacgccgcccatccttccgccgactag

SEQ ID NO: 14068 - DNA, 624 bp, synthetic construct
  misc_feature 1..624: note = Description of Artificial Sequence: Synthetic coding sequence
  source 1..624: mol_type = other DNA
atgcacagaaccacaagaattaagatcacagagcttaatccgcaccttatgtgtgtgctgtgtggagggtactttattgacgccactacaattatcgagtgcctacattctttttgtaagacttgtatcgtgagatatctggaaacttcgaagtactgccccatctgtgatgttcaggtgcacaagactcggcccctcctgaacatccgatccgacaaaacactacaggatatcgtgtacaagctagtaccaggactgtttaagaacgagatgaagcgccggcgtgatttttacgccgcccacccctccgccgacgccgcaaacggcagcaacgaggaccgcggggaggttgctgatgaagacaagcgaattataactgacgatgagatcatctccctgtccatcgagttttttgaccagaaccgcctggacagaaaagtgaataaggataaggagaagtctaaggaggaagtaaacgataaacggtatcttaggtgccccgctgctatgacagttatgcacctgagaaagttcctaaggtcaaaaatggatatccctaacacctttcagatagacgtgatgtatgaggaagagccactgaaagactattacactctgatgtag

SEQ ID NO: 14069 - DNA, 453 bp, synthetic construct
  misc_feature 1..453: note = Description of Artificial Sequence: Synthetic coding sequence
  source 1..453: mol_type = other DNA
atgcataggaccacacgaattaaaatcacagaactaaacccccatctgatgtgtgttttatgcggcggatactttatcgacgcaacgacaattattgagtgccttcacagtttctgcaagacttgtattgtgcgctatctagaaacttccaaatactgtcccatctgtgacgtgcaggtgcacaagacaagaccacttctcaatatacggtcagacaaaaccctccaggacatcgtgtataagctggttccaggactgttcaagaacgagatgaaacgccggagagacttctatgccgcccacccgtctgccgacgcagctaacggttccaacgaggacaggggcgaggttgctgatgaagacaagagaataatcactgacgacgagatcatttccctcagcatcgaattctttgaccagaaccggttggacaggaaggtaaacaaagactag

SEQ ID NO: 14070 - DNA, 555 bp, synthetic construct
  misc_feature 1..555: note = Description of Artificial Sequence: Synthetic coding sequence
  source 1..555: mol_type = other DNA
tatttcatcgatgctactaccattattgagtgcctccattccttttgcaaaacctgtatcgtccgctatctggaaacctcgaaatactgccctatttgcgacgtacaggtgcacaagaccaggccgcttcttaacattcggttagataggaaggttaacaaggataaagaaaaatccaaggaggaggttaacgacaaaagatacctgaggtgccctgctgccatgacggtgatgcacctgcgaaagtttctcaggtccaaaatggatatcccaaatacatttcagatagatgtaatgtatgaagaggagcctctgaaggactactacacactgatggatatcgcctacatctacacatggcgacgtaacggccccctgcctctcaaatatagagtgcggccaacgtgtaagcgcatgaagatctcacaccagcgggacggcctcactaatgcaggcgagttggaatctgattcaggctctgacaaagcaaattctccagccggaggaatcccctcgactagtagttgcctccccagcccttccacccctgtttag

SEQ ID NO: 14071 - DNA, 279 bp, synthetic construct
  misc_feature 1..279: note = Description of Artificial Sequence: Synthetic coding sequence
  source 1..279: mol_type = other DNA
atgcataggaccactcgaattaagatcacagagctgaatcctcacttgatgtgtgtcctgtgtggcggatatttcatcgatgcgacaaccattatcgagtgcttgcattcattttgtaaaacctgcatagtccgctacctggaaacttcaaaatactgccccatttgcgacgtgcaagtgcacaagacccgaccactattgaacatccgatccgacaagactctccaggatatcgtatacaagttagttcctggtctgtttacagcgaacggatcttag

SEQ ID NO: 14072 - DNA, 2193 bp, synthetic construct
  misc_feature 1..2193: note = Description of Artificial Sequence: Synthetic coding sequence
  source 1..2193: mol_type = other DNA
atgcccggggtggccagactgccactcctgcttgggttgctgctgctccctcgacccgggcggcccctggatcttgcggactacacctacgacctcgccgaagaagacgattcagaacccttaaattataaagacccttgtaaggctgcagcttttctaggcgacatcgctcttgacgaagaggatcttcgcgcctttcaggttcagcaggcagtagatttgaggagacacacagcgcgaaaaagctccattaaagccgccgtgcccggcaatacttctacccccagctgccaaagtacaaatggccagccacagcggggcgcctgtgggcggtggcgggggaggagtcgaagccgaagggccgcaacctccaggcctgagcgggtatggccagatggcgtgattcctttcgttataggaggtaactttacaggcagccaacgtgccgtttttaggcaagccatgcggcactgggagaaacatacctgtgtcacgttcctcgaacgtaccgatgaagatagctacatcgtgtttacctacaggccttgcggctgttgttcgtatgtgggtcgcagaggaggggggcctcaggcaatttcaatcggtaagaactgtgacaagtttgggatcgtcgtccatgagttagggcacgtagtgggcttctggcatgaacatacccggcctgaccgggatagacatgtctccatagtccgggaaaacattcagccaggtcaagagtacaatttcttaaaaatggagccgcaagaggtagagagcctgggggaaacgtatgattttgattctattatgcactacgcccggaacactttttctagaggtatcttcttagacacaattgtgcccaagtatgaggtcaacggcgtcaagccacccatcggccagcggaccaggctctccaaaggcgacatcgcacaagctcgcaagttgtacaagtgccccgcttgcggagaaacactccaggactccaccggcaatttttcctctccagagtaccccaacggatacagtgcacatatgcattgtgtgtggcgcattagcgttacgccaggcgagaagattattctgaacttcacatctctggatttgtataggagtcggctgtgttggtacgattacgtggaggtccgcgatgggttctggagaaaggccccattgcgcggacgtttctgtggctccaagttaccagagcccatagtgagcacggatagccgactgtgggtggaatttaggagttccagcaactgggtcgggaaaggcttttttgccgtctatgaagccatttgcggaggggacgtgaaaaaggattatggacatatccagagccccaattaccctgacgactaccgccccagcaaagtgtgcatctggcgcatccaggtgtccgaggggtttcatgtcgggctgacattccagtccttcgaaattgaaaggcacgacagttgcgcctacgattatctcgaagtgcgggacgggcattccgagtccagcacacttatcggccggtactgcgggtatgagaagccggacgatattaagagcaccagttcccggctttggttgaaattcgtttctgatgggtcaattaacaaagccggatttgcggtcaacttcttcaaggaggtcgacgagtgtagtcgccccaatcgtggggggtgtgagcagcgctgcctgaacacccttggctcctacaagtgcagctgcgatcccggatacgagctggcacccgacaaaaggagatgtgaggctgcatgcggaggattcttaaccaagctgaacgggtctattacatctcccggctggcccaaagaatatccacccaataagaactgtatatggcagcttgtcgccccgactcagtatcgaattagtcttcagtttgatttctttgagaccgagggaaatgacgtctgtaagtatgacttcgtggaggttaggagcggcctgactgcagactctaagttgcatggaaagttctgcggaagtgagaagcctgaggtcattacttctcagtataataatatgcgggtagagttcaagtcagacaatacagtgtcaaagaaaggctttaaggcccactttttctccgaaaaacgtcccgcgcttcagcccccccgcggccgtccacaccaactcaaattccgcgtgcaaaagcgcaatcgcaccccacagtag

SEQ ID NO: 14073 - DNA, 2961 bp, synthetic construct
  misc_feature 1..2961: note = Description of Artificial Sequence: Synthetic coding sequence
  source 1..2961: mol_type = other DNA
atgccaggcgttgccagattacctcttctactcgggctgctgctgttgcctagacctggccgtccattggacctggctgactatacttatgacctggctgaggaggatgattccgagcccctgaactacaaggacccttgcaaagccgcagcttttctaggcgacatcgccctagacgaggaggatctgcgggcgtttcaggttcaacaggctgtagacttgagaaggcataccgcacgaaagtcttccataaaggcagcggtgccgggcaacacgtccaccccttcttgtcagtccactaatggccagccgcaacgtggagcttgtggtaggtggcgcggtcgcagtcggtctcgccgcgccgcaacttctcggccggaacgcgtgtggcccgacggggtgataccgtttgtgatcggaggtaactttacagggtcccaacgagccgtgtttcggcaggcaatgaggcattgggagaagcatacttgcgtaacctttctggaacgcaccgacgaagattcttatatcgtcttcacctacaggccctgtggatgctgctcatatgtgggcaggagaggcggagggccccaggcaattagtatcggaaagaattgtgacaaattcgggattgtggtacatgagcttggccatgtagtgggattttggcacgaacacaccaggcccgatcgggatcgacacgtgtcgatcgtacgggaaaacattcaaccaggtcaggaatacaacttcttgaagatggaaccgcaggaagtagaaagccttggggagacttacgacttcgactccatcatgcactacgcaagaaacaccttctctagaggaatcttcctggataccattgtccctaagtatgaggtcaatggcgtgaagcctcccattggtcagagaacccggctctccaaaggcgatatcgcccaggcccgcaaactgtacaaatgtccagcttgcggcgaaacgctgcaggattcaacaggcaatttcagctctccggaatatccaaatggatactctgcccacatgcactgcgtttggcgcattagtgtgacccctggtgaaaagataatcctgaactttacatctctagacctgtacagaagtagactgtgctggtacgactatgtcgaggttcgcgacggtttctggcggaaggcacccctaaggggccgtttctgtggttccaagctacctgaacctatcgtcagcaccgactccaggttgtgggtggaattccgtagcagtagcaattgggtggggaaaggattctttgccgtatatgaggccatttgcggcggggatgtcaagaaagactacggccacatccaatcccccaactatcccgacgactatcgcccctcaaaagtctgcatctggcgaattcaggtgagtgagggttttcacgtaggtctgacattccaatcatttgaaatcgagcgccacgacagttgtgcttatgactacctggaggtgcgggatggccactctgaaagctcaacgctgatcggccgctattgtggctacgaaaagccagacgacattaaatccaccagctctaggctgtggctgaaatttgtgagcgacggttcgattaataaagctggatttgctgtgaattttttcaaggaggtcgacgagtgctctagacctaacaggggcggctgtgagcagcgctgcctcaatactctggggagttataagtgctcatgtgaccccggatatgaactggcacccgacaagcgccgctgtgaagccgcgtgcggaggattcctgaccaaactgaacgggagtattacttctcctggctggccaaaagagtacccacctaacaagaactgcatctggcagctggtggcccctacgcagtacaggatatctctgcaattcgattttttcgagacagaggggaatgacgtatgcaagtacgacttcgttgaggtgcgttcaggcctgaccgcagattcgaaacttcacggcaaattttgtggaagtgaaaaacccgaggtgataactagccagtataacaatatgagagtagagtttaaatcagataatactgtgtctaaaaaaggcttcaaagcccattttttttctgacaaggatgaatgcagcaaggataacggaggctgtcagcaagattgcgtcaacactttcgggtcatatgaatgccagtgcagatccgggttcgtgctccacgacaacaaacatgattgcaaggaggccgggtgcgaccacaaagttaccagcaccagtggaaccattaccagtcccaactggcccgataaatacccttctaagaaggagtgcacatgggcaataagctctaccccggggcacagagtgaaactcacttttatggagatggacatcgagagccaaccggagtgcgcttacgatcatctggaagtcttcgacgggagggacgctaaggctcctgtgcttggtagattctgcggctctaagaagcctgagccagtactcgctaccgggtcgcggatgtttctgcgcttctactctgacaactcggtccagagaaaaggattccaggcgagccacgcaaccgaatgtggaggccaggtgcgcgctgatgtcaagacaaaggatctgtactcacacgcccaattcggggataacaattaccccggaggcgtagattgtgagtgggtgatcgtggctgaagaaggatacggggttgagctggtgttccaaaccttcgaagtagaagaggaaactgattgcggatacgactatatggagctttttgacggctacgattctactgcgcctagacttggccgctattgcggtagtgggcctccagaggaagtgtactctgctggggattctgtgctggtaaaattccacagcgatgacaccatcactaagaaaggtttccacttgagatacacatctaccaagttccaggacacacttcatagccggaagtag

SEQ ID NO: 14074 - DNA, 909 bp, synthetic construct
  misc_feature 1..909: note = Description of Artificial Sequence: Synthetic coding sequence
  source 1..909: mol_type = other DNA
atgccgggagtagcaaggctgccgcttctcctgggcctgctgctgctaccccgtcccggccggcccctggatctggcagactatacatatgatctagcagaagaagatgactctgaacctttgaattacaaagatccgtgcaaagccgccgcttttctgggcgatattgccttggacgaagaggacttgagggcctttcaagtccaacaggcagtcgatctcagacgccataccgcaaggaaatctagtatcaaggctgctgtgccaggtaacacgtccaccccctcatgtcaaagcaccaacggacaaccgcagaggggcgcttgcggtaggtggcgaggtcgctctaggtctagacgtgccgccaccagccggccagagcgggtgtggcctgacggtgtgatcccattcgtcatcggcggaaatttcacaggcagtcagcgtgcagtgtttaggcaggctatgaggcactgggaaaagcacacttgtgtcacttttctggaacggactgacgaagactcatatatagtatttacctaccggccctgcgggtgttgctcgtatgttggccggcgaggagggggcccacaggccattagcattggaaagaactgcgataaattcggaatagtggtccacgaactgggccacgtggtaggattctggcatgagcacacccggccggacagggaccgccatgtctctatcgtgcgggaaaacatacagccgggcgtcctccatagctcactcctccttctttcttgcgggtctagaaacggggcttcgtttccctgttcgctggaatccagtattcatcaggccctctgctggactgggcttttcttaaggccctcaccctttcccaggcttcctctggcagctcctcggacgctaagggcaggtgtgtag

SEQ ID NO: 14075 - DNA, 1869 bp, synthetic construct
  misc_feature 1..1869: note = Description of Artificial Sequence: Synthetic coding sequence
  source 1..1869: mol_type = other DNA
atgcctggtgtcgcccgcctaccacttttactggggctgttactgctgccacgcccaggtcggcctctggaccttgccgactatacctacgatcttgccgaggaggatgattctgagccactgaactataaggacccatgtaaagccgcagctttcctgggggacatcgccctggatgaggaggatttgcgcgcgtttcaggttcaacaggcggtggatctgagacgacacactgctcgtaaatccagtatcaaggccgcggtaccaggaaatacgagtacaccaagctgtcagtctaccaatggccagccgcagcgcggagcctgcggtcggtggaggggcaggtctaggtcacgccgggccgcaaccagccggccagaaagggtatggccagatggtgtgatcccattcgtgattgggggcaatttcactggctcacagagagctgtgttcagacaggctatgagacactgggaaaaacacacttgcgttacatttctggaacgcaccgatgaagattcttacatcgtgttcacctaccgcccgtgtggctgctgctcctatgttgggaggcgcggcggcggaccccaggccattagtataggcaagaattgtgacaagtttggtattgttgtacatgaacttggacacgtcgtgggattctggcacgagcacaccagacccgatcgagacaggcatgtcagtatcgtccgcgaaaacattcaaccagggcaggaatacaacttccttaagatggagcctcaggaagtggagtcactaggggaaacctatgacttcgatagtatcatgcactacgcccggaacacatttagtcgcgggatttttttggacactatcgtgcccaagtatgaggtgaacggcgtgaagcccccaattggccagcggacccggctgtctaagggagacatcgcccaggctcggaaactctacaagtgccccgcctgcggggaaaccctgcaggatagcaccggaaacttttcctcccctgagtaccccaacgggtatagcgctcacatgcattgtgtgtggagaatttctgtcacgcctggcgagaaaattatactgaactttacgtcactcgatctgtatcgatcgagattatgctggtatgactatgtggaggtgagagatggcttttggaggaaagcacccctgagggggaggttctgtggctctaagttgcccgagcctatcgtctcaactgacagccgcctgtgggtcgagttcaggagcagctcaaattgggtgggcaaagggttttttgctgtgtatgaggctatctgcggcggagacgtcaaaaaggactacggccacatccagtctcctaactatccggacgattataggccttccaaggtgtgcatttggaggatccaagtgtccgagggcttccatgtggggttgacttttcagtccttcgagatcgagaggcatgattcatgtgcttatgattatctggaggtgcgcgacggacattctgagagtagcacactgatcggacggtactgcggatacgagaagcctgatgacattaaaagcaccagctcccgactgtggctgaagttcgtgagcgatggatctattaacaaagctggcttcgcagtgaacttttttaaggaggtggacgagtgcagtcggcccaaccgcggcggttgtgaacagagatgcctgaacactctcggatcctataaatgtagctgcgacccaggatacgagctcgccccagataaacgccgctgtgagggatgctatgaccttcaggtaggcaaacctctattatgggatcgacactgttttagactctctacgcacggtcccgagatgctgggaactgcactccgcggatag

SEQ ID NO: 14076 - DNA, 2472 bp, synthetic construct
  misc_feature 1..2472: note = Description of Artificial Sequence: Synthetic coding sequence
  source 1..2472: mol_type = other DNA
atgcctggagtggcaaggctgcccctgcttttggggctacttctgctgccaagacccggtagaccgctggacctcgctgactacacttacgacctggctgaagaagacgattcagagcccctcaactataaagacccttgcaaggccgccgcctttcttggagatatagccctcgatgaggaggacctgcgggcgtttcaggtacaacaagcagttgacctccgaagacacaccgctcgcaaatcgtctatcaaagccgcagtgcccggtaatacttctactcccagctgccagtcaactaatggacaacctcaacgtggggcatgtggtaggtggaggggacgctcgaggagtagaagagccgccaccagcaggccagagagagtttggcccgatggagtcatcccattcgtgatcggtgggaatttcactggttcccaaagagcagtgtttcgccaagccatgagacattgggagaaacatacctgtgtgacttttctggaaaggacagatgaggattcttacatcgtgttcacataccgcccctgcggatgttgttcctatgtggggaggcggggaggcgggcctcaagcgatcagcatcgggaagaattgtgacaaatttggaatcgtggtgcacgagctgggccacgtagtaggcttctggcacgaacatacacgtcctgatcgagatcgccacgtatccattgtgcgggagaatatccagcccggtcaagagtacaattttttaaaaatggagccccaggaggttgagtctcttggggagacttacgatttcgatagtatcatgcattacgctaggaacactttctcccggggtatctttctggatacaattgttcctaaatacgaagtgaacggagtgaagccccccatcggacagcggacccggttgtccaagggagatatcgcccaggcaaggaaactgtataaatgcccagcgtgtggcgaaactttacaggatagcactggcaacttctcaagcccagagtaccctaacggatactctgcacatatgcactgcgtgtggaggattagcgtcacaccaggggagaaaatcatcctaaacttcacatctctggacttgtatcggtcaaggctgtgttggtacgactacgtggaagtccgtgacggtttctggagaaaagctcccctgagagggaggttttgtggctccaagttgccagaacctatcgtctccacagattctcgattatgggtggaatttagatcctcatctaactgggtaggtaaggggttcttcgcagtctacgaggccatctgcgggggtgacgtgaaaaaggattacggccacattcagtctcccaattaccctgatgactaccggccttctaaagtttgcatctggagaatccaagtctcggaagggttccacgtagggctgactttccagagtttcgagatcgagcggcacgactcctgtgcctacgattacctggaagtgagggatgggcattcggaaagcagtaccctgatcggcagatattgtggatacgagaagcccgatgatataaaaagcacttcatcccgattatggctgaagttcgtctcggacggtagcataaataaggctgggttcgcagtgaatttctttaaggaagtagacgagtgttcacgtcccaatcggggcgggtgcgagcagaggtgcctgaacacccttgggagctataagtgttcttgtgaccccggctacgaactagcccctgacaaacgcagatgcgaagcggcctgtggggggtttctgactaagctcaacggcagcataacgagtccaggctggccgaaagagtaccctcctaacaagaactgtatttggcagctcgtagcacccacccagtatcgtatttcactgcagttcgatttcttcgagacagaaggaaatgatgtgtgtaaatacgattttgtggaggtacgaagcggtctgaccgctgacagcaaacttcacggtaagttttgcggatcagagaaaccagaagttattacctcgcagtacaataatatgcgagtagagtttaaatctgacaacaccgtgagcaaaaagggcttcaaggcgcatttcttctcagtcctcgagggagccggcgatcggcattcacacctgtcaggcctggagctgttgctctgcccccacgccctagtggacaccgtcccagcaccgccctcagccctgcacggcgacacacacgcccacacccacacccacgtgcatacccactgtcccatcgctcaagaaacatgtcgcgggcccccactgggagcctcacggctgagtcctcaaggccccggacacctgactctcgccccacaggaaggcagttaccttgacttttgggacacacacaggggcgatcctaagccaaggcgtaggcgcaagagtttgaaaactttttcgttgacacccgctacttttcgtggaatatgggcactatag

SEQ ID NO: 14077 - DNA, 2193 bp, synthetic construct
  misc_feature 1..2193: note = Description of Artificial Sequence: Synthetic coding sequence
  source 1..2193: mol_type = other DNA
atgcccggcgtcgcgcgcctgccactgctgctggggctgctgcttttgccaagacctggacgacctctggatctggcagattatacttatgacctcgctgaagaggatgattcagagcccctcaactataaggatccctgtaaggctgctgcattcctgggcgatatcgccctggatgaggaagatctgagagcattccaggtacaacaggcagtggaccttcgccgacatactgccagaaagtcgagtattaaagctgctgtgccaggtaatacttctaccccttcatgccagtcgacaaatgggcaaccacaaaggggagcttgcggtcgatggagggggcgctccaggtcccgaagagcagctacttcacggccggagcgggtctggcctgatggtgtgattcctttcgtaataggcgggaattttactggctcacagcgcgcagtgttccggcaggcaatgaggcattgggaaaaacacacctgcgtaacatttctcgagagaactgatgaggacagttatattgtcttcacctaccggccttgtgggtgctgttcatacgtggggaggcgaggtgggggtccccaggccatttctataggcaagaactgcgataagttcggaatagtagtacatgagctgggtcatgtggtaggattctggcatgagcacacaaggccagaccgtgatagacatgtctccatcgtgagggaaaatatacagcctggtcaggagtacaattttcttaagatggagccacaagaggtggaaagcctcggggagacctacgactttgattcaatcatgcactacgcccgcaataccttctctagggggatttttttggacaccatagtacccaaatatgaagtaaatggcgtgaagccgccgatcggccagaggaccaggttaagcaaaggcgacattgctcaggcgaggaagctgtacaagtgcccagcctgtggcgagacactgcaagattctactggaaacttttcctcacccgagtaccctaatgggtatagcgcccatatgcactgtgtgtggagaatttcggtgactcctggcgaaaagatcatccttaacttcacctctctggacctgtatagaagtcgactatgctggtatgactacgttgaggtgcgtgacggattctggcggaaggccccactgaggggaaggttttgtgggagtaagctgcctgagcccatcgtctctactgattcccgtctctgggtcgaatttaggtctagcagcaactgggtcggcaagggcttcttcgccgtttatgaggccatatgcggaggggacgttaagaaggactacggacatatccaaagccctaattacccagacgactatagaccgtccaaggtctgtatctggcgaattcaagttagcgagggtttccatgtgggactcactttccagtctttcgagattgaaagacatgacagttgtgcatatgactacctggaggtgcgggatggacattccgagagctcaactttaatcggacgttattgcggctacgagaagcctgacgacattaagtccacatcaagccggctgtggctcaaatttgtcagtgatggctctataaacaaggcagggtttgcagtgaacttttttaaggaagtggatgaatgctcaagacctaacagaggcggctgtgagcaaagatgcctcaataccctgggatcctacaaatgctcttgtgatcctggatatgagctcgccccagacaaacgcaggtgtgaggctgcctgcggagggtttctaaccaagctaaacggatctataaccagtcccggatggcccaaggagtatccacccaataaaaattgtatatggcaattggtcgcgcccacacaatataggatctcacttcagttcgacttctttgagacagagggcaacgatgtgtgcaagtatgactttgtagaagtgaggtcagggttgacggccgacagcaagctgcacggcaagttctgtggctctgaaaaacctgaggtgataacatcacagtacaacaacatgagggtggagttcaagagtgataatacggtatcgaagaaagggtttaaggcccactttttttctgaaaagaggcctgccctgcagccccctcggggaagaccccatcagttgaagtttcgcgttcagaagagaaatagaaccccacagtag

SEQ ID NO: 14078 - DNA, 1509 bp, synthetic construct
  misc_feature 1..1509: note = Description of Artificial Sequence: Synthetic coding sequence
  source 1..1509: mol_type = other DNA
atgctgctgagaagcgctggcaagctgaacgtgggcactaaaaaggaagacggtgagagtaccgcaccaacaccccggccaaaggtgttgcgatgtaaatgccatcatcattgccctgaggatagtgtgaataatatctgcagcacagatgggtactgctttaccatgatcgaggaggatgatagcggcctcccggtggtgacttcaggctgtctggggctagaaggttcagactttcagtgtagagacacgccaatcccccatcaacgacgctccattgaatgttgcaccgagaggaacgagtgtaataaggatttgcacccgactcttccacctctgaagaatcgcgatttcgtggatgggcctatccatcatcgtgccctgctcatcagcgttaccgtgtgcagcctcctgctggtgttgatcatactcttttgctattttagatataagagacaggagacccggcctcggtacagcataggattagagcaagacgagacatatattcccccaggagaatctctcagggacctgattgagcaatcacaatcttccggctctggaagcggactgccactgttggttcaacgcaccatcgccaagcagattcagatggtcaagcagatcggcaaagggcgctacggcgaggtctggatgggcaagtggagaggggagaaggtagcagttaaagtgttcttcacgactgaagaagcctcctggttcagggagactgagatctatcagacagtcttgatgaggcacgagaatatacttgggttcatcgccgcggacataaaaggcacaggatcctggacacagctgtatctgattaccgactatcacgagaacggcagtctgtatgactacctgaaaagcaccaccctggacgcgaagtccatgttgaagctagcatacagctctgtgtctggcttgtgtcatctgcatactgaaatattttctacccagggaaagccggcaatcgctcatcgagatctcaaaagcaagaatatactggtcaaaaagaatggaacctgttgcattgctgacctgggactcgctgtgaagttcatttccgatacaaacgaagtggacattccccccaataccagggtcggaacaaagaggtatatgcctccggaggtgctggatgagtcactgaataggaatcattttcagtcttacataatggctgacatgtattcatttggcctcatcctgtgggaagtcgcaagaaggtgtgtgagtggaggcatcgtcgaagagtaccagctgccttaccatgatctcgtgccttccgacccaagctatgaagatatgagagagattgtatgcattaagaagctgagaccatctttccctaatagatggtcttcagatgagtgcctgcggcagatgggcaagctgatgaccgaatgctgggctcataaccctgcctcccgtctgactgcactcagggtcaagaagactctggctaaaatgagtgagtcccaggatattaagttgtag

SEQ ID NO: 14079 - DNA, 1509 bp, synthetic construct
  misc_feature 1..1509: note = Description of Artificial Sequence: Synthetic coding sequence
  source 1..1509: mol_type = other DNA
atgttacttcgctccgcagggaagcttaatgtcggcacaaagaaggaggacggagagagcaccgctcctacaccaaggccaaaggtgctgaggtgcaaatgccatcatcactgtcccgaagacagtgtcaataacatctgctcaacggatggatattgttttactatgatcgaagaggacgatagcgggctgccagttgtaacttccgggtgcctaggcttggaggggtcggacttccagtgtagagacacccccatcccccatcagcgaagaagcattgaatgctgtactgagcggaacgagtgtaacaaagaccttcatccaacacttcccccactgaaaaaccgtgacttcgtcgacgggcccatacatcatagagctctcttaatttcagtaaccgtttgcagcctgctgctggtgctcatcattctattctgctacttccgatacaagcgccaagaaacacggccccgttactcaattgggctggaacaggatgaaacgtatataccgccgggcgaaagtttacgtgaccttatcgagcagtcccagagtagtggctcaggttctgggttgccacttctggttcagagaacgattgcgaagcagatacagatggttaaacagattgggaaggggagatatggcgaggtgtggatgggtaaatggcggggggagaaagtggctgtcaaagtgtttttcaccaccgaagaagcgtcatggtttagggaaacggagatttatcagactgtgttgatgcgccacgagaacattctcgggtttattgccgcagacatcaaaggcacgggaagctggacccagttatacctgatcacagattaccacgagaatggatccctctatgactatctgaaatcgacaactctggacgcgaaaagtatgctgaagttggcctactctagtgtatctggcctgtgtcatctgcacaccgaaatcttctcaacccaaggcaagccagccatcgcccacagggacctcaagtcaaagaatatcttggtcaagaagaatgggacatgttgcattgctgaccttggcctggccgtcaagttcatcagtgacaccaacgaggtggatattccacccaacactagggtgggaacaaagcggtacatgccccccgaggtgctagatgagtctttaaatagaaaccactttcagtcatacattatggccgatatgtatagctttggcctaattctctgggaggtggcccgcagatgtgtctcaggcgggattgtggaggagtaccagctgccataccatgatctcgtgcccagtgaccctagctatgaagacatgagggagattgtgtgtatcaagaaactgaggccctcgttccctaacagatggtcatccgacgaatgcctcaggcagatgggaaaacttatgacagagtgctgggcacacaatcctgctagccgtctcaccgctctccgagttaaaaaaacactggccaagatgtctgagtcacaggacatcaaactgtag

SEQ ID NO: 14080 - DNA, 1599 bp, synthetic construct
  misc_feature 1..1599: note = Description of Artificial Sequence: Synthetic coding sequence
  source 1..1599: mol_type = other DNA
atgggctggctggaggagcttaactggcagttgcacattttcctgctcatacttctgtccatgcatacaagggcaaatttcctggacaatatgctgttgcgaagcgccggtaaactgaatgtgggcacaaagaaggaggatggggaatccacagcgccgacacctcgccctaaagtgctgcggtgcaagtgccatcaccattgcccggaggacagcgttaacaacatatgcagcaccgatggctattgctttacaatgatagaggaggacgactccgggttgccagttgtcacgtccggatgtctggggttggaagggtccgactttcaatgtcgtgataccccaatcccccaccagagaaggtcaatcgaatgctgcaccgagcgtaatgagtgcaataaagatctgcaccctactttaccgcccctcaaaaacagagactttgtggacggcccgattcaccatcgggccctgctcatctccgttacggtgtgctctctgctgcttgtgctcatcatcctgttctgctatttccgttataagcgacaggagacccgccctcggtattcgatagggctagagcaggatgagacctatattccacccggggagtctctccgggacctgatcgaacagagccagtcctccgggagcggctctggactcccgctgctggtgcagagaactattgccaagcagatccagatggtcaaacagatcgggaaggggcggtatggtgaggtgtggatgggcaagtggcgaggagaaaaagtggcggtgaaggtattttttactaccgaggaggcaagttggtttagggaaactgagatctaccagactgtactgatgcggcatgaaaatatcctgggtttcatagccgctgacattaagggcaccgggagctggacacagctttatctcatcactgactaccacgaaaatggcagtctgtatgattatttaaagtccacaactctggatgctaagagcatgctgaaactagcctatagttcagtgagcggtctgtgccacctccacacggagatttttagtacacagggcaagcctgcaatcgctcatcgggatctgaagtctaaaaatatactggtcaaaaaaaacgggacgtgctgcatcgccgatctcggcctggcagtaaaatttattagtgacaccaatgaagtcgacattcccccaaacactagagttggaactaaacgttacatgccacccgaggtgcttgacgaaagtctgaatcgaaatcattttcaaagctacatcatggccgacatgtactctttcggccttatcctgtgggaggtcgcaagaaggtgcgtgtctgggggaattgtggaggagtaccagctgccgtatcacgatctcgtccctagcgatccttcctatgaagatatgcgtgaaatcgtctgtattaagaagctccgtccctctttccctaatcggtggtcaagcgatgagtgcctgcggcagatgggtaagctcatgacagaatgttgggcacacaatcctgcctcccgcctgacagcacttcgggtgaagaagactttagccaaaatgagcgagtcccaagacatcaagctgtag

SEQ ID NO: 14081 - DNA, 345 bp, synthetic construct
  misc_feature 1..345: note = Description of Artificial Sequence: Synthetic coding sequence
  source 1..345: mol_type = other DNA
atgctgctcaggtccgcagggaagcttaacgtgggaactaaaaaagaggacggagaatccacagcccccacccctcgccctaaggtgctgcggtgcaagtgtcatcatcactgccctgaggactcagtgaacaacatttgttctaccgatggctactgctttacaatgatagaggaggacgacagtggactgccggtagtgacgagtggatgtcttggtctcgaagggtcggacttccagtgccgcgtgcggacacttccctttctgattaaagaggatcaactaaatgcggcacagaagggaactaacgtgatcaaaacttatacactacactgcctccactag

SEQ ID NO: 14082 - DNA, 378 bp, synthetic construct
  misc_feature 1..378: note = Description of Artificial Sequence: Synthetic coding sequence
  source 1..378: mol_type = other DNA
atgttactgcgttctgcaggaaaactgaacgtgggcactaagaaggaggacggggaatctaccgcccccactcctcgccccaaagttctgaggtgcaaatgccaccatcattgcccagaggactctgttaataacatttgtagtacagatggctactgttttacaatgatcgaggaggacgacagtgggcttcctgtggtgacatcaggctgtctcggtctggaaggcagcgattttcagtgccgcgacaccccaataccccaccagaggcggtctatagagtgttgtacagaacggaacgagtgcaacaaggaccttcacccaacactccctccgcttaaaaaccgcgacttcgtggatgggcccatccaccactag

SEQ ID NO: 14083 - DNA, 1509 bp, synthetic construct
  misc_feature 1..1509: note = Description of Artificial Sequence: Synthetic coding sequence
  source 1..1509: mol_type = other DNA
atgctcctcagaagcgcgggcaaactgaacgtgggcaccaagaaagaggatggggaaagtactgctcctacccccaggccgaaggttttgcgttgcaaatgccaccaccactgccccgaggacagcgtgaataacatctgcagcacggatgggtactgcttcaccatgatcgaagaggacgatagcggcctgcctgtggtgacgagcggatgtctcggcctggaaggatccgactttcagtgcagagatacacctattccacaccagaggagaagcatcgagtgctgtacagaacgcaatgagtgcaataaggacttgcatcctactctcccaccccttaagaatagggacttcgttgacggccccatacaccatcgcgccctcctcatttctgtcaccgtctgctctctgttgttggtgctgatcatactcttctgctatttccggtacaaaaggcaggagacccggccaaggtattccattggcctcgaacaggacgagacatatattccccctggcgaaagcctgcgagatctaatagaacagtctcaaagctccggcagtggctctgggctgcccctccttgttcagagaaccattgcgaagcagattcaaatggtaaaacagatcgggaagggaagatacggagaagtgtggatgggaaaatggaggggagagaaggtagccgtgaaggtgtttttcacaacggaggaagcctcttggtttcgtgagacggaaatataccagactgtactgatgagacacgagaatattttgggcttcatagcagccgatatcaagggcacaggatcatggacccagctgtacttgattactgattatcacgaaaacggatcattgtacgattacttgaagtcaacgacacttgacgcgaagtccatgttaaagctcgcctatagcagcgttagcggcctgtgccacctacacacagagatattttcaacccagggaaaacctgctatcgctcaccgtgatcttaagtctaaaaacatccttgtgaaaaagaacggaacctgctgtattgccgacctgggcctggcagtgaagttcatttccgacacgaacgaggtggacatcccccctaatacaagggtggggacgaagcgctacatgcctcctgaggtcctggacgagtcgctcaatcggaatcacttccaatcatatatcatggccgacatgtactcctttggacttattctctgggaggtggctcgaagatgtgtgagcggaggcatcgtcgaggaatatcagctcccctatcacgatttagtgcctagtgacccctcctatgaggacatgcgagagatcgtatgtatcaagaaacttagaccatcattccccaacagatggagcagcgatgagtgtctgcgacagatgggaaagttaatgaccgagtgctgggcccacaaccctgctagcaggcttactgcacttcgggtgaagaaaacactggccaaaatgtctgagtctcaggatattaaattgtag

SEQ ID NO: 14084 - DNA, 1509 bp, synthetic construct
  misc_feature 1..1509: note = Description of Artificial Sequence: Synthetic coding sequence
  source 1..1509: mol_type = other DNA
atgctgctcaggagtgctggtaagctgaatgtcgggaccaagaaggaggacggagagtccaccgcacccacccctcggcctaaggtcctccggtgcaagtgtcatcatcactgccccgaagactccgtaaacaatatctgcagtaccgatgggtattgtttcacaatgattgaggaagatgatagcggtttacccgtagtgacatctggttgtttggggctggagggctctgattttcagtgtagagatacgccaatccctcatcagcgacgctctatcgaatgttgtaccgagcggaacgagtgtaataaggaccttcatccaacacttccaccactcaagaaccgcgactttgtggacggacccattcaccatagggcccttcttatctccgtcactgtttgctcactgctcctggtgttgataatcctgttctgttacttcaggtacaagcgacaggaaacccgcccgcgatattccattggcctggagcaggacgagacatatatcccccctggcgaaagcctcagggatttgattgagcagtcccaatctagtgggtccggcagtggcctgcccctgctcgtccagaggacgattgcaaagcagatccagatggtgaagcagattggcaagggccggtacggagaagtctggatggggaagtggaggggggagaaagtcgccgtcaaagtgttcttcaccacggaagaggccagttggtttcgcgaaacagaaatctaccagacagtactgatgcgacacgaaaatatattaggcttcatagccgccgatattaaaggcaccggctcatggacccagctgtacttaattaccgactaccatgagaacggtagcctgtacgattatctgaagtcgaccaccttggatgcaaaatccatgttgaaattagcctattcctcggtctctgggctgtgccacctccacaccgagattttctctacacagggaaagcctgccatcgcgcatagagacctaaaaagtaagaatatcctggtgaaaaaaaacggaacttgctgtatagcggacctgggattggcagtaaagtttatctctgatactaacgaagttgacatcccaccaaatacccgcgtcggcaccaaaagatacatgccacccgaggtgctcgacgaatccctcaaccgcaaccacttccagagctacataatggcagatatgtactcttttggtctaattctctgggaggtggcccgcagatgcgtgtctggcggcatcgtagaggaataccagctaccttatcatgacttagtgccttcagacccttcttacgaagatatgagagagatagtttgcatcaagaaattacggccgtcatttccgaaccggtggagctccgatgaatgtctccgacagatgggcaaacttatgaccgagtgttgggcgcacaatcccgcctcaaggctcacagccctacgcgtcaagaaaacactcgcaaagatgagcgaatcgcaggacataaaactgtag

SEQ ID NO: 14085 - DNA, 1509 bp, synthetic construct
  misc_feature 1..1509: note = Description of Artificial Sequence: Synthetic coding sequence
  source 1..1509: mol_type = other DNA
atgctgttgcgctctgccgggaagctaaacgtcggaactaaaaaggaggacggcgaatctactgcacctactccacggcctaaagtattacggtgcaagtgtcaccaccactgcccggaagacagcgtgaacaatatttgctctacagacgggtactgttttacaatgattgaggaagacgacagcggccttcctgttgtgacatcgggttgcctcggactcgagggatcagattttcagtgccgcgacactcctatccctcaccagaggagaagcattgagtgttgcaccgagcggaacgaatgcaataaggacctacatccaacgctaccccccctcaagaacagggatttcgtagatggtcctatccaccatagagctttactgatctccgttacagtttgctcccttctattggtgctcatcatactgttttgctactttcggtataagcgccaggagacaagacccagatactcgattggcctagaacaggatgaaacatacataccaccgggcgaatcacttagagatctgattgaacagagccagtcaagcgggagtggtagcggattgcctttacttgtgcagcggacgatagccaagcagatccagatggtgaaacagatcggaaagggacgttatggtgaagtatggatgggtaagtggagaggtgagaaggtagctgttaaggtgttcttcaccactgaggaggccagttggtttagagagaccgaaatttaccaaaccgtgctgatgagacatgagaacatcttaggttttattgccgcagacataaaagggacagggtcttggactcagttgtatctgattacagattatcatgagaatggatcactgtatgactacctgaagagcacaaccctggatgccaaatctatgctcaaactggcctactcatccgtgtccggcttgtgtcacctgcataccgagatattcagcacgcagggcaaaccagctattgcgcaccgtgacttaaaaagcaagaatatactggttaagaagaatggcacgtgctgtattgctgatttgggcttagcagtgaagttcatttctgacacaaatgaggtcgacatcccccctaatactagggtggggaccaagcggtatatgccccctgaggttctggatgaatctcttaatcgcaatcacttccagtcttacattatggcggatatgtattcattcggcttgattctgtgggaagttgcgaggaggtgtgtgagcgggggaatcgtcgaggagtatcagctcccataccacgaccttgtgccgagcgatcccagctatgaggacatgcgggagatcgtctgcattaaaaagctgagaccctcctttcctaaccggtggtcctcggatgagtgtcttcggcagatggggaaactgatgactgagtgctgggcccataaccctgcaagtcgccttacagcactgcgggtaaagaaaactctcgccaaaatgtctgagtctcaggacattaaactgtag

SEQ ID NO: 14086 - DNA, 4755 bp, synthetic construct
  misc_feature 1..4755: note = Description of Artificial Sequence: Synthetic coding sequence
  source 1..4755: mol_type = other DNA
atgcggggccaggctgccgctccagggcccgtgtggattctcgctccccttctccttctactgctgctcctaggcagaagagcacgtgccgcagccggggctgacgcaggacccggccccgaaccctgtgccacattagttcagggtaaattttttggatacttttctgccgcagccgtgttccctgcaaatgcctcacggtgttcctggaccctgcgcaaccctgacccacgacggtataccctctacatgaaagtggcaaaggctcccgtgccgtgttcagggccagggagggttcgaacttatcaatttgatagctttctagaatctacacgtacatacctgggcgttgagtcattcgatgaggtgctgagactatgtgatccttccgccccactagctttcctgcaggcgagcaagcagtttttacaaatgcgccggcagcagccgccccagcacgatggactcaggccaagggctgggccacccgggcctactgatgatttcagtgtggagtacttagtcgtgggaaatcgaaatccctctagggcagcatgtcaaatgctctgtaggtggctcgacgcttgtcttgctggctcccgttcctcccatccttgcgggatcatgcagacaccctgcgcatgtcttggcggcgaggctggcggccccgctgccggacctctggcacctcggggggacgtctgcctccgcgacgccgtggccggaggtcccgaaaattgcctgactagcttaacccaagaccgcggcgggcatggagccaccggcggatggaagctttggagtctgtggggggaatgcaccagggattgcggcggtgggctgcagacaaggacaaggacatgcctgcccgctccaggcgtggaaggcggtgggtgcgagggtgtcttagaagaaggacgccaatgcaaccgggaagcatgtggtccggccggtaggaccagttcccgaagtcagtcactcagatcaacagatgctagacgaagagaggagctgggagacgagctacaacagtttggatttccagcaccccagacaggggacccggccgcggaagaatggtcgccttggagcgtgtgctcatccacttgcggcgagggctggcagactcggacccgtttctgcgtttcctcttcctactcaacacaatgttccgggcccctccgcgaacagaggctgtgcaataatagcgcagtctgtcctgtccatggggcgtgggacgagtggagcccgtggtccctctgttcatctacatgtggcagaggcttcagagataggacaagaacatgccgaccacctcagttcggtggtaacccttgcgaagggcctgagaagcagacaaaattttgtaacattgcattgtgtccaggcagagccgtggacggtaattggaatgagtggtcttcctggagtgcctgctcagcttcttgtagtcagggacgacagcagaggaccagggaatgcaacggcccatcttacggtggggcggagtgtcagggtcattgggtggagactagggattgtttcctgcagcagtgccccgtggacgggaagtggcaggcctgggcctcctggggcagctgtagcgtgacatgcggagctgggtctcaacggagggaaagagtgtgttccggcccctttttcggtggagccgcctgtcagggaccccaggatgaatatcgtcagtgcgggactcagagatgtccagaaccgcacgagatctgtgatgaggacaatttcggcgctgtcatttggaaggagacacctgcaggagaggtggctgcggtgcgttgccccagaaatgccaccggtctgatcttgagaagatgcgaattagatgaggaagggattgcttactgggagccaccaacttacattaggtgtgtttctatcgactaccggaacattcaaatgatgaccagagagcatctggctaaagcacagcggggcttacccggagaaggggtttctgaggtgattcagacgctcgttgagattagccaggacggcacatcatactcaggcgacctcctttctaccatcgatgtactgcgtaacatgacagaaatcttcaggagggcctactactctcctactcctggagatgtgcagaactttgttcagatactgagcaatctgttagctgaggagaacagagacaaatgggaggaggcccagttagccggccccaatgccaaggagctctttcggctcgtggaagacttcgtcgacgtgataggtttcagaatgaaagatctccgggatgcatatcaggtaacggataacctggtcctctctatccataaactgcccgcgtctggcgccacagatatatctttcccaatgaagggttggagggccactggtgactgggccaaagtcccagaggatcgcgtgaccgtgagcaaaagcgtgttcagcactgggctgactgaggccgatgaggcttccgtgttcgttgtcggcacagtgctgtacaggaacctagggtccttcctcgcgctgcagcgtaatactacggtgctgaactctaaagtgattagtgtcactgtaaagcctcccccgcggtcattacgaacccctctggagatcgagtttgctcatatgtataatggcaccacaaaccagacctgcattttatgggatgaaactgacgtgccctccagtagcgctccaccccagctagggccatggtcatggaggggctgtcgtacagttcctcttgatgccctgagaacaaggtgtctgtgtgaccgcctgagcacattcgcgatcctggcccaactgtcagccgatgccaacatggagaaagctaccctgccatcagtcactctcatcgttggttgtggcgttagcagtctgaccctgctgatgcttgtgatcatatatgttagtgtttggcgatatattagaagcgaacgatctgttatccttatcaatttctgcctttccattatctcaagtaatgcactgattctgattggccaaacacagactcggaacaaggtggtgtgtacactggttgctgcattccttcactttttctttctctcgtctttctgctgggtactcacagaggcttggcagtcatacatggcagtgaccgggcatctgagaaacagactcatccggaaaagattcctctgtctggggtgggggctgccagcgctcgttgttgcaattagtgtggggtttacaaaagctaaggggtactccacaatgaactactgttggctgtctctcgaaggtggattgctatatgcatttgtaggtccggcagctgcagtggtcctagtgaatatggtgatcggtatcctggtgtttaacaagctggttagcaaagacggaatcacagacaagaaattaaaggaaagggctggagcttccctgtggagctcgtgcgtcgtgcttcccctgctggctcttacgtggatgtcggctgttctagctgtcacagacagacgttccgccctgtttcagattttgtttgccgtctttgattctctggagggtttcgtgatcgtgatggtccactgcattctccgacgcgaagtgcaagatgccgtgaaatgccgcgtggtcgacaggcaggaagaggggaacggcgacagcgggggttccttccagaacggccacgcgcaactcatgacagacttcgaaaaggatgtcgacctggcatgccgcagtgttctcaataaagatatcgcggcctgccgcacagccactatcacagggaccttaaaaaggccaagcttgcctgaagaggaaaagctgaaactagcacatgctaagggaccacctaccaattttaattctctgcctgccaatgtgtccaaacttcacctgcatgggtcacctcgttatccaggcggtcctctgcctgacttccctaaccattctctgaccttaaagcgcgataaggcacccaagagttccttcgtcggggacggcgatattttcaagaagctggattctgagctgtctcgtgcacaggagaaagccctggatactagctacgtcatccttccaaccgccacagctaccctgcggccaaagcccaaagaagagcccaaatattccattcacatcgaccagatgccgcagacccggctgatccacctttccacggcccctgaagcttctttgcctgctcggagccccccctcccgccagccaccatccggagggccaccagaggcccctccggcccagccaccccccccccccccaccaccgccaccaccaccccagcagccacttccgccacctccaaacctagagcccgcacccccatccctgggcgacccaggggaaccagctgcacacccaggcccctccacaggccccagtaccaaaaacgaaaatgtcgccacgctctcagtgagctcgctcgagcgcagaaagtcccgatacgccgagctggatttcgagaagattatgcacacgcgcaaaaggcatcaggatatgttccaggacctcaatcgtaaactccagcacgccgcagagaaggataaagaagttcttgggcctgatagtaagccggagaaacagcagacccctaataaaaggccctgggagtctttacggaaagcgcatggcactcctacctgggtgaagaaagagctggaaccactgcaaccttcccctttggaattgcgaagcgttgagtgggaaaggtcgggtgctactatacccctggtgggccaggacatcatcgacctgcagaccgaagtgtag

SEQ ID NO: 14087 - DNA, 4755 bp, synthetic construct
  misc_feature 1..4755: note = Description of Artificial Sequence: Synthetic coding sequence
  source 1..4755: mol_type = other DNA
atgagagggcaggccgccgcccccggaccagtgtggatcctggctcctctgctcctgttgctgctcctcctggggagaagggcgagagccgcagcaggagcggacgcaggtcccggacccgaaccctgcgccactttggtgcagggaaagttttttggttacttttcagctgctgccgtgttcccagccaatgcaagccggtgttcttggactctgcggaaccctgatccacggagatacactctgtacatgaaagtggccaaagctccagtgccttgcagtggaccaggccgggttcgaacttaccagtttgactccttcctggaatctaccagaacctacttaggcgtcgaaagtttcgacgaagtccttagactatgcgatccatccgctccccttgccttcctccaggcttccaagcagtttttacagatgcggcggcagcagcccccccagcatgatgggttgaggccccgggctggacctcccggccctaccgatgacttctcagttgaatacctagttgtcggaaatagaaatccttccagagcggcttgtcagatgctttgtagatggcttgacgcatgtctcgccgggagccgcagtagccatccttgcggtataatgcagacaccatgtgcatgcttaggcggggaagccgggggtccagccgccggacccctggcaccgagaggtgacgtttgtttacgcgacgcagttgccggaggacccgagaactgcctgacatctctgacccaggaccgcggcggccacggtgcaacgggaggatggaaactgtggtcactgtggggtgagtgcacacgggattgtggcgggggtctccagactagaaccagaacctgtctgcccgcacctggagttgagggtggcggctgtgagggagtgttagaggaaggacgtcagtgtaatagggaggcttgcgggccggcagggcggacatcatcccgatcgcagtccctgagatccacagacgctaggcgtagggaggagctgggggatgaactccagcaattcggatttcccgcaccacagacaggggatcctgctgcagaagagtggagtccgtggagtgtgtgttcctccacatgcggtgagggctggcagactagaacccgtttctgcgtgtcatctagttactctacacaatgcagcggccccttgagggaacagagactgtgcaataactctgctgtgtgcccagtccacggagcttgggacgagtggtctccctggagcctctgttcttccacctgcgggaggggatttcgcgatcgcacacgcacttgtagacccccccagttcggtggcaatccgtgtgaagggcctgagaagcagactaaattttgtaatatcgcactctgccccgggagggctgttgacgggaactggaatgagtggagctcctggtctgcatgcagcgcatcgtgcagccaggggaggcaacaaagaactagggagtgcaatggcccctcttatgggggagctgagtgtcagggacactgggttgaaacaagagattgcttcttacaacagtgtccagtcgatggcaaatggcaggcgtgggctagttggggctcttgttccgtcacctgtggcgctggcagccaacgccgagagagggtgtgtagcgggccattcttcggcggagccgcttgccaggggccccaagatgagtatcggcaatgtggaactcagcgatgccctgaaccgcatgaaatctgcgacgaggataacttcggcgctgtgatatggaaggaaactccagccggagaggtggccgcggtgcggtgtcctagaaacgccaccggcctgatactgaggcgctgcgagctggacgaagaaggtattgcctattgggaaccccctacctacattaggtgcgtgtctattgactatagaaacatccagatgatgacccgtgaacacctcgcaaaggcgcaacggggcctcccaggcgaaggtgtgtctgaggtaatccaaaccttggtagagatctcccaggacggtaccagttacagcggggatcttctgtccacaattgacgttcttaggaacatgacagaaattttcaggagggcctactattcaccgactcccggagatgtccagaattttgttcagattctcagcaacttgctagctgaggaaaatcgtgataaatgggaggaggcccagctggctggcccaaatgccaaagaattgtttaggttggtcgaggacttcgtggatgtcatcggattccggatgaaggatttgagggatgcataccaggttactgacaatctcgtcctgtctatacacaagttgccagcaagcggtgctacagatatttcctttccgatgaaggggtggagagccacaggcgattgggcgaaggtgcccgaggacagagtgacggtgagcaagtctgtgttcagcacagggctaactgaagctgatgaagcatccgtttttgtcgtggggacagtattatacaggaatctcggctcatttctagccttgcagcggaataccacagtccttaattcaaaagtcattagcgtgacagttaagccacccccacgtagcctgaggaccccactggagatcgagttcgctcatatgtataacgggacaacgaatcagacatgcatcctctgggatgagactgacgttccttcatcctctgcccccccccaactgggaccatggagttggcgagggtgtcggaccgttccactagatgcactgcgcactagatgcctgtgcgacaggctgagcaccttcgccattttggcacaactaagcgccgatgctaacatggaaaaggcaaccctgccatccgtgaccttgatcgtgggttgcggtgtaagttctttaactctgctaatgttggttattatctatgttagcgtgtggagatacattcgcagtgaacgcagtgttattctgattaatttttgcttgagcatcatatctagtaacgcacttatcctgatagggcagacccaaacgaggaacaaggtcgtgtgcaccttagtggccgcgtttctgcattttttcttcctgtcttccttttgctgggtgctcaccgaggcttggcagtcatatatggccgttactggacatctgagaaacaggcttatccggaaaaggttcttatgtctgggctgggggctgccggcattggtcgtggcaatcagcgtaggctttactaaggccaaaggttattcgaccatgaactattgttggctgtccctagaaggcggtctcctttatgcgttcgtggggccagcagctgcggttgttctggtcaacatggttattgggatcctggtgtttaataaattggtgagtaaagatggcataactgataagaaactaaaggagagagcaggcgcctcactgtggtctagctgcgttgtgctgcccctgctcgctctgacatggatgtcagccgttttggccgtaactgatagacgcagtgccctgtttcaaatcttgtttgctgtattcgattctctggagggctttgttatagtgatggtgcattgcattctccgtagagaggtccaggacgctgtaaagtgccgggtcgtggacagacaggaggagggtaacggcgatagcggaggaagttttcagaacgggcatgcccagttaatgacagattttgagaaggatgtcgatctcgcctgccggagcgtcctgaataaggatattgctgcctgtagaacggcaacaatcactggcaccctgaaaagaccttcactgccagaagaggagaagttgaagctggcccacgccaagggtccaccaaccaacttcaacagcttacctgcaaatgtgtctaaacttcaccttcatgggtcacccaggtatcctggcgggcccctgcccgactttcctaaccactctttaactttgaagcgggacaaggcccccaaaagctcgttcgttggagacggcgacatttttaagaaactggactccgagctgagtcgagcgcaagagaaagctctagatacatcctatgtgatactgccaactgcaaccgccacactgcggccgaaaccgaaggaggaacccaaatacagcattcatatcgaccagatgccacagacacggttaatacacctgagtactgctcccgaagcttctcttcctgctcgcagcccaccttccaggcagcctcctagcggaggtcccccagaggcccccccagcccagcctcctcctcctcctccccctccaccgccccctccgcagcagccactgccccccccacctaacctggagcccgctcccccctctctcggcgatcccggggagcctgctgcacaccctggccctagcacaggtccatcaactaaaaatgaaaacgttgccaccttatccgtgtcttccctagagagacggaaaagccgctatgcggagcttgacttcgaaaagatcatgcatacaaggaagaggcatcaggacatgtttcaggaccttaatcgcaagctgcagcacgccgctgagaaggacaaagaggtgctgggtcctgacagcaagcccgaaaaacaacaaacacctaataagcgcccttgggagtctctgcgcaaggcgcacggaacacccacttgggttaaaaaggagcttgagccattgcagccatcccctctggagctgcgtagtgtagaatgggagcgttcaggcgcgacaattccactggtgggacaagacataattgatttacagaccgaagtctag

SEQ ID NO: 14088 - DNA, 2334 bp, synthetic construct
  misc_feature 1..2334: note = Description of Artificial Sequence: Synthetic coding sequence
  source 1..2334: mol_type = other DNA
atgcccgataatcgtcagccccggaatcgacaaccgagaatccgctccggaaacgaaccacgttcagcacctgctatggaacccgacggtcgtggcgcgtgggcacattcaagagcagcattagatcggctagagaaactccttagatgcagccgatgtacgaatatccttcgtgagccagtttgtctcgggggatgcgagcacattttctgctccaattgcgtgagcgattgcatcggtaccggctgtcctgtgtgctacacccctgcctggatccaggacctcaagattaacagacagctcgacagtatgattcaactgtgttctaagctccgtaatcttctccatgacaacgagctcagcgacttgaaggaagataagccaagaaagagtctgttcaatgatgcgggcaataaaaaaaattcgatcaagatgtggtttagcccacgcagcaagaaggttaggtatgtcgtgtccaaagcctcagtccagacccagcctgccattaagaaggatgcttccgctcagcaggactcttatgagttcgtctccccctcacccccggccgacgtttcagagagggctaagaaggcctctgctagatccgggaaaaaacagaagaaaaagaccctggcggaaataaaccagaaatggaatttagaggctgaaaaagaagatggagaattcgactctaaagaagaaagcaagcagaaacttgtgtccttctgttcccaacctagtgtaatcagcagcccacaaattaacggtgaaattgacctgctcgccagcggcagcctgacagaatctgagtgttttgggtctctcaccgaagtttcattgcccctggctgaacagatcgagtctcccgacacaaagagtcgaaatgaagttgtcacaccggaaaaggtgtgcaaaaactacttaacgtccaaaaagtcactccctctcgagaacaacggcaaacgaggacaccacaacaggttaagctcgccgatatcaaagcggtgcagaacatctattctgtctacaagtggcgacttcgtcaagcagacagtgcccagtgaaaacattccactccctgagtgctcgagtcccccttcttgtaaacggaaagtgggcggaacgagtggtcggaagaatagtaatatgtctgacgagttcatcagtctatcacccggaacgcccccctctaccctttctagctctagttatcgtagagtcatgtcatctccatctgccatgaagctcctgcccaatatggctgtgaaacgtaatcacaggggagaaaccctcctccacatagcttctattaaaggggacattccctctgtggagtacctgctacagaacgggtctgatccaaacgtgaaggaccacgctggttggacgccactgcacgaagcctgcaaccacggtcacctaaaggtggtcgaactgctgctacaacacaaagcgcttgtgaatacgaccggctaccaaaatgattccccactgcatgatgccgcgaagaacggccacgtagatatcgtcaagctgcttctgtcctacggggccagtagaaatgcggtaaatatattcgggcttcgtcccgtcgactatactgatgatgagtcaatgaagagtcttttattgttaccagagaagaatgagtcctcctccgctagtcattgtagtgtcatgaacactggacaacggagggacgggccgctggtcctcattggttccgggctgtcttccgagcagcagaaaatgctgtctgagctcgccgtgatcctcaaggcaaagaaatacaccgagtttgattccactgtgacccacgtggtggtgcccggtgatgccgtacagtcgaccctgaaatgtatgctggggatattgaatggctgctggatccttaagtttgagtgggtgaaggcctgcttgcgtaggaaggtctgcgagcaggaggagaaatacgaaattccagaaggtccacgccgttcccgcctcaatcgggaacagctgctaccaaagctatttgatggctgctacttctacttgtggggaacctttaagcaccaccccaaagataacctcattaagcttgttactgctggcggtggccagatcctctcccggaaaccaaaacccgattccgacgttacacagaccatcaataccgtagcgtaccacgcacggcctgattcagatcagcgcttttgcacacagtatattatttacgaggacttgtgtaattatcaccccgagagagtgcgccaaggaaaggtctggaaggccccctcaagttggttcatcgactgtgtcatgagttttgaactacttccccttgattcctag

SEQ ID NO: 14089 - DNA, 1704 bp, synthetic construct
  misc_feature 1..1704: note = Description of Artificial Sequence: Synthetic coding sequence
  source 1..1704: mol_type = other DNA
atgtggttctcaccaagatctaagaaagttcgttatgtcgtgagcaaggctagcgttcagacccagccagcaatcaaaaaggatgcctcagcccaacaggattcctatgaattcgtcagcccctctccgccagctgacgtgtccgaacgcgctaaaaaggcatctgctcggagcgggaagaagcagaaaaaaaagaccctcgccgaaattaaccagaagtggaatctggaggctgaaaaagaagacggagaattcgattctaaagaagaaagcaaacagaaactggtcagcttctgctctcagccttctgtcataagcagtcctcagataaacggcgaaatcgatctgctagcctctgggagcttgaccgagagcgaatgcttcggaagcttgaccgaggtcagcttgccgctggccgagcagatcgagagccctgacactaaaagccgtaacgaagttgtaactcccgagaaggtttgcaagaactacctaaccagtaagaagagtctgcctctggagaacaatggaaagcggggacatcataaccgactctccagtcctatctcaaaacgctgtagaacctccattctgagcacatcaggggatttcgttaagcagacagtcccctccgagaatattccactcccagagtgctcttcaccacctagttgtaagcgcaaagttggcggaaccagtggcaggaagaactctaacatgtcagacgaattcatttccctctctcctggcacccccccctcgactctgtcctcaagctcttacaggagggtaatgtccagcccttcagctatgaagctcctgcccaatatggcggtgaagcgcaaccatcgcggagagacactcctgcacatcgccagcatcaaaggggacattccaagcgtcgagtacttgcttcaaaacggtagtgatccaaatgtgaaagatcatgccggctggaccccactgcacgaagcctgcaaccacggacacttgaaagtggtggaactcctgctgcagcataaagcccttgttaacacgacaggctatcagaacgattcccccctgcacgacgctgccaagaatggccacgtggatatagtgaaattgttgctcagttacggtgccagtagaaatgccgtgaatatctttggccttcgccccgtagattacacagacgatgaatccatgaagtcactgctgctcctcccagagaagaacgaatcatcttccgcatcccactgttctgtgatgaataccgggcagcggcgggacggcccacttgtgctcatcggcagcggtctctcttctgagcagcagaagatgctctccgaactggccgtgatcttaaaagcaaaaaagtacaccgagtttgacagtacagtgacccacgtcgtggtccccggcgacgccgtccaaagtacgcttaagtgtatgcttggcatcctaaacggatgttggatccttaagtttgagtgggtgaaagcctgcttacggagaaaagtttgtgagcaggaagaaaagtatgaaattcccgaggggccacggcgctcaaggttgaatcgggagcactgccaaagctgcctgatggacgccaccagtatttgcggtgagccgtcgaacacaattcagcgaaccacattgctgtcatcatctctgcaggtgggcgccaggagtagtgtcgaaagcccttcccagaccgttacttag

SEQ ID NO: 14090 - DNA, 3750 bp, synthetic construct
  misc_feature 1..3750: note = Description of Artificial Sequence: Synthetic coding sequence
  source 1..3750: mol_type = other DNA
atgagttccatgtggtctgaatatacaatcgggggcgtgaaaatctactttccatataaggcctacccttcccaacttgccatgatgaactcgattttgagaggcctgaactccaagcagcattgcctgttggaatctcccacagggtctgggaagagcctagcgttactgtgttccgcactcgcctggcaacagtctctgtctggaaagcctgcagacgaaggcgtatcagaaaaggctgaggttcagctctcttgctgctgtgcctgccacagtaaggatttcacaaataacgacatgaaccagggcacctcacggcattttaattatccctcgacaccgccatccgaacgcaatggcacaagctcaacttgtcaagatagtccggagaagaccacgctagccgctaaattatccgcaaagaagcaagcatctatctatagagacgaaaatgacgattttcaggtagagaaaaaaagaattaggcccctggaaaccactcagcagattaggaagcgacactgctttggtactgaagttcacaatctcgatgcaaaagtagactctggcaagacggttaagttaaattctccccttgagaagataaactctttctccccccagaaaccccctggccattgtagccggtgctgttgctccaccaaacagggcaactcccaggaaagttccaataccatcaagaaggaccacactgggaagtccaagatacccaaaatttactttggcacgcgaacccacaagcagatcgcgcagatcacacgggagctgagaagaacagcctatagcggtgtccctatgacaattctgagctccagggaccatacttgtgtgcatccagaggtggtcggtaacttcaaccgcaacgagaaatgcatggagctgctggacggaaagaatggaaagagttgttatttttaccacggagtccataagatttcagatcagcacactctgcaaacatttcagggaatgtgcaaggcgtgggacattgaggagctcgtgtcgctcgggaagaaactgaaggcctgtccatactacactgccagggagctgatacaggacgcggatatcatattttgcccctacaattacctgctcgatgctcagatacgggagtccatggacctgaacttgaaggaacaggtggtcatcctagatgaggcccacaacattgaggactgcgctagagagtccgcctcgtatagcgtgacggaggtccaactcaggttcgctcgggacgaactggattccatggtgaataacaatatccgtaagaaagaccatgagccactccgcgctgtatgttgttcactgataaactggctggaggccaacgcggagtatctggtggagcgggactacgagtcagcgtgtaaaatttggagtggaaatgagatgctcctgaccttacacaagatgggtattacaactgccacatttcccattttacaaggacacttcagcgccgtgttgcaaaaggaggaaaaaataagcccaatctacgggaaagaggaggctcgcgaggtgcccgtcattagcgcaagcactcaaattatgttgaagggtctcttcatggttctggactatctgttccggcagaattccagatttgccgatgactacaagattgccatccaacagacctattcgtggacaaatcagatcgatattagtgataaaaatggtctgctggtgctgccaaaaaataagaagaggtcgcgccagaaaaccgcggtccacgtgctaaacttttggtgtctgaacccggccgtggccttttccgatattaatggtaaggtgcagacaatcgtcctgacgagtggcactctgtcccccatgaagtccttcagcagcgagttgggggtcacattcacaatccagcttgaagcaaaccacatcatcaagaacagccaagtgtgggtggggactatcggcagcggacccaagggccggaatctgtgtgcaaccttccagaataccgagacattcgagtttcaggacgaagtgggggctctgttgttgtccgtttgccaaaccgtgtctcagggtattctgtgcttcctgcccagctataagctgctggaaaaactgaaagagcgctggctctccaccggcctttggcacaacttagagctcgtcaagactgtgattgtggagcctcaggggggagagaaaactaatttcgacgagctcctccaggtctattacgacgcgatcaagtacaaaggcgagaaggacggcgccttgcttgtcgccgtgtgccgcggcaaggtgtccgaaggcctggattttagtgatgacaatgctagagcagttattacaatcgggatcccattccctaacgtgaaggatctacaagtcgagctgaaacgtcagtataacgaccaccatagtaagctacgaggattgctccccgggcgccaatggtatgagattcaagcttacagagcactgaatcaggctcttggcagatgcattcgacacagaaacgactggggcgctctgattctagtcgatgaccggttcagaaataatccttctaggtatattagcgggctgtctaagtgggtcaggcagcaaatacagcaccacagcacctttgagtccgccctagagtctttggcagaattttcaaaaaaacaccaaaaagtcctgaatgtgtccataaaggataggactaatatccaggataatgaatcaacgctagaggtgacctctctgaagtattcgacctccccatatctcctggaggcagccagccacttgtctcccgagaattttgtggaagacgaggcaaagatttgtgtgcaggagctgcaatgcccgaaaattatcactaaaaatagtcctcttccttcgagcatcatttcaaggaaagaaaaaaatgacccagtctttctggaggaagccggtaaagctgagaagatcgtcatttctcggagcacttctccgacattcaacaagcaaacaaagcgtgtcagctggtcttcctttaactccttgggccagtatttcaccggcaagatccccaaggcaacccccgaacttggctcgtccgaaaattcggcaagttcaccaccacgcttcaagactgagaaaatggaatccaaaaccgtgctcccttttactgataagtgcgaaagcagcaacctgaccgttaatacaagcttcgggtcatgtccccagagcgaaaccatcattagctcccttaaaatcgacgcaactctgacccgaaagaatcatagcgaacacccactgtgctccgaggaggccctcgatccagatatagagctcagcttagtaagtgaggaggacaagcagtctacctcaaatagagatttcgagacagaggctgaggacgagtccatctacttcacacccgaattatacgatcccgaggacactgacgaggagaagaatgacctcgctgaaacagacaggggtaacaggctggctaataattcagattgcatcctggccaaggatctatttgaaatcagaaccatcaaggaagtggattcagcgcgagaagtgaaggccgaggattgcatcgacacgaagctaaacggcatccttcacattgaagagtcgaagatcgatgatatcgatgggaacgtgaaaaccacgtggatcaacgaactggaactgggtaaaacgcacgaaatagagattaagaactttaaaccttctccgagcaaaaataaaggcatgttccccggatttaaatag

SEQ ID NO: 14091 - DNA, 945 bp, synthetic construct
  misc_feature 1..945: note = Description of Artificial Sequence: Synthetic coding sequence
  source 1..945: mol_type = other DNA
atggcaagcaggtcaaaaaggagggccgtcgagtcaggtgttcctcagccccctgacccgcccgtgcagcgggacgaggaagaagagaaggaagttgagaatgaagatgaggacgatgatgactctgataaggagaaggacgaagaggatgaagtaattgatgaagaagtcaatattgagttcgaggcttactctctgtctgacaacgactacgatgggattaaaaaattactgcagcagctgtttctcaaagcacctgtcaacaccgcagaactaactgacctccttattcagcagaaccacattggttccgtgatcaaacagaccgatgtatctgaagatagcaacgacgacatggacgaggacgaagtgtttggctttatcagtttgctcaatctgaccgagcggaaaggcactcagtgtgtcgagcagatacaggagttggtcctccgcttctgtgagaaaaattgcgagaaatcgatggttgagcaactggacaaattcctcaatgatacgaccaaaccagttgggttgctgctaagtgagcgttttatcaacgtgcctccacagatcgctctccccatgtaccagcagcttcagaaggaactagccggcgcgcatcggaccaataagccttgtggcaagtgctacttctatctgcttatctctaagacttttgtcgaggcaggaaaaaacaatagtaaaaaaaaacccagcaacaaaaaaaaggcagctctcatgttcgcgaatgccgaagaggaatttttttacgaaaaagccattctgaagttcaattattccgtacaggaagagtccgatacctgcctgggggggaaatggagcttcgatgatgtgccgatgacccccttgcggacagtgatgttaattccaggggataaaatgaacgaaattatggataaactcaaagagtatctgtctgtgtag

SEQ ID NO: 14092 - DNA, 879 bp, synthetic construct
  misc_feature 1..879: note = Description of Artificial Sequence: Synthetic coding sequence
  source 1..879: mol_type = other DNA
atggcatcgcgtagtaaacgtagagcggtcgagagtggcgtgccacaacccccagatcccccagtgcagcgggacgaggaggaggagaaagaagttgagaatgaggacgaggacgacgacgactctgacaaagagaaagacgaggaagatgaggtcatcgacgaagaggttaatatagagttcgaagcttacagtctatctgacaacgactacgatggaatcaagaaactgctgcaacagctgtttcttaaagctccggttaacaccgctgaattgaccgatctcctaattcaacagaatcacatcggctcagtgattaagcagaccgacgtttctgaagattcaaatgatgacatggacgaagatgaggtgttcggttttatttcactccttaatctgaccgagaggaaaggaacccagtgtgtggagcagattcaggagctcgtactgcgattctgtgaaaaaaactgtgaaaaatccatggtagagcagcttgacaaatttctgaacgataccaccaaacctgtggggctgctgctgtccgagagattcattaacgtacccccccagatcgccctcccgatgtatcagcaactgcagaaggaactggccggtgcccacaggaccaacaaaccttgcggtaaatgctacttctacctgctcatttctaagacgtttgtcgaagctggcaaaaacaattctaagaaaaagccttccaataaaaagaaagccgccctgatgtttgctaatgccgaggaagagttcttttatgaggagcagggaaaaccggaagtgcttggaggccccgacacccgcagggggctcgagcctgtaccaatacagcataatgggtggagcgtacctccagtgctcgaatag

SEQ ID NO: 14093 - DNA, 969 bp, synthetic construct
  misc_feature 1..969: note = Description of Artificial Sequence: Synthetic coding sequence
  source 1..969: mol_type = other DNA
atggcctctaggtcgaaacggagagctgtggagtccggagtaccccaaccccccgatccaccggtgcagcgggacgaggaggaagagaaagaagtcgagaatgaggacgaggatgatgatgactcggacaaggaaaaggacgaagaagatgaggtgatcgacgaggaggtgaatatcgaatttgaagcatactccctgtctgacaatgactacgatggtataaagaaactgctccaacaattatttttaaaggccccagtaaacactgcggaactgactgatcttcttatacagcagaatcacatcgggagtgtgattaagcaaacagatgtgagcgaagactccaatgacgacatggacgaggatgaggtattcggctttataagcttgctgaacctaacagagcgaaaggggacgcagtgcgtcgaacagattcaggagttagtgctgcgtttctgcgagaaaaactgcgagaaatctatggtggaacagttagataaattcctcaatgataccaccaaacctgttggcttactgctgtctgagagattcatcaatgtccccccacagattgcgctcccgatgtaccagcaactgcaaaaagaactggccggggcacatcggaccaacaagccctgtggcaagtgttatttttatttgctcatctccaagacatttgttgaagcaggcaagaataacagcaagaaaaagccatccaacaaaaaaaaagctgctctgatgttcgccaacgctgaagaggaattcttctacgaagagcaagggaagccggaagtactgggtgggccggacacccgccggggtctcgaacccgtcccaatccaacataacggaggaagccgaggccaggttacggctctcgtctctctgaaagccggactgattcagtcaagaagtaccctatccgacttccaggggaccttcatgacagttgggatcgctttaagctag

SEQ ID NO: 14094 - DNA, 879 bp, synthetic construct
  misc_feature 1..879: note = Description of Artificial Sequence: Synthetic coding sequence
  source 1..879: mol_type = other DNA
atggccagccgaagtaagcgcagagcggtggaatccggagtacctcagcctccagacccgccggtgcagagagatgaagaagaggagaaagaagtcgaaaacgaagatgaagacgatgatgactctgataaagagaaagatgaagaagatgaagttatcgatgaagaggtcaatattgaattcgaggcctacagtctcagcgataacgattatgacggcatcaaaaagttacttcagcagttatttctgaaagctcctgtgaacacagccgagttgacagatctgctgattcaacagaaccacataggttccgtaattaagcagacggacgtgtcagaggatagtaacgacgatatggacgaggatgaagtcttcggattcatcagtttgctcaacttgacggaaaggaagggcacccagtgcgtggaacagatacaggagcttgtgctgagattttgtgagaaaaattgtgaaaagagcatggtcgagcaactggataagtttcttaacgatacgaccaagccagttggcttactgctgtccgagcgatttatcaacgtgccacctcagatagccctgccaatgtatcagcagctacagaaggagctggctggcgcccataggacgaacaagccctgcggaaagtgttacttctatttgttgatctccaagacgttcgtcgaagccggcaaaaacaattcgaaaaagaagcccagcaataagaaaaaggcagcattgatgtttgcaaatgccgaggaagaatttttttatgagaaggccatcttaaagttcaattactccgttcaagaagaatccgacacttgtctgggtggaaagtggagcttcgacgattggagtgtccccccagtgctggagtag

SEQ ID NO: 14095 - DNA, 789 bp, synthetic construct
  misc_feature 1..789: note = Description of Artificial Sequence: Synthetic coding sequence
  source 1..789: mol_type = other DNA
atggctagtcgctctaagagacgtgccgtagaaagtggcgtcccacaacccccagatcccccagtccagcgcgatgaggaggaggagaaagaggtagagaatgaagacgaagacgatgatgattctgacaaggagaaggacgaagaagacgaggtaattgatgaggaggtcaacatcgagtttgaagcatactccctgtcggataacgactacgatggcatcaaaaaactgcttcagcagctgtttctgaaggccccagtgaacacggcggaactaacggatctacttatccagcaaaatcacattggatccgtcatcaaaggcactcaatgtgtggaacagatccaggaattagtgctgaggttttgtgagaagaattgcgaaaagtccatggtcgaacagctcgacaaattcttgaatgacactaccaaaccagtgggactgctgctgtctgaaaggtttatcaacgtccctccacagatcgccctgccaatgtatcaacagttacagaaagagttggcaggcgcgcatcgcacaaacaaaccatgcggcaaatgttacttttacttactcatcagtaaaacattcgtggaggctggtaaaaacaactccaagaagaagccttccaataaaaaaaaggcagccctgatgtttgccaatgccgaggaggagtttttctacgaagagcaggggaaaccagaggtgctgggtggacccgatactagacggggtctggagccggtcccaattcaacacaatggatggtccgtgcctcctgtcctcgagtag

SEQ ID NO: 14096 - DNA, 1398 bp, synthetic construct
  misc_feature 1..1398: note = Description of Artificial Sequence: Synthetic coding sequence
  source 1..1398: mol_type = other DNA
atggtggaccccgtcgggttcgccgaagcctggaaggcacagttccccgacagcgagcctccacggatggagctgcgaagcgtaggagacatcgaacaagaactagaaaggtgtaaggcttctatccgccggttggagcaggaggtgaatcaggaacggtttcgcatgatttacttacagacactgttggccaaagaaaaaaagagctatgaccggcagcgctggggcttccgtcgggccgcccaggccccagatggagcgagcgagcccagagctagcgcatccaggcctcagcccgcacctgcagatggcgccgacccccccccagccgaagaacccgaggcccgaccggatggtgaaggatctcccgggaaagcccggccaggtacagctcggaggcccggcgcggccgcatccggcgagagggatgacagaggtccgcctgccagtgtcgccgccttgagaagcaatttcgagaggatacgcaaggggcacggtcagcccggggctgacgccgagaagcctttctacgttaacgtggagtttcatcatgaaagaggacttgtgaaagtgaatgataaggaggtgagtgatagaattagctccttggggagtcaggccatgcaaatggagcgaaagaagtcccagcacggagcaggtagcagcgtaggggacgcctccagaccaccataccggggaaggtcttctgagtcatcatgtggagtcgacggagattacgaagacgccgagctgaatcctagatttctcaaggataacttgatcgatgccaacgggggctcccgtcctccttggccgccactcgaatatcagccataccagtcaatttatgttggaggcatgatggagggcgaagggaaaggtccgcttcttagaagccagtctacctccgagcaggagaagcggctgacctggcccaggcggagctactctccaaggtccttcgaggattgtgggggcggctacactcctgattgcagcagcaacgagaacctgactagctccgaagaggactttagtagcgggcaaagttcccgtgtatcacctagtccgacaacttaccgaatgttccgagataagagcaggtcaccctcacagaacagccagcaaagctttgactcatcctccccccctactcctcaatgccacaagcgccatcgccactgtccagtcgtcgtgagcgaagcgacaatagttggagtcaggaagactgggcagatctggcctaatgacggggagggtgcttttcatggagagcaccccggcgctgccgaagaggtatttcaaaagctcttgcccgatatcagaggggcagctgacgccgatcagcttgtctgtgagacccctgattgccctcagcatagcgctgatcaccagtag

SEQ ID NO: 14097 - DNA, 1377 bp, synthetic construct
  misc_feature 1..1377: note = Description of Artificial Sequence: Synthetic coding sequence
  source 1..1377: mol_type = other DNA
atggttgacccggtcggctttgcggaagcttggaaggcacagtttcctgattccgagccgccacggatggagctaagatctgttggtgacatcgagcaggaactggaacggtgcaaagcttccatccgaagactggagcaggaggtcaatcaggagagattcaggatgatttacttgcaaacactgttggccaaggaaaaaaaatcgtatgatcgccagcgttgggggttcaggagggccgctcaggccccggatggcgcctccgaacctcgcgcctccgcctctcgcccccagcctgcgcctgctgacggtgctgaccctcccccggctgaagagcccgaagcccggcccgatggcgagggaagtcccggcaaggctcgtcccggaacagctcgaaggcctggggcagcagcgtctggcgagcgagatgaccgggggccccccgcatccgtggcggccctcaggtccaatttcgagagaattagaaagggacacggacaaccgggggccgatgctgagaaaccattttacgtgaacgttgagtttcaccatgaacgagggctcgttaaagtgaacgataaggaggtgtctgacaggatctcatcactcggcagccaggctatgcagatggaaaggaaaaagagccaacacggagcaggcagctccgtcggtgatgccagcaggccaccatacaggggccgtagttctgaaagtagctgcggtgtagacggagattacgaagacgctgagttgaatcctagattcttgaaggacaatctgatcgacgcaaacggaggctccaggccgccttggcccccactggagtaccaaccctatcaatccatttatgtgggtggaatgatggaaggagagggtaagggaccacttttacggagccagagcactagtgagcaggaaaaaagactcacatggcccaggcggtcctactcgcctaggtccttcgaagactgtggcgggggatatactcctgactgcagttcgaacgagaacctgactagcagtgaagaggacttttcttccggccaatctagcagagtttcaccctccccgactacataccgcatgttccgggacaaatcccgaagccccagtcaaaattcgcagcagagctttgactcctcgtctccccctactccgcagtgccacaaaagacacagacattgtcccgtagtggtgtcagaggccaccattgtgggagttcgaaagacagggcagatctggcctaacgacggtgaaggagccttccacggcgacgccgatggctctttcggaacaccaccaggctatggatgtctctgtctgccagcctggccctccggttgtacagcagcgactgctagggttacacggagctag

SEQ ID NO: 14098 - DNA, 3816 bp, synthetic construct
  misc_feature 1..3816: note = Description of Artificial Sequence: Synthetic coding sequence
  source 1..3816: mol_type = other DNA
atggtggatccagtgggatttgcagaggcttggaaggctcagttccccgacagcgaaccacctcgcatggagctgcgatcggtaggagatattgaacaagaattggagcgttgcaaagccagtatccggcgactggagcaggaggtgaatcaggaacgcttccgcatgatttacctacagacactcttggctaaggagaagaagtcctacgaccggcagcggtggggctttaggagagcggcccaggccccggacggcgcctctgaaccgcgagcgagcgcaagtcgcccccaacctgcacccgcagatggtgcagatcccccgcccgccgaagagccagaggcccggccagatggcgagggctcaccagggaaagcccggcccggaaccgcaagacgacccggagccgctgcctccggcgagcgcgatgacagaggaccgccagccagcgtggccgccttacgaagcaatttcgagagaatacgcaagggccacggccagcccggcgccgatgcagaaaagccgttctacgtaaatgtggaatttcatcatgagaggggtctggttaaggtgaatgataaagaggtatcagatagaatatctagcttagggtcccaagcaatgcagatggagcgcaaaaagtcccagcatggcgcaggctcctccgtgggtgatgcctcacgaccaccatataggggcagatcaagtgaatcatcctgtggggtagatggcgactatgaagatgcggaactcaatcctcgatttctcaaggacaacctgatcgatgcaaatgggggtagtcggcccccttggccgcccttggaataccagccctaccagtctatttatgtcggcggaatgatggagggggaaggcaaaggccccctccttcggagccagtcaacctcagagcaggaaaaacgcctgacctggccccggcgctcgtacagccctagaagcttcgaagattgcggaggggggtacacaccggactgttcaagtaatgagaacctcacttcaagcgaagaagattttagttctgggcagagttccagggtttctccatctcccaccacctaccgcatgttccgggataagagccggtccccctcacagaattcccagcagtcctttgatagcagttccccccccaccccacagtgtcacaagcgacaccgccattgtccagtggtggtgagcgaagctacgattgtcggcgttaggaagactgggcagatttggccaaatgacggcgagggagcctttcatggtgacgccgacgggtcattcggtacaccccccgggtatggctgcgcagctgaccgggccgaagaacaaaggagacaccaagatggattaccctatattgatgattcaccatcctcatccccccacctgtcctccaaaggacggggtagcagagatgctcttgtgagcggagctctcgagagcacaaaagctagcgagctggacctggaaaaaggcttggagatgagaaagtgggttctttccggcattctcgcctccgaggagacttatctcagccatcttgaagccctgttgctgccaatgaagccacttaaggccgccgctaccacaagccagcccgtcctcaccagtcagcaaatcgagacgatcttcttcaaagtgcccgagctctatgaaattcataaggagttttacgatgggttgtttcctcgggttcaacagtggtcacaccaacagcgcgtgggggatctcttccaaaagctggctagccagctcggagtgtatagagcctttgtggacaattacggcgtcgccatggaaatggcagagaaatgttgccaggcaaacgcgcaatttgccgaaatatctgagaacttaagagctcggtccaacaaggacgccaaagatcccacaactaagaattcattggaaaccttgctctacaagccggttgaccgagttacccggtccaccctggtgctccacgacctgctcaagcacacacctgcctcccaccccgatcaccccctgttgcaggacgccctcaggataagtcaaaattttctcagcagtatcaatgaagagataactccacgccgccagtcaatgacagtcaagaagggtgagcacagacagttgcttaaggactcttttatggtcgaacttgtggaaggggcccgtaagctgcgccacgtgtttctgttcactgatttattactttgcaccaaactcaagaaacagagcggtgggaaaacccagcagtacgattgcaagtggtacatcccgttaacagacctctcattccaaatggtggacgagcttgaggcggtgcccaatataccactggtccccgatgaagaactggatgcattgaagatcaaaatcagtcaaatcaaaaacgatattcaaagggagaaacgcgccaataagggttccaaagccaccgagagactgaagaaaaaactctctgaacaggagagccttctgttactgatgtccccgagcatggccttccgtgtccactctcggaatggaaagtcttacactttcctgatttccagcgactacgaacgcgcggagtggcgggagaacattagagagcagcagaaaaagtgttttagatcctttagtctgacgtcagttgagctacagatgctcacaaatagttgtgtcaaattgcagactgtgcatagcatccccttaactataaataaggaggacgacgagagccccggcctgtatggattcctaaacgtgattgtacactcagcaaccggctttaaacaatcaagcaatctgtactgtacgctagaggtcgactcttttggttatttcgtgaacaaagccaaaacaagggtttacagggacacagccgagccgaactggaacgaagaatttgaaatcgagttagagggttcccaaaccctccgcatcctatgctacgaaaagtgctacaacaagaccaagatccccaaggaggacggggaaagtacagataggcttatgggaaaagggcaagttcagttggatcctcaggcacttcaagatagagattggcaacggaccgtgatcgctatgaacggcatagaggtcaagcttagcgtaaagttcaatagccgagagttcagcctgaaacgaatgcccagccggaagcagacaggcgtctttggtgtgaaaattgcggtcgttactaaaagggagcgctcgaaggtcccatacatcgtcaggcaatgcgtggaagaaatcgagaggcggggcatggaggaagttggaatttatagggtttctggggtcgccaccgacatccaagcgctaaaagcagccttcgacgtcaacaacaaggatgtctccgttatgatgagtgaaatggacgttaatgccatagcgggaacacttaaactgtactttagggagctgccagaacctctctttacggacgaattttacccaaatttcgccgaggggattgccctaagtgacccggttgcaaaggaaagctgtatgctgaatctactgctgagccttccagaggctaatctgctgacatttttattcctgctggaccatttgaaacgagtggccgaaaaggaagcagtgaacaagatgtcattgcataacctcgccaccgtctttgggcccacgctcctcaggcctagtgaaaaggagagtaaacttccagcgaacccctctcaacccattaccatgacagacagttggtccctggaggtcatgtctcaggtgcaggtcctcttgtacttcttgcagctcgaagctatcccagcgcctgatagcaagaggcagtctatactattctccacagaggtttag

SEQ ID NO: 14099 - DNA, 2811 bp, synthetic construct
  misc_feature 1..2811: note = Description of Artificial Sequence: Synthetic coding sequence
  source 1..2811: mol_type = other DNA
ccttcagctccccgggttagcaccgtgggactcttatgttccggtgcaggtccacacctctgcccctgcgcagaggagggaacggggggcctggagagccaaggggagatcatcccgtctcgggggtctagaaagccggacggtgtcagcggatcccgccgcttattcagcagcctgtgtaagtcccaagagggttcaagaaaagaatgcctgaggaaacaccgacggctaggccctgcaatgccagtttccagcccaggtttcccaggcccattggcacgcagtgaacaccatcttgataccgccgcactccagactggccagagatcctccgccggtacaaaaatgggatgtccaaccctgatgacccggccccctcacaggccgaccagcgccgcgagggccggggcggcaggcatgcgatggagcagagagccatggtcccctcttaagaggtctgagctggacttggaaaagggcctggaaatgaggaaatgggtgttatcaggcatcttagccagcgaagagacatacctgagccacttggaggccctactgctgcccatgaagcccctgaaggcggccgcaactactagccaaccggtgttgaccagccagcagatagaaaccattttttttaaggtcccagagttgtatgagatccataaagaattctatgatgggctcttcccgagagtacagcaatggagtcatcagcaacgggtaggagacttatttcagaaattggcctcacagctgggagtgtaccgggcattcgtggacaactacggggtggctatggagatggccgaaaagtgttgccaagccaatgcgcagtttgctgagatctcagagaacttgagggcacgatccaataaagacgccaaggatcctacaaccaagaactcgttggaaacattactgtataaacctgtagatcgggtgacgcgtagcacactggtgcttcatgacttgctgaaacataccccagcatcacatccagatcatccactgctccaggatgccctgcgtatctctcagaattttctttcctcaattaacgaagagatcactcccaggagacagagcatgacagtgaaaaaaggggaacacagacaactgctcaaggattcgtttatggtggagctggtagaaggggcccgtaaactacgacacgtcttcctgtttacagaccttttactgtgcacaaaactgaaaaagcaatctgggggcaagacccagcagtacgattgtaaatggtatattcctctcaccgatctgagctttcaaatggtcgatgagctggaggctgtgccaaatatcccactagtgcctgacgaggagttggacgccctgaaaattaaaattagccagataaaaaacgatatccagcgtgagaaacgggctaataagggctcaaaggcgaccgagcgcctgaaaaaaaaactgagtgagcaggaatctctgctgctgttaatgtccccttccatggcattccgcgtgcattctcgcaatggaaaaagttatacattcctcatctcaagcgattacgagagggcggaatggagagagaacatccgggaacagcagaagaaatgtttcaggagtttctcgctgacatctgtggagctccagatgctgacaaacagctgcgtcaagctacagaccgttcatagcatacccctcaccattaacaaggaagacgacgaatctcccggcctgtatggctttctgaatgtgatagtacattcagccactggttttaagcagtcctccaacttatattgcactctcgaggtagacagcttcggctactttgtaaataaggcaaaaacacgagtctatagagatacggctgaacccaattggaatgaagaattcgagattgaactggaagggagccaaacgttgcgtattctgtgttacgagaaatgctacaataaaactaagatccctaaggaggatggcgaaagtacagatcggttaatgggcaagggtcaggtgcaattagatccccaagccctgcaggacagggactggcagcggaccgttatagcaatgaatggcatcgaagtcaaactgtccgttaagttcaattcacgggagttctcactgaagaggatgccctctcgcaagcagactggagtgttcggcgtgaagatcgccgtggtgacaaagagagaacgttctaaggtcccctacattgttcgtcagtgcgttgaagaaattgagcggcgagggatggaggaggttgggatctaccgggtgagtggagtggccaccgatatacaagccctgaaggccgccttcgacgtcaacaataaggacgtttccgtcatgatgtccgaaatggacgttaacgccatcgcaggtaccttaaagctgtactttcgtgagctcccagaaccactcttcacagatgaattctatcccaatttcgctgagggaatcgccctctcagaccccgtcgccaaggaatcgtgcatgctgaatcttctactgtcactgcccgaggccaatttgctgactttcctgttccttctcgatcacctgaaacgggtggccgaaaaagaagccgtgaataaaatgagtctgcacaacctagccacagtttttggccccacactgctcagaccttccgaaaaagagtctaagttgccagcaaatccttctcagccaatcaccatgactgactcttggtcactggaagtgatgagccaagtacaggttctcctgtatttcctgcaactggaggccatccctgctccagattccaagcgtcaatccatactgttcagcaccgaggtctag

SEQ ID NO: 14100 - DNA, 3684 bp, synthetic construct
  misc_feature 1..3684: note = Description of Artificial Sequence: Synthetic coding sequence
  source 1..3684: mol_type = other DNA
atggtggatccagtcggttttgctgaagcttggaaggcacagtttcccgacagcgaaccacctcgcatggagctgagaagcgtgggagatatagagcaagagttagagcgctgtaaagcatcaattaggaggcttgagcaagaagttaaccaagaacgatttcgcatgatctatttgcaaactctgctcgctaaggagaagaagagctatgaccgacagaggtggggttttcggcgggctgcccaggcccccgatggcgcctcagagccacgtgcttcagccagccgtccacagccggccccggccgacggagccgaccctcctcctgcagaggagcctgaagccaggcctgacggtgaagggagccctggcaaagcaagaccgggcactgccaggcgacccggggctgccgcatccggggaacgtgatgaccgcgggcctcccgcatcagtggccgccctccgctcaaatttcgagagaattcgcaaaggacacgggcagccaggcgctgatgcggagaaacccttctacgtcaatgtcgagtttcatcatgaaaggggtctcgtaaaagtaaatgataaagaggtctcagacagaatcagcagcctgggaagtcaggccatgcagatggaaagaaaaaagagtcagcacggcgccggttcttccgtcggagacgcaagtcggccaccgtacaggggcagaagtagcgaaagtagctgtggggtagacggagactacgaggatgccgaattaaacccgagatttctaaaggacaatctgattgacgccaacggcggttcaagacccccgtggccgcccttggagtatcaaccttaccagtctatttacgtgggtgggatgatggagggggaaggaaaggggcccctgttgcggtctcagagcacctccgaacaagagaagcggctgacttggcctagaaggtcttactcaccccgaagcttcgaggactgtggcgggggttatactcctgactgtagcagcaacgaaaatttgacatcctctgaggaagacttctcctccggtcaatcttcccgggtgagcccgtctccaacgacctatcgcatgtttagggataagagcagaagtccctcccaaaatagccaacaaagtttcgacagctcctccccgcctaccccccaatgccacaagaggcataggcattgccctgtagtggtttcagaggcaaccattgtgggggtgagaaaaaccggacagatttggcctaacgacggtgagggagcgttccacggcgatgcagatggcagcttcggcacgccccccggctacgggtgtgctgctgatagggccgaagagcagcgtaggcaccaggacggcctcccctacatcgatgatagtcccagtagttcccctcatctgagtagcaaaggaaggggcagccgcgatgccttggtgagtggagctcttgaaagtacaaaagcgagcgagctagacctcgaaaagggactcgagatgcggaaatgggtgctctcagggatcttggcttctgaagagacgtatctctcacacttggaagctctactgctccctatgaaaccgttaaaagccgccgcaactacctcgcagcctgtgctaacaagccagcagattgaaacgatattcttcaaggtgcccgaattgtacgagatccataaggaattctacgacggtctcttcccccgggtgcagcaatggtcccatcagcagcgggtaggagatttattccagaaactagcgagtcaactgggggtctacagagcgttcgtggacaactatggcgttgcgatggagatggcggaaaagtgctgccaggcaaatgcacagtttgccgagatctccgaaaatttgagagcacgctccaacaaagacgccaaggatcccactaccaagaatagcttggagactctgctttacaagcccgtcgaccgagtgactcggtcaaccctggtgcttcacgatctgctcaagcacacaccagcctcacatcctgaccacccacttctccaggatgcgcttcggatttcgcagaactttcttagctcgatcaacgaggagatcactccccggcgtcagtccatgactgtcaaaaagggcgagcacagacaactgctcaaggattctttcatggtcgagctcgtcgaaggagcccgcaaacttagacacgtcttcctcttcaccgatctcctgctttgtacaaaattaaagaagcagtccggggggaagacacagcagtatgattgtaagtggtacatccctcttacggatttgtcatttcaaatggttgacgagttggaagcagtaccaaacatccctctggtgcccgatgaagaacttgacgctctgaagataaaaattagccaaatcaaaaacgacattcagagagagaaaagagccaacaaagggtcaaaggcaacagaaaggctcaaaaagaagctgagcgaacaagaatctttattgcttttgatgtccccaagcatggcgttcagagtgcacagccgaaatggaaagtcttacaccttcctcatctcctccgattatgagagggctgaatggagagagaacattagagaacagcagaagaaatgtttccggtctttttctttaactagcgtggagttacagatgctgacaaatagttgcgttaaactgcagaccgtccacagcattccccttacaatcaacaaggaggacgatgagagtccagggttgtatggattcctaaatgtgattgtgcatagtgcaactggcttcaaacagtctagcaacttgtactgtactttggaggtggatagtttcggctatttcgtaaacaaggccaagactcgggtgtatagggatacggccgagcccaattggaacgagctggaccctcaggccctacaggacagagattggcagcgcactgtgatcgccatgaatggcatcgaggtgaagctgagcgtcaagtttaactcaagagagttcagcctcaagagaatgccttccaggaaacaaaccggagtctttggagtcaaaatcgccgtggtcacaaaacgcgagcggagcaaggtgccatacatcgtcagacagtgtgtggaagagattgaacgccgtgggatggaggaggtcgggatttacagggtgagcggagtcgcgacagatatccaggccttgaaggcggcattcgacgtcaacaataaggacgtatcggtcatgatgagcgagatggatgtgaatgccatagccggcactctcaagttgtacttcagggaactacccgagccactgttcaccgacgaattttacccgaattttgcagaaggtattgcactgagtgatccagtcgccaaagagagctgcatgcttaatctgttactctctctgcctgaagctaacctgctcaccttccttttccttcttgatcacctgaaaagagtggcagaaaaggaggctgtcaacaagatgtccttacataacctggcgactgtgttcggtccgacgctgctacgccctagcgagaaagagtcaaaattgccagcaaatccctctcagcccatcacaatgacagattcttggagtctagaagtgatgtctcaagtgcaggtcctcctgtacttcctacagctcgaggctataccagcaccagactctaaaagacagtctattctcttttctactgaggtgtag

SEQ ID NO: 14101 - DNA, 1404 bp, synthetic construct
  misc_feature 1..1404: note = Description of Artificial Sequence: Synthetic coding sequence
  source 1..1404: mol_type = other DNA
atggttgatcccgtggggtttgccgaagcctggaaagctcagtttcccgacagtgagccgcccagaatggaactcaggagcgtaggagacatagaacaagagttggagaggtgcaaggcctccatccgccgacttgagcaggaggttaaccaggagaggtttcgcatgatttacctgcagacactgctggccaaagagaagaagagttatgaccgccagaggtggggctttcgccgggctgcacaagcacctgacggcgccagtgagcctcgcgcatccgcaagccgaccacagcccgccccggcagacggggcagaccctccacctgcggaagagccagaggcccgacctgatggcgaaggctccccagggaaggcacgtccaggcactgccaggaggccaggggctgctgcatctggcgagcgtgacgatagggggccacccgcttccgtcgccgccctgagaagtaattttgaacgtatccgcaaagggcatggccagccaggcgcagacgcagagaagccattctacgttaatgttgagttccaccacgagcgagggcttgtgaaagttaacgacaaggaggtatctgaccggatcagcagcctgggcagccaagcaatgcaaatggaaaggaaaaaaagtcaacatggagcagggagttcagtcggtgacgccagccgtcctccatataggggcagatcttcagagtcctcttgcggggtcgatggggattatgaggatgcagagctgaacccccggtttctgaaggataatctgatcgatgccaacggcggatctagacccccttggcctcccttagagtaccagccctatcagtctatttatgtcggagggatgatggaaggggaaggaaaaggacccctgctcaggagccagtctacctccgaacaggaaaaaaggctgacttggccgcggaggagctacagcccgagatcctttgaggattgcgggggcggatacacaccagactgttcttcgaacgaaaatcttacgagtagcgaggaggacttttcctcagggcagtccagcagggtgtccccttctccaactacctataggatgttccgggacaaatcccggagccctagtcaaaactcgcagcagagtttcgactccagcagccctccaaccccccagtgtcacaagcggcacaggcattgcccagtcgtcgtctcggaggctactatcgtgggggttaggaaaacagggcagatttggcccaatgatggggaaggcgccttccacggcgatgcagtgctaaagaccgaggtccctcatcagggtgtcaggcgggcccgcctctcactggaagcactgggagaagacccttcctttctcttccctgccagcgatggcccgagacattctagcacttggtag

SEQ ID NO: 14102 - DNA, 1365 bp, synthetic construct
  misc_feature 1..1365: note = Description of Artificial Sequence: Synthetic coding sequence
  source 1..1365: mol_type = other DNA
atggtcgacccagttggttttgccgaagcttggaaggctcaatttccagacagcgagcccccacgaatggaactccggtccgtcggggatattgagcaagagctggagaggtgcaaagcctcaataagaaggctggaacaggaggtgaatcaagaacggtttcggatgatttacttgcagactctacttgctaaggagaaaaagagctatgacaggcagcgctggggcttccgtcgcgccgctcaggccccagacggcgcctctgagccaagggcctctgcaagtcggccacagccggcccccgccgatggggccgacccaccaccagccgaggagccagaagcacgccccgacggggaggggagtcctggaaaggctcggccaggcacggcgcgtcgccccggcgctgccgccagtggcgaacgagacgatcgaggaccccccgcatctgttgccgccttaaggtcaaatttcgagcgtatccggaaaggccacggccagcctggcgctgatgccgagaagccattctacgtgaatgttgaatttcaccatgagaggggccttgtgaaagtcaatgacaaggaagtctccgaccgaatcagttcactgggttcgcaagctatgcagatggagagaaagaagagtcagcatggcgctggctcttctgtgggagacgcatcccggccaccctatcgcggaagatcatctgaaagctcctgtggtgtggatggggactacgaagacgcagagctaaacccaagatttctcaaagacaatctgatcgatgcgaatggaggcagccggcccccctggcctcccttggagtatcaaccttatcaatctatttacgtaggcgggatgatggagggcgaagggaaggggcccctcttgcgttcccagtcaacatccgagcaggaaaagagattgacctggcccaggaggagttactcacctcggtcttttgaggactgcggcggagggtataccccagattgcagctctaatgagaaccttacatcttcagaagaagacttttcaagcgggcagtctagccgcgtgtccccctcaccaaccacatatcggatgttcagagacaagagcaggagtccaagtcagaattcccagcagtcctttgactcttcatccccaccaactcctcaatgtcataaaaggcatcgacattgccctgtcgtggtgtcagaggctactatcgtgggtgtgcgcaaaacgggccagatatggccgaatgacggtgaaggcgctttccatggtgacgctgacggctctttcggaactccaccgggatacggatgtgctgcagggcggcccccgcacttgacagaactgccagtgcagcatcagtag

SEQ ID NO: 14103 - DNA, 4704 bp, synthetic construct
  misc_feature 1..4704: note = Description of Artificial Sequence: Synthetic coding sequence
  source 1..4704: mol_type = other DNA
atgaatgtagagaaggctgaattttgcaataaatcgaagcagccaggtcttgctagaagccagcataatcgatgggccggtagtaaggagacctgtaacgaccgtcgcacaccgagcaccgaaaagaaagtggacctaaacgctgacccactgtgcgagcggaaggaatggaacaagcagaagctgccctgcagcgagaatcctagagatacagaggacgtgccctggatcaccttgaactcttccatccaaaaagtgaatgaatggttttctaggtccgatgagttgctgggctcagatgattcccacgacggcgagagcgaatctaatgctaaggtcgccgatgtcttggacgtcctgaatgaggtcgacgagtatagtggctcttcagagaaaatagacctcttggcctccgatcctcacgaagcactgatctgcaaaagtgagcgagtccactctaaaagtgtggaatctaacatcgaggacaagattttcgggaaaacctatcgaaagaaagcctccctgcctaacctgagccacgtgactgagaaccttattatcggggcattcgtaacagagccccagattattcaggagaggccgttaacaaacaaactgaagcgcaagaggaggcctactagcggtctgcaccctgaagattttattaagaaggctgatctggcagtgcagaaaacccccgagatgattaaccaaggcactaaccagactgagcagaacggacaggtaatgaatataactaactcagggcatgaaaataagaccaagggggattccatccagaatgagaagaaccctaatccaatcgaatcactagagaaagagtccgcctttaagaccaaagcggaaccaatctcttctagtataagcaacatggaactcgagctgaatatccacaattctaaggcccctaaaaagaatcgtctcagacgtaaatcttctacacggcacatccatgccctcgagctcgtggtttcaagaaacttgtcccctcccaattgcacagagctgcagatagactcatgtagctcttctgaagagataaaaaaaaaaaagtacaatcagatgccagtgagacacagccgtaatctccagttgatggagggcaaagagccagcgacgggcgcgaaaaagtccaataagccaaatgaacagaccagcaaacggcatgactccgacacattcccggagttgaagctcacgaacgctcccggatcctttaccaagtgttctaataccagtgagttaaaagaatttgtgaatcccagcttgcctagagaagaaaaggaagaaaagctagagacagttaaggtttccaacaatgcggaagaccccaaagatctgatgctgtcgggagagagagtgttacagacagaaagatcggtggaatcctctagtatctcactagtcccagggacggactatgggacacaagagagcatctccctgctggaggtctccaccttgggtaaggcaaagaccgagccaaataaatgcgtttctcaatgcgccgcatttgagaatcctaagggacttattcacggctgcagcaaggacaaccggaacgacaccgagggctttaagtacccactcggccacgaggtaaaccactcgagggagacaagcatcgagatggaagaaagcgaactggacgcccaatatttgcagaatacttttaaagtgtcaaaaagacaatcgtttgcccccttcagtaatcccgggaatgccgaagaagaatgcgctacatttagtgcccattcagggtccctgaagaagcaaagcccaaaggtgacttttgagtgtgagcagaaggaggagaaccagggtaagaacgaatctaatatcaaaccagtgcagactgttaacattacagcaggcttcccggtggtggggcagaaagataagccagtggataatgccaagtgttcaatcaaaggggggagccggttttgcctatcatctcagttcagaggaaatgaaactggcctgatcacaccaaacaaacatggcctgctgcagaatccatatagaatacctccgttatttccaattaagtcttttgtcaaaacgaagtgtaaaaagaatctccttgaggagaatttcgaggagcactctatgagccctgagagggaaatgggaaacgagaacatcccatcaaccgtcagcacgatctcaaggaacaacataagggaaaatgtctttaaggaggcatcttcctcgaacattaacgaagtcggctctagtaccaatgaggtgggtagctccataaatgagataggttcaagcgacgagaatatacaagcagagctgggccgaaatcgagggcctaagttgaacgcaatgctgaggcttggtgtgctacagcctgaggtgtataagcaatcgctccctggaagtaattgtaagcaccctgaaatcaagaagcaggagtacgaggaagtggtgcagacagtgaacaccgatttctcaccctacctgattagcgataacttggaacagccaatggggagctctcacgccagccaggtgtgcagcgaaaccccggacgacctgctggatgacggcgaaatcaaagaagacactagcttcgcagaaaatgatattaaagaatcgtcagcagtgtttagcaagagtgtgcaaaaaggagagctgtcccgcagcccctccccattcacccatacccacttggcccaagggtatcggagaggagccaagaaattggagtctagtgaagagaatttgtcatccgaagacgaagagctgccatgttttcaacacctgctctttggcaaggtcaacaatataccttcccagagcactcggcacagcactgtcgcaactgagtgcctgagcaaaaacaccgaggaaaacctgttgagcctgaaaaacagtctgaatgactgtagcaaccaggtcatcttagccaaagccagtcaggaacaccacctgagcgaagaaacgaagtgttcggcgtcccttttctctagccagtgttcggaactcgaagacctaaccgcaaataccaacactcaggatccattcctgataggctcaagcaagcagatgagacatcagtctgagagccaaggcgtgggactatccgataaagaactagtgtccgatgacgaggagcggggcactggactggaggagaataaccaagaggagcagtcaatggatagcaatttgggggaagcagcctcaggctgcgagagcgagactagtgtgagcgaggactgctctggattgagttcccagtcagacatccttactacacagcagcgggacactatgcagcacaatcttattaaactgcagcaggaaatggctgagctcgaggccgtgctagaacagcatggctcccagccctcaaacagctaccctagcataatctctgactcgtctgccctggaagacctgagaaaccccgagcagtctacttcggaaaaagcagtgctaactagccagaagtcttccgagtacccaattagccagaacccagagggcctgagcgccgacaaattcgaagttagcgccgactcctccaccagcaagaataaggagcctggcgtggagagaagcagccctagcaagtgcccgtcattagatgacaggtggtacatgcatagctgttccggaagtttgcagaataggaattaccccagccaggaagaactgatcaaggtcgtagacgttgaagaacagcagctggaggagagtgggccacacgatcttaccgagacgtcctatttacccaggcaagatctcgaagggaccccatacttggaaagcgggattagtctttttagcgacgaccccgagtctgatccctcagaggatcgtgctcctgaatccgcacgggtgggaaatatcccatcatccacaagcgccctgaaggtgcctcagttgaaggtcgccgagtcagcacaatcccctgccgccgcccacactactgatactgctggctacaacgccatggaggaatcagtctcccgcgaaaagccggaactcacagcatccactgagagggtgaataaaagaatgtcaatggtagtaagtggccttaccccagaggaatttatgttagtttataaattcgcccggaaacaccatatcaccctgaccaatcttatcaccgaagagactactcacgtcgtgatgaaaaccgatgccgagttcgtgtgcgagcggacgctcaaatatttcctgggaatcgccggcggtaagtgggtcgtgtcttacttttgggtgactcagtctattaaggagagaaagatgttgaatgaacacgactttgaggtccgaggggatgtcgttaatggtcgtaaccatcagggacctaaaagagccagagagtcccaggatcggaaaatctttcgcggattggaaatttgttgttatgggcccttcactaacatgcctactgatcaactggaatggatggttcagctgtgtggcgccagcgtggtgaaggagctgagttcatttaccctgggcacgggtgtacaccctatagttgtggtacagccggacgcatggactgaagataacggcttccatgcaattggtcagatgtgcgaggctcccgtggtgactagggaatgggtcctggacagcgtcgcactctaccaatgccaggagttagacacatatttgatcccgcaaattccccacagtcattactag

SEQ ID NO: 14104 - DNA, 4875 bp, synthetic construct
  misc_feature 1..4875: note = Description of Artificial Sequence: Synthetic coding sequence
  source 1..4875: mol_type = other DNA
atggatttatctgcccttagggtcgaggaggtgcagaacgtcatcaacgccatgcaaaagatcttggaatgccccatttgcctagaacttatcaaggagccagttagtactaaatgtgaccatattttttgcaagttctgcatgttgaaacttttaaatcagaagaagggtccttctcagtgtccactctgtaaaaacgatattacaaaacgctctctccaggagagcacacgattctcgcaactcgtcgaggagttactgaagatcatttgcgccttccaattagacaccgggctggaatacgcgaacagctacaacttcgccaaaaaggagaataatagtccagagcacctcaaagacgaggtttcaattatacagagcatgggctatagaaatagagcaaagcgtttgttgcaatccgagcctgaaaatccatctctgcaagagacatccctttctgtacagttgtccaacctgggaactgtcaggacactgcgaacaaagcagcgaatacagccgcagaagacatcagtctacatcgagctgggatctgacagctccgaggatactgttaataaagcaacctactgtagtgtgggagatcaggagctgctccagattacccctcaaggcacgcgagatgaaatttccttagactctgctaaaaaagcggcatgtgagttctccgaaaccgatgtgaccaacactgaacatcaccaacctagcaataatgacctcaatactacggaaaaaagggccgccgagcggcacccagaaaagtatcaagggagctctgtgtctaacctacatgtggaaccatgtggaactaacacacatgcctcctccctccaacacgagaactcatccctgctgttgacaaaggaccggatgaatgtggagaaggccgagttttgcaataagtcaaaacaacctggcctcgctcgcagtcagcacaatcgctgggccgggtcgaaggaaacatgtaacgataggcgaacaccaagcacggaaaagaaagtagatctcaacgctgatccactgtgtgagcgaaaggagtggaacaaacagaagcttccttgcagtgagaatccccgagacaccgaggatgtgccttggatcaccttgaactcaagcatacagaaggtcaacgaatggttctccaggagcgacgagctcctgggcagcgatgactcccacgacggtgagtccgagagcaacgctaaggtagccgacgtgttggacgtactcaacgaggttgatgagtattcaggttcgtctgagaagatcgatctgctggcctccgaccctcatgaagccctcatctgcaaaagtgaacgcgtgcattcaaaatccgtggaatccaatatcgaagacaaaatctttggaaaaacttacagaaagaaggcaagtctgcccaatctttcccacgttactgagaacctgatcatcggggcatttgttacggagccccagattatacaggaacggcccctgacgaataaacttaagcggaagagacggccaacttctgggctgcatcccgaggactttatcaagaaagctgacttagcggtgcagaaaacacccgaaatgatcaaccagggcaccaatcagaccgagcagaatggtcaggtaatgaatattactaattccggccatgagaataaaacgaaaggcgacagtatccagaatgagaagaatcctaatcccattgaatccctggaaaaagagagtgcctttaagacaaaagctgagcccatctctagttcaatctctaacatggagctggagttgaacatccataattccaaagcccccaaaaagaatcgtctcagacggaaatcctcaaccagacatatacacgccttggagttagtcgtaagtagaaatctttccccacccaattgtaccgaactgcaaatcgacagctgctcatcatccgaggaaatcaagaagaaaaaatacaaccaaatgcccgtgagacattcacgaaatcttcaactcatggaggggaaggagccagctacaggagctaagaagtccaacaagcccaatgaacagacatccaagcgccacgactcagatacattccccgagcttaagttaacaaacgccccaggcagtttcacaaagtgctctaacacctccgagctgaaagaattcgttaacccctctctccctagggaggaaaaggaagaaaaactggaaacagtcaaggtgtcaaacaacgcagaagaccccaaggaccttatgctgagcggcgagcgcgtgttgcagaccgagcgctctgtggaaagctcttctattagtttagtgcccgggactgactatggcacacaggagagcatttctcttctagaggtctctactctgggaaaggctaaaacagaacctaataagtgtgtgtcacaatgcgccgcattcgagaaccccaagggtctaattcatggttgttctaaggacaatcgaaacgatactgaaggcttcaaataccccttgggccacgaggtgaatcactcccgcgagacatccatcgagatggaggagagcgaacttgacgcacagtacctgcagaacacattcaaagtgtcaaaacggcaatcatttgccccctttagtaacccgggaaatgccgaagaagagtgtgccacattttctgcccactccgggagtctgaagaagcagagtcctaaggtaacttttgagtgcgagcagaaggaggaaaatcaggggaagaatgagagcaacattaaacctgttcagacggtgaatataaccgcaggctttccggtcgtgggccaaaaggacaagcccgttgataacgccaagtgttccatcaagggtggatcacggttttgtcttagcagccagtttcgggggaacgagactgggctcattactcctaacaaacacgggctactccagaacccatatagaatcccccctctgtttccaataaagtccttcgtgaagaccaaatgcaaaaaaaacctcctggaagaaaacttcgaagagcactcaatgtctcctgaacgagagatgggaaatgagaatattcctagcactgtgtccaccatcagccgaaacaacattcgagagaacgtttttaaagaggccagcagctcaaacatcaacgaggttggctcttcaacaaatgaagtgggaagcagtatcaacgagatcgggtcttccgatgagaacattcaagctgaactcggccgtaaccgcggccctaaactgaacgccatgctcaggcttggcgtcctccagcccgaggtgtacaaacagagcctaccaggttccaattgtaaacaccccgagataaaaaagcaggagtacgaagaggtggtgcagaccgtgaacaccgacttttctccctacctcatctctgacaatctcgaacagcctatgggctccagccacgccagtcaggtgtgctctgaaacgcccgacgatctccttgacgatggagagattaaggaggacacaagtttcgcggagaatgacatcaaagagagcagtgccgtcttcagtaaaagcgtgcagaagggcgagctcagtcgatccccgagtccattcactcacacgcacctcgcccagggatatcgacgaggtgcaaaaaaactggaaagttctgaagagaatctgtcctcggaagatgaggagctcccatgttttcaacacttgttgtttggcaaggtcaataatatcccaagtcagtcaacacgccacagcacagtggctactgagtgcctttccaagaacacagaggagaacctgctgagcctgaagaattccctcaatgactgctcaaatcaggtaattctggccaaggcgagccaggaacatcacctgagcgaggaaaccaaatgtagtgccagtttgttcagctcacagtgttcagagttagaggatctgaccgccaataccaacacacaggatcctttcctcatcggcagctccaagcagatgcgacatcagtccgaaagccagggtgttggcctcagtgataaggaactcgtgtccgacgacgaggagaggggtacggggctggaagagaataatcaggaggaacagagtatggactctaacctgggggaagctgcttcagggtgtgaatccgagacatctgtgtccgaagattgttcagggctgtcatctcagtctgacattttgacgacacagcagcgcgataccatgcagcacaacctgatcaagctgcagcaggagatggcagaactggaagccgtccttgagcagcatggctcccagccctcaaacagctatccctctatcatttcagactcttctgccctggaagacttaagaaaccctgaacagagcacctccgagaaagatgctgagtttgtatgcgagcggaccctaaaatatttcctaggcatcgcaggcggcaagtgggttgtgtcctacttctgggtcacacaaagtataaaagagaggaagatgttgaacgagcatgatttcgaagtccgcggagatgttgtgaacggccgtaatcaccaaggtccaaagagagcaagagaaagtcaggacaggaaaatttttcgtggtctggaaatttgctgttacggaccctttacaaacatgccaactgaccaactggagtggatggtccagctctgcggagccagtgtagttaaggaattgagcagctttactctgggcactggtgtgcatcctattgtcgtcgtccagcctgacgcctggaccgaggacaatgggttccatgcgatcgggcagatgtgcgaagctccagtggttactcgagaatgggtgctagattctgttgcactctaccaatgccaggagctcgatacttacctgataccacagatccctcattcacactactag

SEQ ID NO: 14105 - DNA, 2043 bp, synthetic construct
  misc_feature 1..2043: note = Description of Artificial Sequence: Synthetic coding sequence
  source 1..2043: mol_type = other DNA
atggatctctcggcgctgagagtggaagaggtgcagaacgtaatcaacgcaatgcagaaaattctggagtgtccaatttgcttagagctgattaaggaacctgtcagcactaagtgtgatcacattttttgcaaattttgtatgttgaaactcctcaatcagaagaaggggccctcccagtgcccactgtgtaaaaacgatattactaaacggtctttacaagagtccacaagatttagtcaactagtggaagagcttctgaagattatttgcgcatttcagttggacacaggattggagtatgccaatagctataattttgccaaaaaagagaacaactctcccgagcatctgaaggatgaggttagcatcatacagagcatgggatatcgcaaccgtgctaagcgcctcctgcagagtgagccagagaacccttccttgcaagagacatccctcagcgttcaactcagtaaccttggcacagtgaggacactgcgcactaagcagcgcatccagccgcagaagacatccgtctatatcgagcttggcgaagctgctagcgggtgcgaatcagagacgtccgtcagcgaagactgtagtggtctctcttcacaaagcgatatcctgactactcagcagagggacaccatgcaacacaatctgatcaagctgcagcaggaaatggctgagctcgaggccgtgctcgagcaacacggttcccagcccagtaactcatacccgtccatcatcagcgactcatcagcattggaagacctgcggaacccagaacagtccaccagcgaaaaggctgtcctcacctcacagaagtctagcgaataccccatcagtcagaaccccgaagggttgagcgccgataaatttgaggtctccgcagacagttcaacttccaaaaacaaagaacccggagtagaacggtcctccccatcgaaatgcccgagtctggacgataggtggtatatgcacagttgctctggatccctgcagaacagaaattacccctcacaggaagagctgatcaaggtcgtcgacgttgaagagcagcaactagaggagtcaggtccgcacgacctgacagaaactagctacctgccacgacaggatctggaaggaacgccttacttggagagtgggatcagcctgttcagcgacgatcccgagtccgatccatccgaagatagggcccccgaatcggccagggttggaaatattccttctagtaccagcgccctgaaagtgccacagctgaaggttgctgagtcagcccaatcccctgcagccgcccacaccacagacactgcaggatacaacgccatggaagaatccgtttctcgggaaaaaccagaattgaccgcctctacggagcgggtgaataagagaatgtccatggtggtgtccggactcaccccagaggagtttatgttagtctataaatttgcaagaaagcaccacatcaccctcactaatttaattacagaggagactactcacgtcgtaatgaaaactgacgctgagttcgtatgcgaacggacccttaagtactttctgggaatcgctgggggaaagtgggtggtgtcctacttttgggttactcagtctataaaagagcgcaagatgttgaacgaacacgattttgaagttcgcggagatgtagttaatggaagaaatcaccagggccccaagcgtgccagagaaagtcaggaccggaaaatctttcgcgggttggaaatctgctgttacggacctttcaccaatatgcccacagatcagttagaatggatggtccaactgtgcggcgcctctgtcgtcaaggagctttcttcttttaccctgggaactggagtacacccaattgtcgtggtccagcccgatgcatggaccgaggataacggcttccatgcaattggccaaatgtgcgaagcccctgtagtcacacgggagtgggttctagacagtgtcgccctctatcagtgtcaagagcttgatacataccttatcccccagatcccgcactctcactactag

SEQ ID NO: 14106 - DNA, 2166 bp, synthetic construct
  misc_feature 1..2166: note = Description of Artificial Sequence: Synthetic coding sequence
  source 1..2166: mol_type = other DNA
atggacctttctgcgttgcgagtcgaagaggtgcagaatgtgataaacgccatgcaaaagattttggaatgccctatctgtctggagctgattaaggaacctgtcagtacaaagtgcgaccacatcttttgtaaattctgcatgctgaaacttttgaatcagaaaaaggggccgtctcagtgccctttgtgcaagaacgatattaccaagcggagcctccaggagagtactcggttttcccagctcgtggaggaactcctgaagattatctgcgcattccagctggatacaggattggagtacgcgaattcctacaattttgccaagaaggaaaacaactcgccagagcatcttaaggacgaggtctctattatccagtccatgggttaccgtaatcgtgccaaacggttactacagtctgagccggagaaccctagcttgcaggaaacctctctctccgtccaactgagcaatctggggacagttcggaccttgcggactaagcaaaggatacagccccagaaaaccagtgtctatatcgaactggggtccgactcatccgaagacacagttaacaaggcaacgtattgcagtgtgggggatcaggaactcctccagatcactcctcaggggactcgcgatgagattagtctagactccgctaagaagggagaggcagctagtggatgcgagagtgaaactagcgtgagtgaggattgtagtggcctcagtagccagagtgacattctcacaacacagcagagggacactatgcagcataatctgattaagcttcaacaggaaatggcagaacttgaagctgtgctggagcagcacggatctcagccatcaaacagctacccctccattatcagtgactcctctgcattggaggacctcagaaaccctgaacagtccacatcggaaaaggctgtattgacttcccagaaaagcagcgagtatccaatcagccaaaaccccgagggactttcagctgacaaattcgaggtttccgcagatagcagtacctcaaagaataaagaacccggcgtcgagcgatcgtctccatctaagtgtccttctctcgatgaccggtggtacatgcactcttgctcagggtccctacagaacaggaactatccaagccaggaagagctgatcaaagtagtggacgtggaggagcagcagctcgaggagtccgggccccacgatctgacagaaacttcttacttgccccggcaagatctggaaggcacaccctacctggaaagcggtattagcttgtttagcgatgatcccgagagtgacccttcagaagacagggctccagagtcagccagagtcgggaatatcccatcctccacaagcgcccttaaagtaccccagctgaaagtagccgagagcgctcagtctccagcagctgctcacacaaccgacaccgcgggctacaatgccatggaagaaagtgtttctcgcgagaagccggaactaaccgccagtactgagcgggtcaacaaacgtatgtctatggtggtttccgggttgacacccgaggagtttatgcttgtgtataagtttgcacggaaacatcatatcacacttacaaacctgattacagaggagacgactcatgtcgtcatgaaaaccgacgccgaattcgtgtgcgaaaggacactaaaatatttcctgggcatcgccggcggaaagtgggtggtgagctatttctgggtgactcagagcataaaagaacgtaaaatgttaaacgagcacgattttgaggtgagaggggacgtggtgaacggcagaaatcaccaggggcccaaacgagcacgcgagagccaagaccgtaaaatctttcgagggctggaaatctgttgttatggtccattcacgaacatgccaaccgatcaattagagtggatggtccagttgtgcggagcctctgtcgtcaaggagttgtcgtcgttcactttggggaccggtgtgcacccaatcgttgttgtgcagcccgacgcatggaccgaagataatggattccatgccattggccaaatgtgtgaggccccagtcgttacaagggaatgggttctggactcagtagccttatatcaatgtcaggaactggacacgtacctgatcccacagatccctcactctcattattag

SEQ ID NO: 14107 - DNA, 4797 bp, synthetic construct
  misc_feature 1..4797: note = Description of Artificial Sequence: Synthetic coding sequence
  source 1..4797: mol_type = other DNA
atggacctgtcggctttaagggtcgaggaagtgcaaaacgtgattaacgctatgcagaaaattcttgaatgtccaatttgtttagaactgatcaaggaacccgtctctaccaagtgcgatcacatcttctgcaagttctgtatgcttaagcttctaaaccagaagaaaggcccgagccaatgtccactttgcaaaaatgacatcaccaagcgttcgctgcaggagtcaacccggttttcccagctggtggaggaactgttgaagatcatttgtgcttttcagctggatacaggcttagaatacgccaactcttataactttgctaagaaagaaaacaactcccctgaacacctaaaagatgaggtgtccatcattcagtctatggggtatagaaacagggcaaagaggcttctgcagagcgagcctgaaaacccctcactgcaggaaacaagcttgtcagtgcagttaagcaatctgggtacggtgagaacactgagaacaaaacaacgaatccagccacagaaaacttccgtatacattgaactcggcagcgattcatcagaggatacagtcaacaaggctacctattgctctgtcggggaccaggagctcctgcagatcacacctcagggaacgcgagatgaaatcagcttggattctgccaaaaaagcagcttgcgagttctccgaaactgacgtgactaataccgagcaccatcagccaagcaataacgacctcaataccaccgaaaagagggccgccgaaaggcaccccgagaaatatcaaggaagctctgtgtcaaatctgcatgttgagccctgcgggaccaatacacacgcgagcagtctccagcatgagaatagctccctcctactcacaaaggatcgcatgaacgtcgagaaggctgagttttgcaacaaaagtaagcagccgggactcgcccgcagtcagcacaatcgatgggccgggtcaaaggaaacgtgcaacgacaggcgcaccccatcaacagagaaaaaggtggatctgaatgccgaccctctctgtgaaaggaaagagtggaacaaacagaaactcccttgctctgaaaacccccgggacactgaggacgtgccatggattacactgaactccagtattcagaaagtgaacgagtggttttccaggagtgacgagcttttgggtagtgatgacagccatgacggcgagagcgaatctaatgcaaaggtcgcagacgtcctggatgttctgaatgaagtggatgaatactccggcagctctgaaaagatcgatctcctagccagcgacccacacgaagccctaatttgcaaaagcgagcgggtgcactccaaaagtgtagagagcaacatagaagacaagatcttcgggaaaacgtacagaaaaaaggcaagcctacccaatttgtcccatgtaaccgagaacttaataatcggggcatttgtcaccgaacctcagattattcaagaacggcccttgaccaacaaactaaagaggaagcgccgccccacaagcgggctacaccctgaagacttcatcaagaaagcagatctggcggtgcagaagacaccggaaatgatcaaccaaggcacgaatcaaaccgaacagaatggacaagtgatgaacattacaaatagtggacatgaaaacaaaacaaaaggagatagcatccaaaacgagaaaaatccaaaccctatcgagtcactggaaaaggagtctgcattcaagaccaaggctgagcccatctccagtagtatctcaaatatggagctcgaactcaacattcacaattctaaagcgcccaagaaaaaccggctgaggcgcaagagttcgactaggcacatccacgctctcgaactggttgtgtctagaaatctgtcacccccgaattgcacagaacttcagatagacagttgcagttccagcgaggaaattaagaagaaaaaatacaatcagatgcctgttaggcactctcggaacctgcaactcatggaaggcaaggagcccgccaccggagccaagaaatctaataaaccgaacgagcaaacttccaagcgacatgattcagatacctttcctgaactgaaattgaccaatgcacccggctcgttcactaagtgttctaacacatccgagctcaaggagttcgtcaatccctcccttcctagggaggagaaagaagaaaagttggagacagtcaaagtgtcaaataacgcagaagatccgaaagatctcatgctgagcggcgaaagggtgcttcagaccgagcgtagcgtagagagctcttctatttccctggtgccaggaacagactacggcacccaggagtcgatttctctgctagaggtgtctaccttgggtaaagccaagaccgagcctaacaaatgcgtatctcagtgtgctgcttttgaaaatcccaagggactgatccacgggtgctctaaggataaccggaatgacacagaaggtttcaagtaccctctggggcatgaggtgaaccattctagggaaacgtccattgaaatggaagaaagcgagctggatgctcagtacctacagaatacttttaaggtgtctaagaggcagtccttcgctcctttctccaaccctggaaatgctgaagaagagtgtgccactttcagcgcacacagtgggtcactcaaaaagcaaagccccaaagtcacctttgaatgcgagcagaaagaggaaaatcagggaaaaaacgaatctaacattaagcctgtacagaccgtcaatatcaccgctggcttcccagtggttgggcagaaagacaagcctgtcgacaacgctaaatgcagcatcaaagggggttctaggttctgcttgagctcccagtttaggggtaacgagaccgggctcatcacaccgaacaagcatggattactccagaatccctacaggattcctccactgttccccatcaaaagctttgtgaagaccaagtgcaagaagaatctccttgaggagaacttcgaagagcactcaatgagtcctgagagagagatgggaaacgagaacatcccttctactgtaagtaccataagtcgcaataatattagggaaaatgtgttcaaagaggcttcttcaagcaatatcaatgaggtgggctcaagcacaaacgaggtggggtcatctatcaacgaaatcggcagctcggacgaaaacatacaggccgagctgggacggaaccgaggacccaaattgaacgctatgcttcgtttgggcgtcctccaacctgaagtgtataagcagagcctccccggctccaactgcaaacacccagagattaagaagcaagaatatgaagaagtggtgcagaccgtgaacacggacttctcaccatatctgattagtgataacctggaacagcccatggggtccagccacgcatctcaggtgtgcagcgagacgccagatgatctcttggacgacggtgagattaaagaagacacatcgttcgccgaaaacgacattaaggaatcttccgcagtgttttcaaaatctgtgcagaaaggtgaattgtcacgctccccatctcccttcacacatacccacctcgcccaggggtatcgaaggggagctaaaaagctagaaagttccgaagaaaatttatcctcggaagatgaggaactgccgtgtttccagcacttgctgttcggaaaggtcaacaatattccttcccagtccacgcggcacagcacagtagctacagagtgtctttctaagaatacagaagaaaacctgctgtcccttaaaaactcactgaatgattgtagtaatcaggttatcctcgccaaggctagtcaagagcatcacctatctgaggagacaaagtgctctgcttccctgtttagtagtcaatgtagtgaactggaagacctgaccgccaacacgaatacccaggaccccttcctgataggctctagcaagcaaatgaggcatcaatcggaatcacagggggtgggcctctctgacaaagagctggtctccgacgacgaggaacgggggaccggccttgaggagaacaaccaggaggaacagtccatggacagtaacctcggagaagctgcttctggatgcgagtccgaaacatcagtctccgaggattgctccggtttatcctcccagagtgatattctgacaacccagcagcgtgacaccatgcaacacaatctcataaagctccagcaggagatggccgagcttgaggctgtgttggaacaacacggtagccagcccagtaattcttatccaagtatcatttctgactcatcagcccttgaggatctgcgaaatcccgaacagagtaccagcgaaaagggagttacgcagtccatcaaagaacggaagatgctcaatgagcacgacttcgaggtccggggcgacgtcgtgaatggacggaaccaccagggtcctaaaagagcaagagagtcacaggatcgcaaaatcttccggggactcgagatctgttgttacgggcctttcaccaacatgccaactgatcagctggagtggatggtgcagttatgcggcgcatccgttgttaaagaactgagctcattcacactgggcaccggagtgcatccaatcgtggtggtgcagcccgacgcatggaccgaagataatggcttccatgctatcggtcagatgtgtgaggcaccagttgttacccgtgaatgggtgctagacagtgtagctctctaccagtgtcaggagctcgatacatatttgatcccccagatcccccactcacattactag

SEQ ID NO: 14108 - DNA, 5592 bp, synthetic construct
  misc_feature 1..5592: note = Description of Artificial Sequence: Synthetic coding sequence
  source 1..5592: mol_type = other DNA
atggacttgtccgccttacgggtcgaagaggtgcagaacgtgattaatgcgatgcagaagatactggagtgtccgatttgccttgaactgattaaggaacccgtgtccactaagtgtgaccacatcttttgcaagttttgcatgttaaagctgttaaatcagaagaaggggccatctcaatgccctctatgcaaaaacgacattaccaagagaagtttacaggagagtacccgcttttcacagttggtggaggaactgctgaaaataatttgtgcgttccagctggacacaggcctcgagtacgctaatagctataactttgccaagaaggagaacaactcgcctgagcacctgaaggatgaggtgtccattatccagagtatgggctaccggaatcgggcaaagagactactccaatccgaacctgaaaaccccagcctgcaggaaacctctctgtcagtgcaactttctaacctaggcacagtccggaccctgcgcaccaagcagagaattcaacctcagaagacatctgtgtatatagagcttggctctgattcctctgaagacaccgttaacaaagcaacatattgctccgtgggggatcaggagctgctgcaaattaccccacagggaacccgagatgagattagtttggattcagcaaaaaaggcggcgtgcgaattctcagagacagacgtcaccaatacggaacatcatcaaccttccaacaacgacctgaacaccactgaaaaaagagcagctgagaggcaccccgagaaatatcaggggtcctcagtaagtaatcttcacgtcgaaccatgcggcacgaatacccatgcaagttccctccagcatgaaaacagttccctgctcctcactaaggacagaatgaatgttgaaaaagccgagttctgtaataaatcaaagcaaccaggcctggcacggagccagcacaaccggtgggcggggtctaaggagacttgtaacgaccgtagaacacccagcaccgaaaagaaagtcgatctgaacgctgatcctctgtgcgagcgcaaagagtggaataagcagaaactgccgtgctctgagaaccccagggatacagaagatgtcccctggattaccttgaactcgtccattcaaaaagtaaacgaatggtttagcagaagtgatgagctgcttgggtcagacgacagccatgatggggaatccgaaagtaacgccaaagttgccgatgttctggatgtacttaacgaggtggatgagtacagcggaagctccgagaaaatcgatctcttggcctctgacccacacgaagcacttatctgtaagtctgagcgggtccactctaagagcgtcgagtcaaacatcgaggataagatttttggtaagacttatcggaagaaagcctctctccccaacttatcccacgtcacggagaaccttatcataggcgcctttgtaactgagccacagatcattcaggagcgacccctgaccaataagctaaagaggaaaaggaggcccactagcggtcttcaccctgaggactttattaaaaaggcagaccttgccgttcaaaagacgccagaaatgattaatcaggggacaaatcaaacggaacagaacggacaggtgatgaacatcacaaattccgggcacgagaacaagactaaaggtgacagcattcagaacgaaaagaatcccaacccaattgagtctttggagaaagaaagtgctttcaagacaaaagcagagcctatcagtagctccataagtaatatggagctcgaacttaacatccacaactccaaagctcccaaaaagaataggctccggcgtaagtcaagcaccagacatattcacgccctcgagctggtggtatctcgcaacttgagcccacctaactgtacggaactgcagattgatagctgcagtagtagcgaggaaatcaaaaagaaaaagtataatcagatgcctgtgcgccattccagaaacttgcagctgatggaggggaaggagcctgcaaccggggcgaagaagagcaacaagccaaatgaacagacttcaaaacgtcatgactcagatacctttcctgagttaaagctcaccaacgctcccggaagcttcactaagtgcagcaacacctctgaacttaaagaattcgttaaccccagtcttcccagggaagaaaaggaggaaaaactcgagactgtgaaggtaagtaacaatgcagaggatccaaaagatctcatgctgtccggagaacgtgtccttcaaacagaacgatccgtggaaagtagctctatcagtttggtacctggtaccgattacggcactcaggagagcatatcattgctggaggtgagtaccctgggaaaagctaaaaccgagccaaataagtgcgtatcgcagtgtgcagctttcgaaaatcccaagggtctgattcatggctgctctaaggacaacagaaacgatacagagggttttaagtaccctttagggcatgaagtaaaccatagcagagaaacatctattgagatggaggagagcgagctagatgcccagtatctccagaacaccttcaaagtgtcaaagaggcaaagctttgcaccattctctaaccccggcaatgcggaggaggagtgtgccacgttcagtgcacatagcgggagtcttaagaagcagagcccaaaagtgacattcgaatgcgagcaaaaggaagaaaaccaggggaagaacgaatctaatatcaaacctgtccaaacagtgaacattactgcaggcttccccgtggtgggtcagaaagacaaaccggtcgacaacgcgaagtgtagcattaagggcggttcacgtttttgtcttagtagccagttcagaggcaatgaaactgggttaattaccccgaacaagcacgggctgcttcagaacccgtatcggataccgcctttgtttccgatcaaatcatttgtgaagacgaagtgcaagaaaaatctgctggaggaaaatttcgaagaacactccatgagtcccgagcgtgagatgggaaatgagaatatccctagcacagtttcaacgatctctaggaacaatatacgcgagaacgtattcaaagaggctagctcctccaacataaacgaggttgggtcttccaccaacgaagtaggtagttccataaatgaaatcggctcctccgacgaaaatattcaagctgagctggggcgtaatcgcggcccgaaactgaatgctatgctgcgtctgggggtcctgcagccagaggtgtataaacagtctttgcctggatcaaactgcaaacatccggaaatcaagaagcaggaatacgaggaagttgtgcagactgtcaacactgacttcagtccgtacctgatttccgataatctggagcagccaatgggttcttctcacgcctcacaagtgtgctccgaaacacctgatgacctgcttgatgacggagagatcaaggaggacacaagcttcgctgaaaacgacataaaggaatctagcgccgtcttcagtaagtccgtgcagaagggggaactgtcccgaagcccctctccgtttacccatacccacttagcacaaggatatcggagaggcgcaaagaagctggaatctagcgaggaaaacctctcctcagaagatgaagaactgccgtgttttcagcacctgctctttgggaaggtaaacaacataccatcacagagtactcgccactccacggtcgcaactgagtgtcttagcaagaacactgaagagaatttgctgtctttgaaaaacagcctgaacgactgctctaatcaagtgattctggctaaagcgtcgcaggagcaccacctgagtgaggaaactaagtgttccgcctcccttttcagctctcaatgttccgagctggaggaccttaccgctaacacgaacacacaagatccttttctgatcggctccagcaaacaaatgagacatcagtctgagagccagggggtaggcctgtccgataaggagctggtgagcgatgacgaagagaggggaactggcttggaagagaacaatcaggaagagcagagtatggactcaaacctgggcgaagccgcgagcggatgcgagagcgaaactagcgtgagtgaagattgcagcggtctgtcctcccagtcagacatcctgaccacccagcaaagagatacgatgcagcataacctgatcaagcttcagcaggagatggcagaactggaggccgttctcgagcagcatgggagtcagccttctaacagctacccttccatcattagtgatagctcggccctcgaggacctgaggaaccctgaacagtcaacgtccgagaaagctgtgctcacctcacagaagtccagtgagtatcccatttcccagaaccctgagggactgtctgccgataaattcgaggtctcagctgacagctcaacttcaaaaaacaaggaacccggcgtggagcggagttctccgagtaaatgcccttctttggatgaccgctggtacatgcacagctgttcgggttcgctgcagaatcgaaactacccctctcaggaggagctgataaaggtcgtggatgtggaagagcagcagctcgaagaaagcggcccccacgacttaacggaaacctcatacctgccccggcaagatctcgagggcacgccttatttggagtccggcatctccctgtttagcgatgatccagaatcagaccccagcgaagatagggctccggagagcgctagggttggtaacatccccagttccacttctgcgctgaaggtaccccagctgaaggttgcggaatctgctcagtcccctgctgctgctcacaccaccgatactgccggatataacgctatggaagaatctgtgtctagagaaaagcccgagctgacggcctcaacagagcgtgtgaacaaaaggatgtccatggtggtatctggccttacacctgaggaattcatgctcgtgtacaagtttgcaagaaaacaccacatcaccctgaccaacctgataaccgaggaaactacccacgttgtgatgaagaccgacgcagagttcgtttgtgagcgaaccttaaagtattttctgggcatcgccggaggtaaatgggtggtgtcctatttctgggtgacccagtccatcaaggagcgaaagatgttgaacgagcacgatttcgaggttagaggagatgttgtgaacggaagaaaccatcaaggcccgaagcgggccagagagtcccaagacagaaaaatattccgaggcctggaaatctgttgttacgggccttttacaaacatgccaacagatcaacttgaatggatggtgcaactttgcggagccagcgtcgtcaaagagctctccagctttaccttaggcactggagttcaccctatcgtggtcgtacagcctgacgcatggacagaggataacggctttcatgcaatagggcagatgtgcgaggctccagttgttacaagagagtgggtgctcgattccgtggctctgtatcaatgccaggagctggatacatatctgattcctcagattccccactcgcattactag

SEQ ID NO: 14109 - DNA, 2139 bp, synthetic construct
  misc_feature 1..2139: note = Description of Artificial Sequence: Synthetic coding sequence
  source 1..2139: mol_type = other DNA
atgctgaagcttctcaatcagaagaaaggaccttctcagtgtcccctgtgcaagaacgatattacaaagcgctcgctccaggaaagtacacgcttcagccagctcgtggaggagttacttaagatcatctgcgcttttcagcttgataccgggctggaatatgctaactcgtataatttcgccaagaaggaaaataactcccctgaacatctaaaagatgaagtatcaataattcagagtatggggtatcggaatagagccaagcggctcctccagtcagaaccagagaatccttccctccaggagacttccctttctgtccaactcagcaatctgggcacggtccggactctgcgcaccaagcaaaggatacagcctcagaaaacgagtgtctacatcgaactgggaagcgacagcagcgaggatacggtcaataaagccacttactgctcagtgggagaccaagagctcctgcaaattacaccgcagggaacccgtgacgaaataagtctggattccgccaagaaggctgcgtgtgagttctcggaaacggacgtgactaatacagaacatcaccaaccatccaataatgatctgaacacaaccgagaaacgggccgccgaacggcatcctgagaagtaccagggtgaggccgcaagtggctgcgaatcagagacaagcgtgagcgaggattgtagcggcctgagcagtcagtcagatatcctcacaacacagcagcgggataccatgcagcataatcttattaagttgcagcaagagatggcagaattggaagctgtcctagaacagcacgggtctcagcccagcaatagttacccctcaataatttcggatagctccgcccttgaagatctccgcaatcctgagcaaagcaccagcgagaaagtgctgaccagccagaagtcatccgaatatcctatctctcagaatcccgagggcctgagcgccgataagtttgaagtgagtgccgacagctcaacgtccaagaacaaggaaccaggagtggaacgcagctctccctctaagtgcccttcattggacgatcgttggtacatgcatagctgctccgggtcactacagaaccgcaactatccaagtcaggaggaactgattaaggtggtcgacgtagaagaacagcaacttgaggagtctggaccccacgatttgacagaaactagctatcttccacgccaagatctggaggggacgccctatctagagtccgggattagcttgttctcggatgatccagagtctgatccgagtgaagacagggcaccagaatccgctcgggtcggcaatatcccctcttccacctcagcgctcaaggtgcctcagcttaaagtggccgagagcgcccagtccccagccgctgcccacactaccgacacagcaggttacaatgcaatggaggaaagcgtctctagggaaaagcccgagctcacggcatccactgaacgagtgaacaagcggatgagtatggtagtctctggtcttacgcctgaagaattcatgcttgtgtataaattcgctagaaagcaccatataacactgaccaaccttatcacggaggaaaccacacacgtggtgatgaagactgacgctgaattcgtgtgtgagcggactcttaagtatttcttgggaatagctggagggaaatgggtggtgagttatttctgggttacccaatccattaaggagaggaagatgctgaacgagcatgacttcgaggtgaggggggacgttgtcaacggccggaaccatcagggccccaagcgtgctcgggagtcacaggatcgcaaaatctttcgcggtcttgaaatttgttgttacggtccattcactaacatgcctactgatcagctcgagtggatggtgcaactgtgtggagcgtcagtggtgaaagagctgtcaagtttcaccctggggactggggtgcacccaatcgtggtggtccagcccgacgcttggacagaggataacggtttccacgccatagggcagatgtgcgaggcccccgtcgtgacccgcgagtgggttttggactcagtggctttgtatcaatgccaggagctggatacttatctgataccccagattccccacagccactattag

SEQ ID NO: 14110 - DNA, 5655 bp, synthetic construct
  misc_feature 1..5655: note = Description of Artificial Sequence: Synthetic coding sequence
  source 1..5655: mol_type = other DNA
atggatctaagtgcactcagggtggaagaggttcagaatgtgattaatgctatgcagaaaattctggagtgtccaatatgtcttgagcttattaaagagcccgtttcaactaaatgcgaccacatattttgtaaattttgtatgctgaagctgttgaatcaaaagaaaggcccttctcaatgccctctttgtaaaaatgacataacgaaacgctccctgcaggagtctactcgctttagtcagttggtggaggagcttctgaagatcatctgtgctttccagctggacacaggattagaatacgctaatagctataatttcgccaaaaaggaaaacaactcccctgaacatctgaaggatgaggttagcattattcagagtatgggatatcgaaatcgagccaaaagattgctgcagtctgagcccgaaaatccctccctccaagaaacttctttgtccgtccagctgtctaacttgggaaccgtgagaactctgaggacgaagcaaaggattcagcctcagaaaacatctgtatacattgagttgggaagcgactcttccgaagacaccgtcaataaagccacctactgctcggtgggcgatcaggagctgttgcagatcacccctcagggcacacgggacgaaatctccctcgattccgctaagaaagcagcgtgcgagttttccgagaccgacgttacaaacactgaacaccatcaaccatcaaataacgatctcaataccaccgagaaacgcgctgcagagcggcatcctgagaagtaccagggtagctctgtctctaacctgcacgtagaaccatgcggcacaaacacccatgccagttctctccagcatgaaaactcttcactcctcctaacaaaagatcgtatgaatgtcgaaaaggcggagttctgcaacaagagtaagcagcctggcctggcgaggagccagcataacaggtgggctggcagtaaagaaacttgtaatgaccgcagaaccccatccactgagaagaaggtcgatttgaacgctgaccctctgtgtgaacgcaaagaatggaataagcagaagcttccctgttcagaaaatcccagggacactgaagacgttccctggattacactcaattcctcgatccagaaagtaaatgaatggttttcacgctcagacgagctgctagggtcagatgactcccacgacggggaatccgaatctaatgccaaggtagctgatgtgctggacgtgctgaacgaggtcgacgagtactcagggtcaagcgaaaaaattgatctcctcgccagtgacccccatgaagcactgatctgtaagtctgagagggtgcacagtaagtcggtagagtccaatatcgaggacaagatctttggaaagacctaccgcaagaaggcgtcattgcctaatttgtcccatgttacggaaaacttgattattggagcgttcgtcacagagccacagataatccaggagaggccactgaccaacaagcttaagcggaagcgcagacccacaagcggcctccatcctgaggactttatcaaaaaggcagatctggcggtccagaagacacccgagatgattaaccagggaaccaaccagaccgagcagaacggccaggttatgaacatcaccaatagcgggcatgagaataagaccaaaggcgactccatccagaacgaaaagaatcccaaccctattgagtccctggagaaggaatctgcttttaagacaaaggcggagccaataagctcaagcatttctaatatggaactggagctgaacattcacaacagtaaagccccaaagaagaataggctgagaagaaaaagtagcaccagacacattcacgccctggaactggtcgtgtcacgtaatctgagcccacctaattgcaccgaactgcagatcgattcctgttcatcatccgaagagataaaaaagaagaagtacaaccagatgccagtacggcattctaggaaccttcagctcatggagggcaaggaaccagctaccggagctaaaaagtctaacaagccaaatgaacagacttctaagcgacacgattccgacacctttcccgagcttaaactcaccaacgcccctgggagctttactaaatgctctaatacctcagagctcaaagagtttgttaaccctagcctgccaagggaagagaaggaagagaagttggaaaccgtgaaggtgagtaacaatgccgaggatcccaaggacctcatgttgtctggagaacgggtcctacaaacggagcggagtgtggaatcgagtagtattagcctcgtcccaggcacggattacggaacacaggaatctatttcacttttagaagttagcacactaggcaaggcaaaaactgagcccaacaagtgcgtctcccagtgtgccgctttcgagaaccctaagggactcattcacggatgcagcaaggacaaccggaatgacacagagggtttcaagtaccctctcggtcacgaggttaaccactccagagagacgtccatcgaaatggaggagtcagagctggacgcacagtacctgcagaatacatttaaggtctccaagcgacaatccttcgctcctttttcaaacccaggaaacgcagaggaagagtgtgctaccttttctgcccattcgggcagcttgaagaagcagagtcctaaagtgacattcgagtgtgagcaaaaagaggaaaatcaaggtaaaaacgaaagtaatatcaagcccgtacagaccgtcaacatcaccgcagggtttcctgtagttggtcaaaaggataagccagtcgacaatgctaagtgtagcatcaaagggggaagcagattctgtctctcttctcagtttaggggaaatgagacaggtttgattacccctaacaagcacggacttctgcagaacccctaccggataccacctcttttccctataaaaagcttcgtgaaaactaagtgcaagaagaaccttctggaagagaacttcgaagagcactccatgagccctgagagggagatgggaaacgagaacattccttctactgtatcaacgatttccagaaataacatacgggagaatgtttttaaagaggccagttcttcaaatatcaatgaggtggggtcttccacaaatgaggtaggcagtagcattaacgaaataggaagttcagacgagaatatccaggccgaactcggtagaaatagaggccccaaacttaacgctatgctgcggctgggcgtcctccagccagaggtgtacaaacagtctttacccgggagtaactgcaaacaccctgagatcaagaagcaggaatacgaagaggtagttcaaaccgtgaataccgatttttctccctatctcatttccgataacctagaacagccaatgggatcctcacatgcctctcaagtgtgtagcgagactcctgacgatcttctggatgacggagagatcaaggaagacaccagtttcgccgagaatgatattaaagaatcctctgctgtcttttcaaaaagcgtgcagaagggggaactctcaaggtccccgtctcccttcacacacacacatctggcccaggggtataggaggggcgccaaaaaactagaaagttccgaggagaacctgagcagcgaggatgaggaactgccatgcttccagcacttactgttcggcaaagtgaacaacattccctcccagtccacccgacactctacagtcgctaccgaatgcctgagtaagaacacagaggagaatctgctctctctcaagaatagtctaaacgactgttcaaatcaggtaatcctggctaaggcctcccaggagcaccacctctccgaggagaccaaatgcagtgcttcattgttttcatcacaatgctctgaattagaagacctcactgctaacacaaatacacaggaccctttcttgattgggagcagtaagcagatgcgacaccagagtgaaagtcagggggtggggctgagtgataaagaactggtgagtgatgacgaggaacgaggcactggtctggaagaaaataaccaggaagaacaaagcatggattcaaatttgggagaagcagccagcggctgcgagtctgaaacatctgtttccgaagactgtagtggcctttccagtcagtcagatattctcactacccaacaaagggacaccatgcaacataaccttatcaagctgcagcaggaaatggccgagctggaagccgtactggagcagcatgggtctcaacctagcaatagctacccttcaatcatatcagattcctcagcactggaagacctgaggaacccagagcagtctacctccgagaaagacagccatattcacggacagagaaacaacagcatgttctccaagcgccctagagaacatatctctgtccttacctctcaaaaatctagcgagtatcccatcagccaaaaccccgagggcctatcggcagacaagtttgaggtgtcggctgattcctccactagcaagaacaaagagcctggtgtggagcggagtagtccctccaagtgtcccagtctggacgatcgctggtacatgcattcatgctctggctctctgcagaatcggaactatccctcacaggaagagctgataaaggtggtagatgtcgaggagcaacagctcgaagaaagcggcccccatgatttgaccgagacatcatatctgcccaggcaggaccttgaggggaccccgtacctggaaagtggaatctcacttttctccgacgaccccgaatccgacccctctgaggaccgggcccccgagagtgctagggtggggaacattccgtcaagcacctcggccctgaaggtcccgcagctgaaagtggctgagagtgcacagtcacccgccgccgcacatacaacagacactgctggctacaatgccatggaggagagcgtgtctcgcgagaagccggagctgacagcctctaccgagcgcgttaataagaggatgagcatggtcgttagcggtctgacccccgaggaattcatgctggtgtacaaattcgctcgcaaacatcacattactttgactaatctgatcacagaggaaaccacacacgtagtgatgaagactgacgccgagttcgtgtgtgagaggaccctgaaatatttcctagggatagccggcggcaagtgggtggtctcatacttttgggttacacagtcaatcaaagaacgaaagatgcttaatgagcatgattttgaggtcagaggtgacgtagttaacggacggaatcatcaaggtccaaaacgcgcccgcgagtcccaggaccgcaaaatattccgtggtctcgagatctgttgctatggcccattcacgaacatgccaaccgaccagctggaatggatggtgcagctctgtggggctagcgtagtgaaagaattgtctagcttcacactggggaccggggtgcatcccatcgtcgtggtgcagcccgacgcatggaccgaagataatggcttccatgcgattggacagatgtgtgaggcacccgtggtgacccgcgagtgggttctagacagcgttgctctctaccagtgccaagagctggatacatacctcattccccagattccgcactcccactactag

SEQ ID NO: 14111 - DNA, 192 bp, synthetic construct
  misc_feature 1..192: note = Description of Artificial Sequence: Synthetic coding sequence
  source 1..192: mol_type = other DNA
atggacctaagcgcccttcgcgtcgaggaagttcagaatgttattaacgccatgcaaaaaatcctcgagtgcccgatctgcttggagctgatcaaagagcctgtatctacaaagtgcgatcacatattctgcaaattttgcatgctgaagctgctcaaccagaagaagggcccatctcagtgtccgctgtag

SEQ ID NO: 14112 - DNA, 192 bp, synthetic construct
  misc_feature 1..192: note = Description of Artificial Sequence: Synthetic coding sequence
  source 1..192: mol_type = other DNA
atggacctctcagctctaagggtagaagaggtgcaaaacgtgattaatgccatgcagaaaatccttgagtgcccaatctgcctggagcttatcaaagagcccgtgagtacaaaatgtgaccacatcttctgcaagttctgcatgctgaagttgcttaaccagaaaaagggcccctctcagtgccccttgtag

SEQ ID NO: 14113 - DNA, 2100 bp, synthetic construct
  misc_feature 1..2100: note = Description of Artificial Sequence: Synthetic coding sequence
  source 1..2100: mol_type = other DNA
atggatctctccgctctccgtgtggaagaggtccaaaatgttatcaacgcaatgcagaagatactcgagtgcccaatttgccttgagctgattaaagagcccgtttcaacaaagtgtgatcacattttttgtaaattttgcatgctcaagctgctgaaccagaaaaagggccctagtcagtgccccctgtgcaaaaacgacattaccaaaaggagcctccaggagagcacaagattctcccaactggtggaggagttgctaaaaattatctgcgcattccagctcgatacgggcctggagtatgcaaacagctacaacttcgcaaagaaagagaataatagccccgaacacctgaaggacgaggtgagcattatccagagcatgggctaccgaaatcgcgccaagcgcctcctacagtcagagccggagaacccaagcttacaggaaacgagtctgtccgtgcaattgtccaatctcggcaccgtacggacgctgagaacgaaacagaggatccagccgcagaagaccagtgtgtacattgaactgggaagtgatagcagcgaggacactgttaacaaagcgacttactgctcagttggagatcaggaacttctacagatcaccccacagggtacaagggacgagatctccctggatagcgcgaagaaggccgcctgcgagttttcagagaccgatgtaaccaacacagaacatcaccagccaagcaacaacgatcttaacaccacagagaagagagcggccgaacggcaccccgaaaagtatcaaggagaggcggcttcgggctgcgaaagcgaaactagcgttagtgaagactgctcagggctctccagtcagtccgatatactaacaacacagcagagggacaccatgcagcacaatctgatcaaactgcagcaggaaatggcggagctggaagccgtcctggaacagcatggctcccaaccctcgaactcatatccttccatcatttccgattcctcagccctcgaggacctgaggaaccccgagcagagcacctcagagaaagtgctgacaagccaaaaatcaagcgagtatccaatctctcagaatcccgaaggcctctccgccgataaattcgaggtgagcgctgacagttccaccagtaagaacaaagagcccggggtggagagatccagcccttctaagtgtcctagcctggacgaccgctggtatatgcacagttgctcgggttccctgcagaacaggaactaccccagtcaggaggagctcatcaaagtcgttgatgtggaggagcagcagctcgaggaatccggtcctcacgatctgacagagactagctatctgccccgacaggacctggaggggaccccttacctggagtctggcatttccctgtttagcgacgaccccgaatctgacccatctgaggacagagctcctgaatcagccagggtggggaatattcccagttctactagtgcgctgaaagtgccgcagctgaaggtggcagagtccgctcagtcccccgccgccgctcacacaaccgatacggctgggtacaatgcaatggaggaatcagtgagccgggagaagccagaattgaccgcatccaccgagagagtaaataagcggatgtctatggtggtgtctgggttaacacctgaagaatttatgctcgtatataagttcgcacgtaaacaccacataactttgactaacctgattaccgaagaaaccacgcacgttgtgatgaaaaccgacgcggagttcgtgtgcgagcggaccttgaagtatttcttagggatagccggagggaaatgggtcgtctcctatttctgggtcacacagagtatcaaagagcggaagatgctgaacgagcacgattttgaagtccgtggagacgtggtgaacggcagaaaccatcaggggcctaagcgcgcacgagaatcacaggatagaaagatctttcgaggcctcgagatttgttgttacgggccattcaccaatatgcctacagggtgccctccgaactgcggatgcgcggcccgctgtctggacagaggtcagtggcttccatgcaactgggccgatgtgtag

SEQ ID NO: 14114 - DNA, 1950 bp, synthetic construct
  misc_feature 1..1950: note = Description of Artificial Sequence: Synthetic coding sequence
  source 1..1950: mol_type = other DNA
atggacctgtccgccttaagagtcgaagaagtacaaaacgtcatcaacgcgatgcagaagatcctggagtgccctatttgcctggagctgattaaggaacccgtgagtaccaaatgcgaccacattttttgtaaattttgcatgttgaaacttctgaaccagaaaaaaggacctagccaatgccctctctgcaagaacgacattactaaaaggtctcttcaggagtcaacacgcttttctcagttagtggaggagttactcaaaattatctgcgcctttcagctcgacaccggactggaatacgctaactcatataactttgccaagaaggagaacaatagccccgaacatctgaaggacgaagtcagcataatccagagcatggggtaccgaaaccgagcgaaaaggttgctccagtcggaacccgagaacccaagcctccaggagaccagtctcagtgtccaattgagtaatcttgggactgtgcggacacttcgaaccaaacaacgcatacagccccaaaaaaccagtgtatacatcgagctggggtcagattccagtgaagatactgtgaataaggcaacttactgcagtgtgggggaccaagaacttctgcagatcacgccgcagggcacccgggacgaaatttccttagatagtgcaaagaaagctgcttgtgaattctccgaaactgatgtgacaaacaccgagcaccaccagccctccaacaatgatttgaacactacagagaagcgtgccgcagagagacatccggaaaagtatcaggggtcttccgtgtctaatttacacgtggagccgtgcggaaccaatactcacgcctcttctcttcagcacgaaaacagcagtctgctccttacgaaagatagaatgaacgtggagaaagctgaattctgcaataagtctaaacagcctggacttgcaaggtcccagcataatcgctgggccggttctaaggaaacgtgtaatgaccgaagaaccccctccacggagaaaaaggtcgatttaaacgccgacccattgtgcgagcgcaaagagtggaataagcaaaagttaccctgctctgaaaatccccgggacactgaagatgtcccttggatcacccttaatagctccattcagaaggtgaacgagtggttttctagatccgatgagctgctgggcagcgacgactctcatgatggtgaaagtgagtccaacgcaaaagtggccgacgtgctggacgtgctcaacgaagttgacgaatacagtggatcttccgagaaaatagatctgctcgctagtgacccccacgaagcccttatttgcaagagcgaacgggttcactccaagtctgtagagtccaacatcgaggataagattttcggcaaaacctatagaaagaaggcctccttgccaaatctgtcccacgtgacggagaacctcatcattggggccttcgtgaccgagcctcagatcattcaggagcgtccactcacaaacaagctaaaaaggaaacggcggccaacaagcgggctacatcctgaggattttatcaaaaaagccgacctagctgtccaaaagactccagagatgattaatcagggaacgaaccagacagagcagaatgggcaggtgatgaacatcacgaattcaggccatgaaaacaagaccaagggcgatagcatccagaacgaaaagaaccccaacccaattgagagcctggagaaggagagcgcattcaaaaccaaggctgaacctattagcagcagcatctcaaatatggagctggaactcaacatacacaattccaaagcacccaaaaagaacagattgcggcgtaaaagctcaactaggcacatccatgctctggagttggtggtctccaggaacctttccccccccaactgcacagagctgcagattgacagctgttctagctcggaggaatag

SEQ ID NO: 14115 - DNA, 5658 bp, synthetic construct
  misc_feature 1..5658: note = Description of Artificial Sequence: Synthetic coding sequence
  source 1..5658: mol_type = other DNA
atggatctgtctgcacttcgcgtggaggaagtccaaaatgtcattaatgcgatgcagaagattctagaatgtcctatatgtctagagctgatcaaagaaccagtttcaaccaagtgcgatcatattttctgcaaattttgcatgctgaaactcctcaaccaaaagaaaggccccagccagtgtcccctctgtaaaaatgatatcacaaagaggagtctgcaggaatcaacaaggttttcacagctggtggaagaactgctcaaaatcatttgcgccttccaattagatacaggtttggagtatgcaaactcttacaatttcgctaaaaaggaaaataatagcccggagcatctcaaggacgaggttagcattattcagtccatggggtaccgaaaccgcgccaagcggttgctgcagtccgaacctgagaatccatcactgcaggagacctccctctcggtgcaactttcgaatctgggcactgttcgtaccctcagaaccaaacaacggatccagccgcaaaaaacttcagtgtatatcgagctgggctcggattcctccgaagataccgtgaacaaggccacttattgcagcgtgggcgatcaagagttattgcagattacccctcagggcacacgcgatgagattagccttgacagcgccaagaaagcagcctgcgaattctccgaaacagacgtaactaatacagagcaccatcagccatccaataacgacttaaatactaccgaaaaaagggccgccgagagacatccagagaaataccaagggagcagtgtgtccaacttacacgtcgagccctgtggaaccaatactcacgcaagctctttacaacatgagaactccagcctgcttttgactaaggatcggatgaatgtggaaaaggcagagttctgcaacaagtccaagcagcctggactcgcccggtcccagcataaccgctgggcgggcagtaaggaaacctgcaacgaccgacgaacaccttcgacagagaagaaggtcgacctgaacgccgaccctctctgtgagcgcaaggagtggaataagcagaaacttccttgttctgagaatccacgtgacacagaggacgtgccttggattaccctcaactcaagcattcagaaggttaatgaatggtttagtaggagcgacgaattactcgggtcagacgacagtcatgatggcgagtcagaatcaaacgctaaagttgcagatgtactcgacgtcttgaatgaagtggacgaatatagtggaagctccgagaagattgacctgctcgcatcagatcctcatgaagccctcatttgtaaatcagaaagggtacactctaaaagcgtggagtcaaacattgaggacaagatcttcggcaagacgtatagaaaaaaagcctccctcccgaacctttcccatgtgacagaaaacttgatcattggcgcgtttgtcaccgagccccagatcatccaggagaggcctctgaccaacaagttaaagcggaaacgtcggcctacatcaggcctccatcccgaagacttcataaagaaggcagatctcgctgtgcagaagacacctgagatgatcaatcaggggacgaaccagacagagcagaatggacaggtgatgaacataacgaactcagggcatgagaacaagaccaaaggtgacagcatccagaacgagaaaaatcccaaccccatcgaatccctcgagaaagagtcagcattcaagaccaaagctgagcctattagtagcagtatcagtaatatggaactcgagttgaatatccataacagtaaagcccctaaaaagaacagactgagacgcaaatcatctactcgtcacatccatgcactggaactggttgtgtcccggaacctttcgccacccaactgcacagaactgcagatcgattcatgctcaagttctgaagaaatcaaaaagaaaaagtacaaccagatgccggtccgccactcccgtaatctgcagctcatggaaggcaaggaaccagcaaccggggccaagaaatcaaataagccaaacgaacagacatccaagcgtcacgactccgacaccttccccgagctgaagctcactaatgctcccggaagtttcactaagtgctccaatacctcagaactgaaagagttcgtgaatccgtccctcccacgagaggaaaaggaagaaaagctagagacagtcaaagtatccaataacgccgaggatcccaaggatctgatgctgtctggcgagcgggtgctccaaaccgagagaagcgtcgaatctagcagcatcagtttggttccgggcactgattacggaactcaggagtcaattagccttctggaagtgagtacactggggaaagctaaaaccgagccaaataaatgtgtgtcacaatgtgccgcctttgagaaccccaaagggctcatccatggttgttcaaaggacaaccgcaatgatacagaagggtttaagtatccactggggcacgaagtgaatcactctcgcgaaactagtatcgaaatggaggaatccgaactggatgctcagtacctgcagaacacgtttaaagtaagcaagcggcagagcttcgctccattcagcaaccccggaaacgcggaagaagagtgcgcaaccttcagcgcacacagcggctcccttaaaaagcagagtccgaaagtgactttcgaatgtgagcagaaggaggagaatcagggtaagaatgagtctaacattaaaccagtgcagaccgtgaatattacggccggcttccctgtggtcggccagaaggataaacctgtcgacaacgcgaagtgttctataaaggggggctctcggttctgtctctcctctcagtttcgagggaatgagactggtctcatcacccctaacaagcacgggttgttgcagaatccttaccggataccacctctgtttcctatcaagtcctttgtgaagactaagtgcaagaagaatttgctcgaagagaactttgaggagcatagcatgtctccagagagagagatggggaatgagaacattccaagtacagtatcaacaatctccaggaacaatattagggaaaatgtcttcaaggaagctagcagctccaatataaatgaagtgggtagttcgaccaatgaagtcggcagctcaattaatgaaattggatctagtgatgagaatatccaggcagagctcggccgcaatcgtggcccgaagctcaacgccatgcttcgcctgggtgtgttgcagcccgaggtgtacaagcagagcctccccggctcaaactgtaaacacccagagatcaaaaagcaggagtacgaggaagtagtacaaaccgtgaacactgattttagcccctatctgatctctgataacctggaacagccaatgggtagctcccatgcgtctcaggtgtgtagtgaaacacctgatgacctgttagacgatggagagataaaggaggacacttctttcgccgagaacgacatcaaggagtcctccgcagtgttcagcaagagtgtccagaagggtgaactctcccgctccccatctcctttcacccacacacacttagctcagggctaccgccgaggagcaaagaagctggagagcagcgaggagaacctatcgagtgaggatgaggagctgccctgctttcagcatctgctcttcggaaaagtgaataacatcccatcacagtcgaccaggcactccaccgtggctacagagtgtctctctaagaacactgaagaaaatcttcttagtctgaagaatagtctcaacgattgtagcaaccaggtaatcctagctaaggcttcccaggagcatcatctgtcagaagaaaccaaatgtagcgcaagtctgttcagctctcagtgttcagaactggaagaccttactgccaatacaaatacccaggatccgtttcttatcggctcctctaaacagatgaggcatcagagcgagagccaaggtgtgggcttaagcgataaggagctagtgtcagacgacgaggaaagaggaaccggcttggaagaaaataaccaagaggagcaaagtatggattccaaccttggggaggccgcttcaggctgtgagtcagagacatctgtgtcagaagactgtagcggtctcagtagccaaagtgatatactgacaacccaacagagagacaccatgcaacacaacttgattaaactccagcaggaaatggcagagcttgaggcagtgttagaacagcatggaagccaaccatccaacagctacccttctattatttccgacagcagtgccttagaagacctgaggaaccccgagcaatccactagtgaaaaggattctcatattcacgggcaacgcaacaattcaatgttcagcaagcggccaagagagcatataagcgccgtccttacgtcccagaagagttctgagtatccaatcagccagaatccagagggcctgagtgcggacaaattcgaggtgtccgcagactcatccaccagtaagaataaagagccaggcgtggaaaggagttctcctagtaaatgcccttctttggacgaccgatggtacatgcatagctgcagcgggtccttacaaaatagaaactacccgagtcaggaagagcttattaaggtcgtcgatgtcgaagaacaacaactggaagagagtgggccacacgacttaaccgagacaagttacttgccccgccaggacctggagggtaccccttacctcgagagcggaatatccctgttctctgatgaccccgaaagtgatccatcagaagatagggccccagaatccgcacgggtgggcaatatcccttcctctactagcgcgctgaaagttccccagcttaaggtggccgaaagtgcccagtcacccgctgccgcacataccaccgacacagccgggtacaacgcaatggaggagtctgtgtccagagaaaaacccgagttgacggctagcacagagagagtgaacaagagaatgtctatggtggtcagcggactaacacccgaggagttcatgctggtctataaatttgctagaaaacatcacattaccctcactaatcttatcacagaagagaccacacatgtggtgatgaaaactgacgctgagtttgtctgtgagagaactctgaagtattttctcgggatcgccgggggcaaatgggtggtgtcctatttctgggtcacccaatccattaaagagcggaagatgctgaacgagcatgactttgaggtccgtggggacgttgtcaatgggcggaatcaccagggtcccaagagagctagggaatcccaggaccgcaagatttttcgcggactggagatatgttgctatggtccattcacaaatatgccgacagaccagctggaatggatggtgcagctgtgcggagcttctgttgtgaaggaactgtcctctttcacccttggaactggcgtgcatccaatcgtggtggtgcagcccgacgcctggaccgaggacaatggcttccacgctattgggcagatgtgcgaggcccccgtcgtcacgagagaatgggtgctcgattccgtcgcattgtatcagtgtcaggaattggacacttatcttattccacagattccacatagccattattag

SEQ ID NO: 14116 - DNA, 669 bp, synthetic construct
  misc_feature 1..669: note = Description of Artificial Sequence: Synthetic coding sequence
  source 1..669: mol_type = other DNA
atggacctgtcggcactgcgggtggaagaggtgcagaatgttatcaatgccatgcagaaaattttggagtgccctatttgcttagagctgattaaagaaccagtatccacaaagtgcgaccacattttctgcaaattttgcatgcttaaactattgaatcagaagaagggtccttcacagtgtccattatgcaagaacgacatcaccaaacggtcgctccaggagtccactcgatttagccaattggttgaggagttactgaaaatcatttgtgcctttcaattggacactggattagaatatgcaaattcttacaattttgctaaaaaggagaataacagtccagaacacctgaaggacgaggtatctatcatccagtccatgggctatcggaaccgcgccaaacgactcctccagtctgagcccgagaatccatctctggagacttccctatccgtccagctgtcaaacctgggaaccgttcggactttacgcaccaaacaacggattcagccacaaaaaactagtgtgtatatcgagttaggctctgatagcagtgaagacacggttaacaaggctacctattgtagcgtcggagatcaagagctgcttcagattaccccacagggaacgcgggacgagatcagcctggacagcgcgaagaagtag

SEQ ID NO: 14117 - DNA, 1869 bp, synthetic construct
  misc_feature 1..1869: note = Description of Artificial Sequence: Synthetic coding sequence
  source 1..1869: mol_type = other DNA
atggacttgtccgccttacgggtagaggaagtgcagaatgtcatcaatgctatgcagaagatcttggaatgcccgatttgcctggagctgatcaaggaacccgtaagcacgaaatgtgatcatattttctgcaaatccttgcaagagtccacacggttctcgcaactggtggaggaactgctaaaaataatatgcgcttttcagcttgatacgggccttgaatacgccaattcctacaattttgcaaagaaggagaacaactctcccgaacacttaaaggacgaggtctctatcatccagtccatgggataccggaatcgcgcgaaacgcttgctccaatcagaaccagagaatccctctttgcaagaaacttcgctgtccgtccagctgtccaatctgggtacagtgcgcacactccggactaagcagaggatacaaccccaaaagacaagtgtatacattgagcttgggtccgactcgtccgaggacaccgtcaacaaggctacctattgctcagtgggcgaccaggagctcttgcaaatcacacctcagggaacacgggatgagatctcgttggatagtgctaaaaaggcggcttgcgaattctccgagactgatgttaccaacactgagcaccaccagccttccaacaacgatctgaacacaaccgaaaagcgcgcagctgaacgccaccccgagaagtaccagggttcctctgtctctaatctgcacgtcgaaccatgcggtacaaacactcacgcaagctccctgcagcacgagaatagtagtctcctgctgactaaggaccgtatgaatgtggagaaggctgaattctgcaacaagagcaagcaacctggcctggccagatcgcagcataaccgatgggcagggtccaaagagacctgtaacgaccgccgcactccttcgactgaaaaaaaagtcgatctgaatgccgacccgttgtgtgagcggaaagaatggaataagcagaagttaccctgctctgaaaatccccgtgacaccgaggatgttccctggatcactctcaattctagcatccagaaagttaacgagtggtttagtcgtagtgacgagctactggggtcagacgacagtcacgacggcgagagtgaatcaaatgccaaggtcgcggacgtgctcgacgtgctgaacgaggttgatgagtattcagggtcttccgagaaaatcgatttactagcatctgaccctcacgaggccctaatttgtaaatccgaaagggttcatagcaagtccgtggaatctaatatcgaggataagatcttcggtaaaacttatcgcaagaaggccagcttgccgaacctctcgcacgttacggagaatctcatcattggcgcattcgttaccgaaccacagattatccaggaacggccactgacaaacaagctgaaacgaaagcggagacccacaagcggtctccaccccgaggattttattaagaaagcggacctggcagtgcagaagactccagagatgattaatcaggggactaatcagaccgaacagaatgggcaggtgatgaatataacgaacagcgggcacgaaaacaagaccaagggtgatagcatacagaacgagaaaaaccccaacccaatcgagagcctggagaaggagtccgcctttaaaacaaaggcagagccaatctcttcctctatttcaaacatggagttggaactcaatatccacaatagtaaagcaccaaaaaaaaaccgacttcggcgaaaatcaagtactcgacacatccacgccctggagctggtcgtgagcaggaacctatctcctcccaattgcactgaactacagattgacagctgttcaagctcggagtag

SEQ ID NO: 14118 - DNA, 1872 bp, synthetic construct
  misc_feature 1..1872: note = Description of Artificial Sequence: Synthetic coding sequence
  source 1..1872: mol_type = other DNA
atggatctgtctgcattaagagtcgaggaagttcagaatgtgattaatgcaatgcaaaagattctagagtgtcccatctgcctagagttgatcaaagagcccgtgtccaccaagtgtgatcacattttctgtaaattttgtatgctgaagctgctaaaccagaaaaaaggaccgagccagtgccctctgtgtaagaatgatataactaagcggtcactgcaggagagcactagattcagtcaactggttgaggagctgctgaaaataatctgtgcctttcagctcgacacaggccttgaatatgcgaattcctacaactttgccaaaaaggagaataactcacccgagcacctgaaggatgaggtgtctattatccagagcatgggatatcgcaaccgagccaagcggcttctgcagtccgaaccagaaaatccctccttagagacatccttaagcgtgcagctctctaaccttggcaccgtcagaaccttacgcacaaagcaacggattcagccccaaaaaactagcgtctatatcgagctgggcagcgattctagcgaagacaccgtgaataaagccacctattgctctgtcggtgaccaggagttgctgcagattacaccccagggaacgagggacgagatctcattggactctgcaaaaaaggcagcttgtgagtttagcgaaactgatgtgacgaacaccgagcaccatcagccaagtaataatgacctgaatacaaccgaaaagcgggcggcagagcggcatcccgaaaagtaccagggggaagcagcttcaggctgcgaatccgagacaagcgtatcagaagactgctccggcttatcgagccaatctgacatcctcaccacacagcaacgtgacacaatgcagcacaacctcattaagctgcagcaggaaatggccgaactggaggcagttcttgaacagcatgggtcccagccaagcaacagttatccatctatcatcagcgatagcagcgctctcgaggaccttcgcaatcctgaacagtctacatccgagaaagcagttctaacctctcaaaagtcaagcgaatacccaattagccagaacccggagggcttatctgcggataaattcgaggtttcagctgactcctcgacttctaagaacaaggagccaggggttgagcggagttctcctagtaaatgcccgtctctagatgacagatggtacatgcatagctgtagcggcagcctgcagaatagaaattacccatcccaggaggaattgattaaagtggtcgacgtggaagaacagcagcttgaagagagtggcccacatgatctcacggagacaagctacctacctcgtcaggatctggagggcaccccgtacctggaaagcggtatcagcctgttctccgacgaccccgagtcagatccctccgaagacagggctcccgagtccgctagggtggggaacattccctcaagcacaagcgcattgaaggtcccacaacttaaggttgccgaaagcgcgcagtcccctgctgccgctcacaccactgacaccgctggttacaacgccatggaagagtcagtatcccgggaaaagccggagctgacagcctcaacagaacgggtcaacaagcggatgagtatggttgtatctggcctaactcctgaagagtttatgttggtatataagttcgcccgcaaacaccacataactttgactaatcttatcaccgaggaaacaacccacgtggttatgaagaccgatgctgaatttgtgtgtgagcgaacactgaaatatttcctcgggatcgctggtggcaaatgggtggtaagttacttctgggtgactcagagtataaaggaaaggaagtag

SEQ ID NO: 14119 - DNA, 1497 bp, synthetic construct
  misc_feature 1..1497: note = Description of Artificial Sequence: Synthetic coding sequence
  source 1..1497: mol_type = other DNA
gaattactgaagataatttgtgcatttcagctcgatacgggcctggaatacgccaatagttacaactttgctaaaaaagagaataactcacccgagcatctgaaagacgaagtatcgatcatccagtcgatgggctacagaaacagggcaaagagactgcttcagagcgagcctgagaaccccagtctggagacctctctgagcgtccagctcagcaacttgggaacggtgagaaccctccgaactaaacagagaatacagccgcagaagacctctgtgtatatcgagctcgctgcttgtgagttttccgaaaccgacgttacaaataccgaacaccaccagccgtctaataacgacctgaataccactgagaagcgcgctgcggagagacaccctgaaaaataccagggcgaggcagcttccggctgcgagagtgagaccagtgtgtcggaggattgctccggtctcagttctcaaagtgacatcctgactactcagcagcgggacacaatgcagcacaatctcatcaaacttcaacaagagatggccgagctcgaggcagtgctggagcagcacggcagccaaccttctaactcctatccgtccatcatttctgatagcagcgctctcgaggacttgagaaatcccgagcagtctacgtcagagaaggcagtcctgacctcccagaagagcagcgagtatcctatctctcagaatcctgaaggactgtctgctgataaattcgaggtctctgcagacagctccaccagcaagaacaaggaaccgggggtggaaagaagttccccctccaaatgccccagtttagacgacagatggtatatgcacagctgcagcggaagtttgcagaatcggaactaccctagccaggaagagctcataaaggtggtcgacgtagaagaacagcagcttgaggaatctggacctcacgatttaacagaaacgagctatctcccccgccaagacctcgaaggtacaccttacctggaatccggtatcagtctattttcagacgaccctgagtctgacccgtctgaggaccgagccccagagtctgccagggtcggaaacatacccagttccacctccgctcttaaagttccccagctcaaggtggctgagtccgcccagtcaccagctgctgctcacactacagacactgccggttataatgcgatggaagagtccgtgagccgcgagaagcctgagttaactgcatccaccgagagagtgaacaagcggatgagtatggtggtctcaggactcacccccgaggagtttatgcttgtttataaatttgcgaggaaacatcacatcaccctcactaacctgattacggaagaaacaactcatgtagtcatgaagaccgatgcggagtttgtgtgcgagcggacgttaaagtatttcttgggtattgcgggaggcaaatgggttgtctcctatttctgggtgacacagtctatcaaagaaaggaaatag

SEQ ID NO: 14120 - DNA, 297 bp, synthetic construct
  misc_feature 1..297: note = Description of Artificial Sequence: Synthetic coding sequence
  source 1..297: mol_type = other DNA
atggacctaagcgcgctgagagttgaagaagtccagaacgtcatcaacgcaatgcagaagattctcgagtgcccaatatgcctcgaactcattaaagagccagtatcaaccaagtgcgaccacatattttgcaaatcgttgcaggagagtacaaggttcagccagctggtggaagagctcctgaaaattatttgtgcattccaacttgataccggcttagagtatgcaaacagttataacttcgccaagaaagagaataactcaccagagcacctgaaggatgaggtctcaatatag

SEQ ID NO: 14121 - DNA, 2280 bp, synthetic construct
  misc_feature 1..2280: note = Description of Artificial Sequence: Synthetic coding sequence
  source 1..2280: mol_type = other DNA
atggatctgtcagcactgcgggtcgaggaagtacagaacgttattaatgccatgcagaaaatcttggagtgcccaatctgtttagagctgataaaggagcctgtgagcaccaaatgcgaccatatcttttgtaagttctgtatgctgaaactgctgaatcagaaaaagggtcctagccagtgtcctctatgcaagaatgacatcaccaagaggagtctgcaagaatccacccggtttagtcagctggttgaggagctcctgaaaatcatatgtgcatttcagttggacactgggctggaatatgctaactcctacaattttgcaaaaaaagaaaataattcccccgaacatttgaaagatgaggtttctatcatacagagcatgggatatcggaatagggctaaaagactgttgcagagcgaacccgaaaacccttccctacaagagacctccttgagcgtgcaattgtccaacttgggaactgtgcggacccttagaacaaaacagcgcattcagccgcagaagacatcagtgtatatcgagttagggagcgattcatccgaagacactgtgaataaggcaacctactgctcagtaggtgatcaggagttactgcaaatcactcctcaaggtactcgggatgaaatctccttggacagcgccaaaaaagccgcatgcgaattcagcgagacagatgtcaccaataccgaacaccatcagccgagcaacaatgatctgaatactaccgagaagcgggcggctgaacggcatcccgaaaaataccagggggaggctgcaagcgggtgcgagagcgagactagcgtatccgaagattgcagcggccttagtagtcaatctgacatcttgaccactcagcagagagacaccatgcagcacaatttgatcaaacttcagcaagagatggccgaactggaggccgttctggagcagcacggatctcaaccgtcaaactcttaccctagcataatttccgatagctcggcactggaggatctgcgtaatccagagcagtctacctccgagaaggtactgacgagtcaaaagtcttcagaatatccaatcagccagaaccctgaaggattatccgctgataagttcgaagtctccgcggattccagcacatccaagaataaggagcctggggttgaaaggagctcacccagcaaatgtccttcattagatgacagatggtatatgcactcctgtagcgggagtcttcagaataggaactaccccagccaagaagagctgatcaaagttgtggacgtagaggagcagcaactggaagagtcaggacctcacgatctcactgagacatcctacctccccaggcaggacctagaaggtacgccatatttggaatctgggatttcgctcttctctgacgatcctgagtctgatcccagcgaagatcgggctcctgaatctgccagagtaggcaatataccatcctctacatcagccttaaaagtgccacagttaaaggtagccgagtctgcgcagagccctgctgcagcacacacgaccgataccgcaggatataatgcgatggaagagtccgtcagtcgcgaaaagccagagctgaccgccagcacggagcgcgtgaacaagaggatgagcatggtggtctccggcctgacgccagaggaattcatgctcgtttacaaattcgccagaaaacatcatatcaccttgacaaacctgattacggaagagaccacacacgtcgtgatgaagacggacgcagagttcgtatgcgagcgaacacttaagtattttctgggcattgcgggagggaaatgggtggtttcctacttttgggtaactcaatccattaaagagcggaagatgttgaacgaacatgattttgaagtaaggggagacgttgtgaatggacgcaaccaccaggggcccaaacgcgctagggaaagccaggatcggaaaatttttaggggccttgagatttgctgctacggaccgtttactaacatgccaaccgaccaactcgagtggatggtgcaactgtgtggggcgtctgtggtaaaggagctttcatcatttacactcggcacgggcgtgcaccctattgttgtggtgcagccagatgcatggaccgaggacaacgggtttcacgccatcggacagatgtgtgaagcacctgtggtaacaagggagtgggttctggactctgtggctctgtatcagtgtcaggagctggacacgtatctcataccccagattccacacagccactactag

SEQ ID NO: 14122 - DNA, 180 bp, synthetic construct
  misc_feature 1..180: note = Description of Artificial Sequence: Synthetic coding sequence
  source 1..180: mol_type = other DNA
atggatctgtccgcactcagagtggaggaagtgcagaacgttattaatgctatgcagaaaatcctcgaatgcccaatctgtctcgaactcatcaaagagcctgtcagcacaaagtgtgatcatatattctgcaaagtgctgttatgctgcccatcctggtcgaccgtggtcagatcctag

SEQ ID NO: 14123 - DNA, 5451 bp, synthetic construct
  misc_feature 1..5451: note = Description of Artificial Sequence: Synthetic coding sequence
  source 1..5451: mol_type = other DNA
atgctcaagcttttgaaccaaaaaaaggggccctcgcagtgtcccctttgcaaaaatgatattaccaagagaagtcttcaggagtccacccgcttcagccaactggtcgaagaactgcttaagattatctgtgcatttcagctggacaccggattggagtatgcaaattcctacaacttcgcaaaaaaggaaaataactcacccgaacatctgaaggacgaagttagcatcattcaatccatgggatatcggaatcgtgcgaaaagactgctgcaaagcgagccggagaacccatctcttcaagaaactagcctctctgttcagctgtcaaatctcggcaccgtccggactcttagaactaaacagagaattcagccccagaaaacctccgtctatatcgaactgggcagcgactcttctgaagacactgttaataaggccacttactgttccgtgggggaccaggaacttttgcagattaccccccagggtacgcgggacgaaatttctcttgatagcgctaagaaagccgcctgtgaattcagcgaaaccgatgtcacaaacactgagcaccatcagccatcaaacaatgatctgaatactactgaaaaaagggcagccgaacgccatccagaaaaatatcaaggaagctccgtatcaaatctgcatgtggagccttgtggcacgaacactcacgcttcctctctgcagcatgaaaactccagtcttttgctgaccaaggacaggatgaacgtagaaaaagccgaattctgtaacaaaagtaagcagccgggtcttgcacgctcccaacacaatcgctgggccggcagcaaggaaacctgtaacgatagaaggacaccatctacagaaaagaaagtcgatctgaacgcagaccctctttgtgagcggaaagagtggaacaagcagaaactcccctgctccgaaaatcccagggacaccgaagatgtaccttggattacgttaaattccagcattcaaaaggttaacgagtggttcagtcgaagcgacgagctcttgggcagcgatgactcccatgatggagagagcgaaagcaatgctaaggtcgctgatgttctcgatgtactcaatgaggtggacgagtattctggaagctcagagaaaatcgatttactggcctccgatccccacgaggccctgatttgtaagtcagagcgcgtgcactccaaatcggtcgaaagcaatatagaggacaagatatttgggaagacctaccgtaaaaaagcctctcttcccaacctctcccacgtgacagaaaaccttattatcggagccttcgtgacagaaccacaaataatccaggaacgccccctgaccaataagctgaaaagaaaacgcagaccgacatccggtttgcaccctgaggattttatcaaaaaggcagatttggctgtacaaaagactccagagatgattaatcaaggcaccaaccagaccgagcagaacggacaagtgatgaatatcacaaattctggccacgagaataaaaccaagggagacagcatccaaaatgaaaaaaacccaaaccccatagaaagcctagagaaggaaagcgcattcaagaccaaggccgagcccatttcctccagcatctctaacatggagcttgagctgaatattcataactcgaaggctcctaagaaaaacagattgagaagaaaaagctctactcggcatattcacgcactggaactggtggtttccagaaatctctctccgccaaactgtaccgaactgcagattgattcatgcagtagttctgaggagatcaaaaagaaaaaatataatcagatgcctgtgagacattcaaggaacttacagctgatggagggcaaagagccagccactggagcaaagaaatccaacaagcctaacgagcaaacaagcaagcgccatgactccgataccttccccgagctgaagctgaccaacgcacccggcagcttcactaaatgttcaaatacttcggagcttaaagagttcgtgaatccctcgcttcccagggaggagaaagaggagaagttggaaaccgtgaaagtgtccaataatgcagaggacccgaaagatctaatgctcagtggcgagagagtcctgcagaccgagcgtagtgtcgagtcatcatccatctccttggtgcccggtaccgattacgggacacaggaatcaatttctctgctggaggtgtctaccttgggaaaggccaagaccgagcccaataaatgcgttagtcagtgcgcagcatttgagaatccaaaggggctgattcacggatgcagtaaggataatcgcaacgacacggagggttttaagtatccgctcggtcatgaggtgaatcattcccgcgaaacaagcattgaaatggaagagagcgaactggacgcccagtatctgcagaatacctttaaagtgagtaagagacagtctttcgcccccttttctaatcctggcaatgccgaagaggaatgtgcaacctttagtgctcactcaggcagcctgaaaaagcagagccccaaggttacctttgagtgtgagcagaaggaggagaaccaggggaagaacgagtcaaacattaaaccagttcagacggttaacatcactgctggcttccctgttgtcggacaaaaagataaacccgtggacaacgccaaatgctcgattaaaggtggctcacggttctgcctttcaagtcagtttagaggcaacgagaccgggttgattactcctaataagcacggcttgcttcagaatccctacaggatccccccgctgtttccaatcaagagcttcgttaagactaaatgtaaaaaaaaccttctcgaagaaaatttcgaggaacactccatgtccccagagcgggagatggggaatgaaaatatccctagtaccgtgtccaccatttcacgcaacaatatcagggagaatgtttttaaggaggcctcctcaagtaacatcaatgaagtgggctcctccaccaacgaggtaggatccagcatcaatgaaatcggttcgtccgatgagaatattcaggccgagctgggaagaaatcgcggaccaaagctaaacgccatgcttagattgggtgtattacagccagaggtatataagcaaagtttacccggcagcaactgcaagcaccccgagataaaaaagcaggaatatgaagaagtggtccagactgtcaatacagatttcagcccgtatctcatatcagacaatctcgaacagcctatggggagcagccacgcctcccaggtttgtagtgaaacacctgacgaccttctcgacgacggagagatcaaggaagatacttcttttgcagagaatgacatcaaagagagttcggcagtgtttagtaaatcagtgcagaagggagaactgagtcggtcaccttctccatttactcatacacacctggctcagggatatcgtcgtggggccaaaaagctagagtcttccgaagaaaacctcagctcagaagatgaagagctgccgtgcttccagcacctgctgttcggaaaagtgaataatattcccagccaatctacacgtcattcaacagtcgcaactgagtgtctgtccaagaacacagaggaaaatcttctgtcccttaagaactccctgaacgattgcagtaatcaggtgatcctggccaaagctagtcaggagcatcacttatcggaggagaccaagtgctccgcctctctgttcagttcacagtgttccgaactggaagatctgactgccaacactaacacacaggaccccttcctgatcggtagcagtaagcagatgagacatcagagcgaaagtcagggggtgggcctgtctgataaagagctcgtcagtgatgatgaggaacgtggcaccggactcgaggaaaacaaccaggaagagcaaagtatggattcaaaccttggtgaagccgccagtgggtgcgagtctgagacgagcgttagcgaggattgctcgggactatcaagccagagcgacattctgaccacacaacagcgtgacacaatgcagcataacttgattaagctccagcaggagatggctgaactggaggcagtgctcgagcaacacggttcacagcccagcaacagctacccctccatcatctcagactcctccgccttggaggatctgaggaatcccgagcaatccacctcagagaaggctgtactgaccagtcagaaaagctcggagtacccgataagccagaacccggagggactttctgctgataagttcgaagtatccgctgactcgtctacgtcaaaaaacaaggaaccaggcgtggaaaggagctccccttccaagtgtccatccctggacgataggtggtatatgcattcctgtagcggtagcctccagaaccgcaattatccctcccaagaagagctgattaaggtggtagatgtcgaagaacagcaattggaggaaagcggcccgcatgatctcaccgagactagctacctgccaagacaggatcttgagggaaccccctatctcgagagcggaatcagcttgtttagcgacgaccccgagagcgaccccagcgaagacagagctcccgaaagcgctagagtgggaaacatacctagtagtaccagcgcattgaaagtcccccaactcaaagtggcagagtccgcgcaaagccccgcagctgctcatacaactgacaccgccggatataatgccatggaggaatccgtttccagggaaaagcccgagctgaccgcctctaccgagagagtgaacaagcgcatgtcaatggtggtgtctgggttaaccccagaggagtttatgttggtatacaagtttgcccgcaagcaccacatcacactgactaatttgattactgaggaaactacccacgtggtgatgaagacggacgcagagtttgtgtgtgagcgaacactaaaatacttcctggggattgccggcggaaagtgggtcgtgtcctatttctgggtgacccagtccatcaaagagcgtaaaatgttgaacgaacatgactttgaagtcagaggtgacgttgtgaacgggaggaatcaccagggaccaaaaagagcccgtgaaagccaagatcgtaaaatctttcgcggcctcgaaatctgttgttacggtccttttactaatatgcctacagaccagctagagtggatggtccagctgtgcggcgcaagtgtggtgaaggagctgagctccttcactcttggaaccggagttcatccgattgtagttgttcaaccagatgcctggactgaggataacggatttcacgccatcggacaaatgtgcgaagccccggtagtgaccagggagtgggtgttggactccgtcgctctttaccagtgtcaggaactggatacatacctgatcccgcagattccacactctcactattag

SEQ ID NO: 14124 - DNA, 1719 bp, synthetic construct
  misc_feature 1..1719: note = Description of Artificial Sequence: Synthetic coding sequence
  source 1..1719: mol_type = other DNA
atgcttaagctgttaaatcagaaaaaagggccgagccagtgccctctgtgcaagaacgatataaccaagaggagcctgcaggagtctacacgattcagtcagcttgttgaggagttgctgaagatcatttgcgcatttcaactcgatacggggctggaatacgctaacagctacaattttgccaagaaggaaaacaacagccctgagcaccttaaggacgaggtttcgattatccagagtatgggatacagaaatcgcgcgaagaggctgctgcagtccgagccggagaacccatctctgcaggaaacgagcctgtctgtgcagctgtctaacttaggaaccgttcgcaccctgaggaccaaacagaggattcagccacaaaagacctcagtctatatcgagttaggtagtgatagcagtgaggacacagtaaacaaggctacttattgttctgtgggcgaccaagaactgttacagatcacccctcagggcaccagggatgagatttcactagattcagccaagaaagcagcctgcgagttttcagaaaccgatgtgactaacaccgagcaccaccagccatcaaataatgacctaaatacaacagaaaagcgtgctgccgagaggcatccagaaaaatatcagggagaagccgcgtctggctgtgaaagcgaaacatcagtgtcagaggactgcagtggcctatctagccagtccgacatccttaccacccagcaacgggatacaatgcaacacaatcttattaagctgcagcaagaaatggcagagcttgaagcagtactagagcagcacggctcgcagccgagcaattcatatcccagtattattagcgactctagtgctctggaagatctgcgcaaccctgagcagtcgacaagtgagaaagcagtcctgacatcacaaaagagctccgagtacccaatcagtcagaatccggagggtttgagcgctgacaagtttgaagtgagtgccgactcctctacatcaaaaaacaaggagcccggggtcgaaaggtcctcgcctagtaaatgcccttctttggatgatcggtggtacatgcatagttgcagtggaagcctgcagaatagaaattatccttcgcaggaagagttgatcaaggttgtcgacgtggaggagcagcaactcgaggaatccggcccccatgacctcaccgaaacctcatacttgccacggcaggatcttgaaggcacaccctacctggaatcaggaatctctctgttcagtgatgaccctgagagtgacccatctgaggatagagctcctgagagtgccagggtgggaaacatccctagttccacctctgcactgaaagtgccacagctgaaagtggccgagagcgcacagagcccggcagccgcccataccacggacaccgccggctacaacgccatggaggaatctgtgtcccgggagaaacctgagctcacagcgtcaactgagcgggtgaacaaacgcatgtctatggtggtgtccgggctcacccccgaggaattcatgctggtatacaagtttgccagaaagcaccatattacattgaccaacctgattacagaggaaacaacacacgtagtcatgaagaccgatgctgagtttgtctgcgagcggaccttgaagtattttcttgggatagccggtggaaagtgggtggtgtcctacttttgggtcacccagtcctag

SEQ ID NO: 14125 - DNA, 1422 bp, synthetic construct
  misc_feature 1..1422: note = Description of Artificial Sequence: Synthetic coding sequence
  source 1..1422: mol_type = other DNA
atggacctcagcgcactcagggtagaggaagtgcagaatgttattaatgcaatgcagaaaatcctggagtgccccatatgcctcgaactgattaaggagcccgtgtcgactaagtgcgaccatatcttttgtaaattttgtatgctcaaactgcttaaccagaaaaaaggtccttcacaatgtcctctttgcaagaatgatattactaagcgaagtcttcaggaaagcactagatttagtcagttagtagaagagcttctcaaaatcatttgcgccttccagctggacaccggcctggaatatgccaacagctacaatttcgccaagaaagaaaacaactctcccgaacatcttaaagatgaggtaagcatcatacagtctatggggtatcgcaatagggctaaaaggttgcttcagtccgaacctgagaaccccagccttcaggagacctcactctccgtacagctctccaatttgggaaccgtgcgtacattacggactaagcagcggattcagccccaaaagacttccgtgtacatcgagctgggatccgattcctctgaagacactgttaacaaagccacttactgctcagtgggagaccaggagctgctccagattacaccgcaaggaactcgggatgaaatttccctggattccgctaaaaaggccgcctgcgaattcagtgagactgacgtgaccaatactgagcatcaccagccaagcaataacgatctgaatacaacggaaaaacgagctgcagagagacaccctgaaaagtatcaggggtcaagcgttagcaacctgcacgtggagccgtgtggtaccaacacccatgcgtcctcacttcaacacgagaacagttcattgctgctgaccaaggataggatgaatgtcgagaaggctgaattctgcaataaatcaaagcagcctggcctggccaggtcccagcacaaccgctgggccggctctaaggaaacgtgcaatgatcgccgcactccctccaccgagaagaaggtggatttaaatgccgaccccctttgtgagcggaaagagtggaacaagcagaagctcccgtgttccgaaaatccacgcgataccgaagacgtgccatggatcactctgaactcgagtatacagaaagttaacgaatggttcagccggagcgatgagctgcttggaagtgatgattctcatgacggcgagtcggaaagcaatgccaaggtagcagacgtactggacgtgttgaacgaggtggacgagtactccgggagcagcgaaaaaattgacctactggcctcagatccacatgaggcactgatctgcaaatccgaaagggtgcactctaaatccgtggagagcaacatagaggacaagatatttgggaaaacgtatcgaaaaaaagccagcctcccgaactag

SEQ ID NO: 14126 - DNA, 534 bp, synthetic construct
  misc_feature 1..534: note = Description of Artificial Sequence: Synthetic coding sequence
  source 1..534: mol_type = other DNA
atgaacgtcgagaaagccgaattctgtaataaaagtaaacagcccgggctagcccgctcacagcacaatagatgggctggctccaaagagacctgcaatgataggagaacgccctccacagagaagaaggtcgacctaaatgccgaccccctttgtgaaaggaaggagtggaataagcagaaacttccatgctctgagaaccctcgggacaccgaagatgtgccatggatcaccctgaactcgtcgatacagaaggtgaatgagtggttcagccggtctgacgagctgctgggaagtgacgattctcacgacggggagagcgaatcaaatgccaaggtggctgacgtgctcgatgtgcttaacgaagtagacgagtattctggatcttctgagaaaattgacctcctggcctccgacccccatgaagccctgatctgcaaatctgaacgggtgcacagcaaaagcgtggaaagcaacatcgaggataagatcttcggtaagacatacaggaaaaaggccagcctccctaactag

SEQ ID NO: 14127 - DNA, 10257 bp, synthetic construct
  misc_feature 1..10257: note = Description of Artificial Sequence: Synthetic coding sequence
  source 1..10257: mol_type = other DNA
atgcctatcggaagcaaagagagaccaactttctttgagatttttaagacgcgctgcaacaaggccgatctcggtcctatctccctaaactggttcgaggagctgagcagcgaagcccccccatacaattctgaacccgcggaggagtcagagcacaaaaataataactacgaaccaaatcttttcaagactccccaaagaaagccttcctataaccagctcgcttccacccccattatttttaaagagcaaggactgaccttgccactgtatcagtcccccgtgaaagagcttgacaaatttaaactcgacctaggcagaaatgtccccaattctagacataagagcttgcgtacagtcaaaacgaaaatggatcaggcggacgatgtctcttgcccactgctgaactcctgcctgtccgagtctcccgtagttctgcagtgcactcacgtcactcctcagcgggataaatccgtcgtctgtggatcactcttccacactccaaaattcgtgaagggccggcagacccccaagcatatctctgaaagtttgggcgccgaagtcgacccggatatgtcctggagcagttctttggcaacgccacccactctttcatccacagttctcatcgttcgtaacgaggaggccagcgaaaccgtgttccctcacgataccactgccaacgtaaagtcctatttcagcaatcatgatgaatccctgaaaaaaaacgatcgcttcattgcatccgtgactgattccgaaaacaccaatcagcgcgaggcagccagccacggctttggcaagacgtcaggcaactcatttaaggtcaactcttgcaaggaccatatcgggaaatccatgcccaacgtcttagaggacgaagtatacgaaacagttgtcgatactagtgaggaggattcgttctctttgtgtttcagcaaatgtcgtactaaaaacctacaaaaagtgcgaacaagtaaaacccgaaagaaaattttccacgaggccaacgccgatgaatgtgagaaaagtaagaatcaggtgaaggaaaagtacagttttgtatccgaagttgagcctaatgacaccgaccctctggattcaaatgtagcaaatcaaaagccctttgaatccggttccgacaaaatcagtaaggaagtggtcccttctcttgcctgcgagtggagtcagctgaccctgtcaggactaaatggagcccaaatggaaaagattcctctgttacatatctcaagctgtgatcagaatatcagtgagaaggatcttcttgacacagagaataaaaggaagaaagactttttgacttcggaaaactcgctgcctcgtatctcttccctccccaagtccgaaaaaccattaaacgaggaaaccgttgttaacaaacgcgatgaagagcaacacctggaaagccacaccgactgcattctagcggtaaagcaggccataagtggaacttctcccgtggcatcaagctttcagggcatcaagaagtccattttccggatccgcgagtcccctaaggagacttttaatgctagcttctcagggcatatgaccgaccctaacttcaaaaaggagacggaagcatctgaaagcgggctagagattcacaccgtatgtagtcagaaagaggattctctgtgccccaacttgatagacaacggatcgtggcccgcgaccaccacgcagaatagcgtggccctgaaaaacgccgggcttatatcgactcttaaaaaaaagactaataaatttatctatgccatacatgacgagacctcttacaagggtaagaaaattccaaaggatcagaagtctgaattgatcaactgctccgctcaattcgaagccaacgccttcgaagcccccttaacatttgcgaacgcagactctggactgctgcactcaagcgtcaaaagaagctgctcccagaatgatagtgaagagcccactctaagcctgacctcctcattcggcaccattctgagaaagtgctcacgaaatgagacttgttctaacaacaccgttattagccaagaccttgattataaagaggcaaaatgcaacaaggagaagctgcaactgtttatcactcctgaggccgacagcctcagttgcctccaggagggtcagtgcgagaacgatcccaaatcaaagaaggtgtctgatataaaagaagaggttctggctgcggcttgtcatccagtgcaacacagcaaagtcgaatacagcgacactgatttccagtcgcagaaatctcttctgtatgaccacgaaaacgcctctacgttaattctaactcccacttcaaaggacgtcctctctaacttggttatgatcagtcggggcaaggaatcatacaagatgtctgacaagttgaaagggaataattacgagtcggatgtggaactgaccaagaatatccctatggaaaagaatcaggacgtctgtgctctcaacgagaattacaagaacgtcgaactgctgccaccagagaaatacatgagagtcgctagccctagcagaaaagtccagttcaaccagaacactaatctgcgtgtcatccagaagaatcaggaggaaaccacaagtattagtaagatcacggtaaatcctgatagtgaagaactgttctccgataacgaaaacaatttcgtctttcaggtagcgaatgaaagaaacaatctggccttagggaacactaaggaactccacgaaacagatctgacatgcgtgaatgagccaatttttaaaaattcgaccatggtcctgtatggagataccggcgataaacaagcaactcaggtctctattaaaaaggacctcgtctatgtgcttgccgaggagaacaaaaactctgtcaaacagcatatcaaaatgactctcggacaagacctgaaaagtgacatttcattaaatatcgataaaataccagaaaagaacaacgactacatgaataagtgggctgggttgctgggacccataagcaaccattcctttgggggatcatttagaactgctagcaataaggaaattaagctgtctgagcataacatcaagaagtcaaaaatgttcttcaaagacatcgaggagcagtatcctacatctctcgcgtgcgtcgagatagtgaacacactcgccctggataatcaaaagaaactctctaagccacagagtatcaataccgtctccgcccatctgcaaagctccgtggtggtgtcagactgcaaaaatagtcatatcactccccagatgcttttttctaagcaggatttcaactctaatcacaatctgaccccatcccagaaggcagaaatcacggaactgtcaacaattttagaggagtctggaagccagtttgaattcacacagttcaggaagccatcttacattttacaaaaatcaacatttgaagtgcccgagaatcaaatgaccattctgaagaccaccagcgaggaatgccgcgatgccgacctgcatgttataatgaacgcccccagcattggccaggtggactcgagtaaacagttcgaggggacagttgagatcaagcggaagttcgcagggctgctgaagaatgactgcaataagagcgccagtgggtacttaactgacgagaacgaagtggggtttagggggttctacagtgcgcacgggaccaaactcaacgtttctacagaggcactgcagaaggctgttaaactgttttccgatatcgaaaacatctccgaggagacctctgccgaagtccaccctatcagtctgtccagctccaagtgccatgacagcgtagttagtatgtttaagatcgagaaccacaacgacaaaaccgtttccgagaagaacaataagtgccaactgattctgcagaataatatcgagatgactacaggtactttcgtcgaggagatcacagaaaactataaacggaacaccgagaatgaggataataaatatactgcagcctctaggaactcccataacttggagtttgatgggagcgactcgagcaagaacgataccgtctgtattcacaaggatgagaccgatctgcttttcacagatcagcataacatctgcctaaaactcagtggccagttcatgaaagaaggaaacacacaaatcaaagaggacttatccgatctgaccttcctagaagtagccaaggctcaggaagcctgccacggtaacaccagtaacaaggaacagctgaccgctacaaaaactgaacagaatatcaaggactttgagacctcagataccttttttcagactgcaagcggcaaaaatatctccgtcgctaaagagagtttcaataaaatcgtgaattttttcgatcagaaaccagaagaactccacaatttctccctcaactccgagctccacagcgatatccgcaaaaacaaaatggatatcttgagttatgaggagacagacatagtgaagcacaagatcttgaaagaatcagtcccggttggaacaggcaatcaactagtgaccttccaggggcagcctgagagggatgagaaaataaaggagccgaccctcctgggcttccatacggcatcggggaaaaaggtgaaaattgccaaggaatctctggataaagtgaaaaatttgtttgacgaaaaggagcaaggtacatctgaaataacctcatttagtcaccaatgggccaaaacactgaagtatagagaggcctgtaaagatctggaattggcatgcgagactattgaaattactgcggcccctaagtgcaaagaaatgcaaaactctttgaataatgataaaaacctggtgtcgatcgagacggtggttccacctaaactcctgtcagataatctgtgccggcaaactgagaacctcaagacctccaagtctatcttcttaaaggtgaaagtccacgaaaacgtggaaaaggagacagcgaagtccccagccacttgctatactaatcagagcccatactcagtgattgaaaatagcgcactcgcgttttacactagctgttctcgcaaaacgagcgtgagccagacttctttactggaggctaagaaatggctccgtgagggcatatttgatggccagcctgagagaatcaacacagctgactatgtggggaactacttgtatgagaacaacagcaactccacgatcgccgaaaacgataagaatcatttgagcgagaaacaggatacctacctctcaaatagcagtatgagcaattcttactcctaccattcagacgaggtgtacaacgattcaggctacctgagtaagaacaagttggactccggaatagaacctgtattaaagaacgtggaagatcagaagaataccagcttctctaaagtaatttctaacgttaaggatgccaacgcttacccgcaaactgtcaacgaagatatatgcgttgaggaacttgtgactagtagttctccatgtaaaaacaaaaacgccgccataaagctgagtatctccaactccaacaactttgaagtcggccctcctgcattcagaattgcctctggcaagatagtctgcgtgagtcacgaaaccattaaaaaagtcaaagacatcttcaccgattccttcagtaaggttataaaggaaaacaacgagaacaagtcaaagatctgccaaactaaaattatggcagggtgctatgaagcgctggatgacagtgaagatattctccacaattcactggacaacgatgaatgttctactcacagccacaaagtctttgccgacattcaatccgaggaaatccttcagcataaccaaaacatgagcggactggagaaggtgtcaaagattagcccttgcgacgttagcctcgagacttccgatatatgcaagtgttcgattgggaagttacacaagtcagtgtcctctgccaacacctgtggaatcttcagcaccgcaagcgggaaatccgtacaggtgtcagacgctagcttgcagaacgctcgacaggtgttcagtgaaatcgaggacagtaccaagcaggtgttttcaaaggtgctatttaagtccaatgaacatagcgaccaactcacacgggaggagaacactgccattcgtacccctgaacacttgatatcacaaaaaggattttcatacaacgtggtgaattccagcgcctttagcggtttcagtaccgcgtccggcaaacaagtctcgatacttgaatccagccttcataaagtgaaaggagtgctggaagagtttgacctgatacgtaccgaacatagtctacactactccccaacaagtcgccagaacgtgtcaaagatcctcccaagggtcgacaagaggaatccggagcactgcgtaaactcagagatggaaaagacatgcagtaaggaattcaagttgagtaacaacctcaatgtcgagggcggctccagcgagaataaccactcgataaaggttagtccatacctttctcagtttcagcaggacaaacagcagcttgttctgggaacaaaggtctcattggtcgagaacatccacgttctggggaaggaacaggcgtcccccaagaacgtcaagatggagattggcaaaacagagacattctcggatgtccctgtcaaaactaatatcgaggtttgtagtacctactcaaaggacagtgagaactacttcgaaacagaggctgtggaaatcgccaaagcctttatggaagacgacgagcttacagattcaaaactcccctctcatgccacccatagcctgtttacatgccccgaaaacgaagagatggtcctgagcaactcccgcatcgggaaacggaggggggaacctctgattctagtgggtgaaccctctataaagcgtaatctgctgaacgaattcgacagaattatcgagaaccaagagaagtccctcaaggccagtaagtccaccccagacggcaccattaaggacaggagactgttcatgcaccacgtctcactcgagccgataacttgtgtcccctttagaacgaccaaggagagacaggaaatccagaatcccaacttcaccgctcctggacaggaattcctctccaaatcccacctctatgaacatttaaccctggaaaagtcatcctccaacctggcagttagcggccatcctttttaccaagtgagcgccacgaggaatgagaaaatgcgccatcttatcaccacaggtcgtcccaccaaagtctttgtgccaccattcaaaacaaagagccacttccatcgcgttgaacagtgtgtgcgaaatatcaatctagaggagaacaggcaaaaacaaaacattgacggccatgggagcgatgacagcaaaaataaaataaacgataacgaaattcaccaatttaataaaaataatagcaaccaagcggtggccgtaacgttcaccaagtgtgaagaggagcccctcgatctcatcaccagtctccagaacgcaagagacatccaagatatgcgcattaagaagaaacaacgacaacgcgtgtttccccagccaggatcactttacctggcgaagacctccacattgccccgcataagcttgaaggccgcagtcggaggccaggtgccctccgcctgctcacacaaacaactgtatacatacggggtttctaaacattgcattaaaatcaactcaaaaaacgcggagtcatttcagtttcacacagaagattatttcggcaaagaaagcttatggaccgggaagggaatccaactggcggatggaggctggctgattcccagcaacgacggcaaagcaggaaaagaggagttttatcgcgccttgtgcgacacccctggtgtcgatcctaagctgatttcccgtatctgggtgtacaatcattaccgatggatcatctggaaactcgcggccatggaatgcgcgtttcctaaggagtttgcgaatagatgcctaagccccgaacgagtgctgctgcagctcaaataccggtatgataccgagatcgaccggtcccgccgatctgcgatcaagaagatcatggaaagagatgacacggccgcgaagacactggtgctttgtgtgtccgacatcatctccctgtctgctaacatatctgaaacatctagcaataagacatcttcagctgacacccagaaggtggctattatagagctcacagacgggtggtacgccgtgaaggcccaactggaccctcctctgcttgccgtgctgaaaaatgggcggttgactgtgggacaaaagattatcctgcacggagctgaactggtgggaagcccggacgcttgtactcccttggaggccccggagtccctgatgctgaaaatttcagccaactcaacgaggccggctagatggtatacaaaattagggtttttccccgaccccagaccttttccactgccactctcatctctgttctcagacggcggcaacgttggttgtgttgatgtgatcattcagcgcgcgtaccccatccagtggatggagaagacatcatctggattatacatctttcgcaacgagcgtgaagaagagaaggaggccgctaagtacgttgaggcacagcagaaaaggctcgaagctctgttcaccaagatccaggaagagttcgaagagcacgaggagaatacgacgaagccttatctgccaagtcgggctctcacccggcaacaagtgagggccttgcaggacggagctgagctgtatgaggcagttaaaaacgccgctgaccccgcctacctggagggatatttctccgaggagcagctgcgggccctgaataaccaccgtcagatgctgaatgacaaaaagcaggcacagatccagctggagattcggaaagcaatggagtcagccgagcagaaggaacagggcctgagcagagacgtgactaccgtctggaaattaaggatagtaagctactccaaaaaggagaaggattccgttattctttcaatctggaggcctagcagcgatctttactctctgttgaccgaagggaagcgctacaggatctatcacttggctacttcgaaatcgaagtcaaaatctgagcgcgcaaatattcagctggctgcaactaaaaaaacacagtatcagcagctgccagtttctgacgaaatcctcttccagatttaccagcccagagaacccttacacttttccaagtttctagatccggactttcagccttcttgcagtgaggtggatttaattggcttcgtggtatccgttgtcaagaagactgggttggccccctttgtctatctgtctgacgagtgctataatctcctggctatcaagttttggatcgatttaaacgaggatatcataaaaccacatatgctgatcgccgcctcgaatctccagtggagacccgaatctaagagcggactgcttactctgttcgcaggagacttctctgtcttttccgcctcccccaaggaggggcactttcaggaaacctttaataagatgaagaacactgtggagaacatcgacatcctgtgtaacgaagccgagaacaaactgatgcacattctgcacgccaatgaccctaaatggagcacaccgacgaaagattgcacgagcggcccatataccgctcagatcataccaggaacagggaataagcttctaatgtcctctccaaattgtgagatctattaccaaagtcccctgagcttatgcatggcaaaacggaaaagcgtttccacaccagtctcagctcaaatgactagtaagtcctgcaagggagagaaagagatcgacgaccagaaaaattgtaagaaaagacgcgccctagacttcctttctcgactgccactccctcccccagtttcaccaatctgtacattcgtcagcccagcggcccagaaggcattccagcccccccgcagttgcggaacaaagtacgagactcccatcaagaaaaaggaattaaacagtccccagatgaccccatttaagaagtttaacgagatttcccttctggagagcaattctattgctgatgaagagctcgccctgataaacactcaggcactgctatccggctctactggtgagaagcagttcatttcggtgtcagaatcaactcggactgcccctactagttccgaagactacctgagactgaagaggagatgcacgacctccctgattaaggagcaagaatcttcacaggcatcgactgaggagtgcgaaaagaataaacaggacacgatcaccaccaaaaagtacatatag

SEQ ID NO: 14128 - DNA, 1809 bp, synthetic construct
  misc_feature 1..1809: note = Description of Artificial Sequence: Synthetic coding sequence
  source 1..1809: mol_type = other DNA
atgccaatcggttccaaggaacgccctactttctttgagatcttcaagacacggtgtaacaaggcagggccaatctcgctaaactggtttgaagaactgagtagcgaggcaccaccatataatagtgagcctgctgaagaaagcgaacacaaaaacaataactatgagccgaatctgtttaagacaccgcagagaaaaccttcctacaaccagctcgctagcacacctattatattcaaagagcagggtctgaccctcccactgtaccagagccctgtgaaagagctggacaaatttaaacttgaccttgggagaaatgtgcctaactcccggcataaatccctgcggaccgtcaagacaaaaatggatcaagcggacgacgtatcctgtccattactcaactcttgcctgagtgaatcccccgtggtcctgcagtgtacacacgtcacacctcaacgagacaagtccgtcgtttgtggctccctgtttcacactccaaaatttgtgaagggacgccaaaccccgaaacacatttcagagagtctgggcgcagaggtggaccccgacatgtcttggagttcaagccttgctacaccccctactctgtccagcacagtgctcatagtgaggaacgaagaagcctctgagacggtgttcccacatgacaccaccgcgaacgtgaagagttatttcagtaatcatgatgagtcattgaagaagaacgacaggttcatcgccagcgtcaccgattccgagaacacgaaccagagagaggccgctagtcacggtttcggtaaaacatccgggaatagcttcaaagtgaattcatgcaaagaccatatcgggaaatccatgccgaatgtcctcgaagacgaggtctatgaaaccgtcgtggatacctcagaagaagactccttcagtctctgcttcagcaagtgccggaccaaaaatcttcagaaggtcaggacaagcaaaacacgcaagaaaatcttccatgaggctaacgcagacgagtgcgagaaatccaagaatcaggtcaaggaaaagtactcctttgttagcgaggtagaaccaaacgacacagatcccctggactccaatgtggccaatcaaaagccattcgagtctggttcggacaagatctcaaaagaggtggtcccctccttagcctgtgagtggagtcagcttactctgtctggcttgaacggggcccaaatggagaagatccctctgctgcacattagttcatgcgaccagaatatctccgagaaggacctgcttgacacagaaaacaagcgtaaaaaggattttttaacatccgagaactcactgccacggatctctagtctgccgaaatctgagaagccactaaatgaagaaaccgtggtgaataagcgcgatgaagagcaacatctggaaagtcatacagattgtattctggccgtcaagcaggcaatttccggcacttcgccagtcgcaagcagcttccaggggattaagaagtcaatttttcggattagggaatccccgaaggaaacctttaacgctagcttctccggacacatgaccgaccccaactttaagaaggaaaccgaggcgagtgagagcggcctcgagatacacactgtctgctcacaaaaggaggatagtctgtgtcctaatctcattgacaacgggtcttggccggcgacgactacccaaaattctgtcgcactgaaaaatgcagggctgatcagcacgcttaagaaaaagaccaataaatttatctacgccatccacgacgagacaagctacaaagggaagaaatag

SEQ ID NO: 14129 - DNA, 10257 bp, synthetic construct
  misc_feature 1..10257: note = Description of Artificial Sequence: Synthetic coding sequence
  source 1..10257: mol_type = other DNA
atgcccatcgggtccaaagagcggccaacgttttttgagatctttaagaccagatgcaataaggctgatcttggtccaatatccctcaactggtttgaggagctcagttctgaagcacctccttataattccgaaccggccgaggagtcagagcacaaaaacaataactacgagcctaatctcttcaagaccccccagagaaagccctcgtataaccagctggccagtacgcccattatctttaaagagcaagggctgacactcccgctgtaccagagtcctgtcaaggaactagacaagttcaaactggatcttggcaggaacgttcctaatagccgtcacaagagccttagaactgttaaaaccaagatggaccaggcagatgatgtaagttgccctcttcttaatagttgtctcagtgagtctccggtcgtgttgcaatgcacacacgtgactccccagagggacaaatccgttgtgtgcggctccttgttccatacaccaaaattcgtgaaggggaggcagacaccaaaacacatttcagaatctctcggtgctgaagtggacccagatatgtcctggtcaagctctctcgcaacacccccgacgctcagctctacagtgctgatcgtgcgaaacgaagaggctagtgaaaccgtatttccccatgacacaactgcaaatgtcaagtcctatttttctaatcatgatgagagccttaaaaaaaatgatcggtttatcgcctctgtgacagattcagagaacacaaatcagagagaggccgcctcacatggattcggcaagacctccggtaatagcttcaaggtgaatagttgcaaggatcatatcggaaagagcatgcccaacgtcttggaggatgaggtgtacgagacagtcgtagacacaagcgaggaggatagctttagtctctgcttctctaaatgtaggacaaaaaacctgcagaaagttaggacctccaaaactaggaaaaaaatctttcacgaggcaaacgctgatgagtgtgagaagagcaagaaccaggtcaaagaaaagtattctttcgtgtctgaagttgaacctaatgacactgaccccttggactcaaatgttgctaatcagaagccgttcgagtccggttcagataagatctccaaggaggttgtccccagcctcgcctgcgaatggtcacaactaactctgtcgggcctcaacggcgctcagatggaaaagatccctctactgcacatcagtagttgcgaccaaaacatcagcgagaaggacctgctggatacagagaataagcgtaagaaggactttctcaccagcgaaaacagcctaccacggatttcttccttgccgaagtcagaaaagcctcttaatgaagaaaccgtggtaaacaaacgagacgaagaacagcacctggagagccacactgactgcatcttggctgtgaagcaggccatttcaggcacctctccagtggcctccagtttccaggggattaagaaaagcatcttccgcatccgggaaagcccaaaagagacgttcaatgcctcattttcaggccatatgaccgatccgaatttcaagaaggaaacggaagcctctgagtccgggctggagattcacactgtgtgctctcagaaggaggactcactctgtccaaatcttatcgataatggtagctggccagctacaactactcagaatagtgtcgccttaaagaatgctgggctgatcagcaccctgaaaaagaaaacgaacaaattcatctacgccatccatgatgaaacgtcttacaaagggaaaaagatccctaaggaccagaaaagtgagcttatcaattgctccgcgcagtttgaggccaacgccttcgaagcccctttgacttttgctaacgctgattctggcttgcttcatagcagtgtaaaaagatcttgcagccaaaacgactctgaagagcctaccctgagcttgacgagcagctttggcactatactgaggaaatgcagtcggaacgagacatgctccaacaacaccgtcatctctcaggatttggactacaaggaggccaaatgcaacaaggaaaagctgcagttattcataactcccgaggcggatagtttatcttgtctgcaggagggacagtgtgaaaatgatccaaagagtaaaaaagtctcggatattaaagaggaggtacttgccgccgcctgccaccccgtgcagcactcaaaggtggaatactccgacacagatttccagtcgcaaaagtctcttctgtacgatcacgagaacgcttctaccctcatcctgacccccacctctaaggatgtgttgagtaacctcgtgatgatcagccggggcaaagagtcctacaagatgagtgacaaactcaagggaaacaactatgaatctgacgtggagctgacaaaaaacatcccaatggaaaagaaccaggatgtatgcgctctgaatgaaaactacaaaaacgtggaactgctgcccccagaaaaatatatgcgggtcgcctccccctcccggaaagtgcaattcaaccagaatacaaacctgagggtgatccagaagaatcaagaggagacaacatctatcagcaagatcactgtgaatcctgatagtgaggagctgtttagtgacaacgaaaataattttgtatttcaggttgcaaacgagaggaataatctcgccctggggaatactaaggagctccacgaaacagatcttacctgtgtgaatgaacccatcttcaaaaactcaaccatggtactttatggggacacaggggacaagcaagccactcaggtttctattaagaaagaccttgtgtatgtcctggccgaggaaaacaaaaactcggtgaaacaacacattaaaatgacgctgggacaggatctgaaatcagatatttccctgaacatcgataagatcccagaaaagaataatgactacatgaataagtgggctgggttactggggcccatctccaatcacagctttggcggcagctttagaactgcgtccaacaaggagatcaaattatcggagcataatatcaaaaaaagtaagatgttctttaaggacattgaggagcagtatccaacttccctggcctgcgtggagatcgtgaatactctggccctggacaaccagaagaaacttagtaaaccgcagagcattaacacagtttctgcacatcttcagtctagtgtcgtggtcagtgattgcaaaaactcacatatcacaccacagatgctattcagtaagcaagactttaattctaatcacaacctcacgccctctcagaaagctgagattacagaattatctaccatcttggaagaaagcggtagtcaattcgagttcacccaatttcgcaagcctagctatatccttcagaagagtacgtttgaggtgccagaaaaccagatgacgattttgaagaccacaagtgaagaatgccgcgatgccgatctccatgtcatcatgaacgctcctagcataggtcaggtggactcttctaagcagtttgagggcactgttgagataaagaggaagttcgcgggcctcctcaagaatgactgtaacaagagtgcgagcggatacctgaccgatgagaacgaagtgggtttccgtggattttattcggcccacggcactaagctaaacgttagcaccgaggcactgcagaaggctgtgaaactctttagcgacattgagaacattagcgaggaaacttctgcagaagtccaccctatatccctttcaagcagcaaatgccatgactccgtcgtatctatgttcaagatagaaaatcacaatgacaagacagtgagtgagaaaaacaataaatgccagctgattttgcagaataacattgaaatgacaacaggcaccttcgtggaagagataaccgagaactacaaaaggaacactgaaaacgaagataacaagtacacagccgcctctcgaaacagccataaccttgagttcgacggaagtgattccagcaaaaacgacacggtttgcatccacaaggatgaaactgatctgctttttacagatcagcacaacatctgcctaaaactgtcggggcaattcatgaaggaaggcaacacacagattaaagaggacttaagcgacctgacatttctagaggtcgcaaaggcgcaggaggcttgccatggcaacacgtccaacaaggaacagcttaccgctacgaaaacagaacagaacattaaggatttcgagaccagcgacacgttttttcagaccgcgagtggaaagaatatctcagtcgccaaagagagcttcaacaaaatcgtgaactttttcgatcagaagcccgaagagttgcataactttagtctgaactccgagctccacagtgatattaggaagaataagatggatatcttgagctacgaggagactgacatcgtcaagcataagatcctgaaagaaagcgtccctgtcggcacgggaaatcagctggtcacctttcaaggacaaccagaacgcgacgagaagatcaaagagcccacactgctggggttccataccgccagtggaaaaaaggtcaagatcgccaaggaaagcctcgacaaggtgaaaaacctgtttgacgagaaagagcagggaacctctgaaattacctcattctctcaccagtgggctaagacacttaaatacagggaggcttgcaaagacttagaactggcgtgcgagactatcgaaattacagccgcccccaaatgtaaggagatgcaaaacagtctgaataacgacaagaacttagtgagtatcgagaccgtagtcccccctaaactcctttctgacaatctgtgtagacaaacagagaatttgaagaccagcaagtccatctttctgaaagtgaaagtacacgagaacgtcgagaaagagaccgcaaagtccccagccacttgttacaccaaccagagtccttactccgtgatcgagaattctgcactcgctttctacacctcctgttcccgaaaaacatctgtgagccagacttctctcctcgaagcaaaaaaatggttaagggagggaatctttgacggacaacccgaacgtataaacaccgcagactacgttggtaactatctgtacgaaaacaatagcaacagcactatcgcagagaatgacaaaaatcatttatccgagaagcaggacacatatctcagtaacagtagcatgtctaattcctacagctatcattctgatgaagtgtataatgactccggctacctgagtaaaaacaaactggattcaggcatcgagcctgtactgaaaaatgtagaggatcaaaagaataccagtttctccaaagtgatttccaacgtcaaggatgcgaacgcctatccccagaccgtaaacgaggacatttgtgtcgaggaactggtcacctcttcctccccatgtaaaaacaaaaacgctgccattaagctatccatttcaaactcaaacaattttgaggttggtcccccagcgttccggatcgctagtggaaagatcgtctgcgtttctcacgagacaatcaaaaaagtcaaagatatcttcactgatagttttagcaaggtgatcaaggagaataacgagaacaagtctaagatctgtcagaccaaaattatggcaggctgctacgaggctctcgatgacagcgaagacatactgcacaattccctggacaatgacgagtgttccacacattctcataaagtgttcgcagacatccagagcgaggagattcttcagcataatcagaatatgagtggcctggagaaagtctctaagatctccccatgtgacgtgtccctggaaacaagtgacatctgcaaatgctcaatcggcaagctccataaaagtgtgagctctgccaatacctgcggaattttttctacagcctccgggaaatcggtgcaggtcagtgacgctagtttgcaaaatgccagacaggtgtttagtgagattgaggattccacaaagcaagtgttcagcaaagtgctttttaaatccaacgaacatagcgaccaactgactagagaagagaatacagccattaggaccccagagcacctgatttcacaaaagggtttttcgtataatgtagtgaacagctccgcattttctggattctctacagccagcgggaaacaggtcagcattctggagtcttcgctgcacaaagttaagggagtgctggaggaatttgatcttattagaacagaacatagtctgcattattcccctacttccagacagaatgtgtctaaaattttgccccgggtggataagcgaaacccggaacactgtgtaaattccgagatggagaaaacgtgttccaaggagttcaaactaagcaataacctgaacgtggaaggaggctcttcggagaacaaccattcaatcaaagtatctccatacctcagccaattccagcaggataagcagcagttagtcttaggaaccaaggtgagcttagtcgaaaatatccacgtgctgggaaaagagcaggcgtccccaaaaaatgtaaaaatggaaattgggaaaaccgaaaccttctccgatgtgcccgtcaagactaacatcgaggtgtgcagcacatactccaaggattcagagaactacttcgaaactgaggcagtggagatcgcgaaggctttcatggaggacgatgaattgaccgacagtaagttaccctcccacgcgacccacagcttatttacctgtcctgaaaacgaggagatggttctaagcaatagtaggataggcaaaaggagaggcgagccattgatcctcgtaggagagccatctatcaaacgcaacttgttaaatgagttcgaccgcatcatcgagaatcaagaaaaaagtctcaaggcatccaaatccaccccagacggcacgattaaagatcgtaggctgtttatgcaccatgtttctttggaaccaatcacatgcgtgcctttcaggaccacaaaggagcgccaggaaatccagaaccccaattttaccgctcctggacaggaatttctctccaagtcacatctttacgagcacctgacactggagaagagtagttctaatcttgcagtgtcaggacatcctttctaccaggtcagcgcaaccaggaacgaaaagatgaggcatctgatcaccactgggcgccccacgaaggtgtttgtgccacctttcaagactaagagccacttccatcgcgttgagcagtgtgtccgtaacattaaccttgaggaaaacagacagaagcagaacattgatggacatggttccgacgactctaagaacaagatcaacgataacgagattcaccaattcaacaagaacaattccaatcaggccgtcgccgtgactttcacaaaatgcgaggaggagcctctcgacctgatcacctcgctccagaacgctcgggacatccaggacatgcggattaaaaaaaagcagcgtcagagagtgttcccccagcccggctcactgtatctggccaagacctctacgttaccccgcatcagcctgaaggccgcggtaggagggcaggttcccagcgcttgctcgcacaaacaattgtacacatatggagtgtcaaagcactgcatcaaaatcaactctaagaatgcggagtcgttccagttccacacggaagattattttgggaaagagtccctatggacaggcaagggcatccaactggccgatggtggttggttgatcccgtcaaacgacgggaaagctgggaaggaggaattttacagagccctatgcgacacacctggggtggatcccaagctcatctcaagaatttgggtgtataaccattacaggtggatcatttggaagttggccgcgatggagtgtgcctttccaaaggagtttgccaatcggtgtctgtcaccagaaagagtgctgttgcagctgaagtataggtatgacaccgagatcgatcgctctaggcgaagcgccatcaagaagatcatggagcgagatgataccgctgctaagacactagtgctctgcgtgtcagacatcatcagcctctcggccaacatctctgaaacaagttccaataagactagtagcgcagatacgcagaaggtggctatcatcgagctgaccgacggctggtacgctgtgaaagcccaattggacccacccctgctggctgtcctaaaaaacgggcgcctaacagtcggccagaaaatcatccttcatggggccgaactggtgggcagccctgatgcttgtacccctctggaggcgcctgagagtttgatgctgaaaatctctgccaactctacccggccagcccggtggtatacgaaactcgggtttttccctgatccccgtcctttccccctcccgctgagcagcctattctccgacggagggaacgttgggtgcgtcgatgtaatcattcaaagagcataccccattcagtggatggagaagacttcctccggattgtacatcttccggaacgaacgtgaagaagagaaggaagctgctaagtacgtcgaagctcagcagaagagactggaagccctgttcacgaaaattcaagaagaattcgaagagcatgaggaaaacacaaccaagccatatctgccgtctcgtgctctcacaagacagcaggtacgggccctgcaggatggggccgaattgtacgaggccgtcaagaatgctgccgaccccgcctacttggaaggatactttagcgaggaacagttacgcgccctgaacaaccatcggcaaatgctgaatgacaagaagcaggctcagatccagctagagatccggaaggcgatggagtctgccgaacaaaaggaacagggcctctctcgagatgtgactactgtgtggaagctgaggatcgtgtcctatagcaagaaggagaaggattcagtgattctgagcatctggcgtccctctagtgatctctattccttgctaactgaaggcaaacgctaccgcatttatcatttggctacaagtaaatctaagtcaaagagcgagcgggcaaacatccagttggctgccactaagaagactcaataccagcaactgccggttagtgatgaaattctctttcagatataccagcctcgtgaaccccttcatttttccaagtttttagatcccgacttccagcctagctgctcagaagtggacctgatcggcttcgttgtctcggttgttaagaaaactggattggcaccattcgtttaccttagtgacgagtgttacaacttgctggccatcaagttctggatagacctgaatgaggacatcattaagccacacatgcttatcgctgcatccaatctgcagtggcggcctgaatcaaaatcgggattgctaacgctcttcgcgggagacttctctgtctttagcgccagccctaaggaggggcattttcaagagactttcaacaagatgaagaacacggtggagaacatcgacattctgtgcaacgaggctgaaaacaaactgatgcatattctgcatgctaatgacccaaagtggtcgacaccaaccaaagactgcacgagtggtccctacactgctcaaattatccctggaaccggcaataagctcctgatgtcgtcccccaactgcgagatctactaccagtctcccctgtccctgtgcatggctaagagaaagtctgtcagcaccccagtgtctgcgcagatgaccagcaagagttgtaaaggcgaaaaggagatcgacgatcagaagaattgcaagaaaaggcgcgccctagactttcttagcaggttgccactgccaccgccagtcagtcccatttgcactttcgtgtctcccgccgcccagaaagcctttcaacccccaaggtcttgcggcacgaaatatgaaaccccaatcaaaaagaaggagctgaatagcccacaaatgacccctttcaagaagttcaacgaaatttctctgctagagagcaattctatcgccgatgaagagctcgccctgatcaacacccaagcccttctaagcggaagtacgggagagaaacagtttatctcagtgtccgaatcaacccggacagcacccacatcctccgaggactaccttcgcttgaaaagaaggtgtacgacctccctgattaaggaacaggagagctcacaggcatcgaccgaagaatgtgagaagaataagcaagacactataactaccaaaaagtatatctag

SEQ ID NO: 14130 - DNA, 2667 bp, synthetic construct
  misc_feature 1..2667: note = Description of Artificial Sequence: Synthetic coding sequence
  source 1..2667: mol_type = other DNA
atgcattgccctggggaggcacccctcgccgcaccacggcctacaccaaaggacccttgcctcagaaatgttctggctaaagcactgtacgataatgtggctgagtcacctgacgaattgtcattcagaaagggcgacattatgaccgttctggagcaggatacgcagggcctggacgggtggtggttatgcagtctgcacggacggcagggcatcgttcccggcaacaggctgaaaatcttggtgggcatgtacgataagaagcctgcaggccccggacctggcccccctgccactccggcgcagcctcagccaggactgcacgcccctgccccacccgctagccagtatacaccaatgctacctaatacgtaccagccccagcctgatagcgtgtacctggtacctaccccttctaaggcacagcaggggctttatcaagtcccaggcccctctccgcagttccagtcaccccccgccaagcagacaagcactttttcaaagcaaacaccccatcacccctttcccagccctgccaccgatctctatcaggtgccgcccggccccggcggaccagctcaggacatttaccaggtccctccctccgccgggatgggccacgatatctatcaggtacctccctccatggatacgcgcagttgggagggcactaaacctcccgctaaggttgtggtgccaacaagagtggggcagggttacgtgtatgaggccgctcagccagagcaggacgaatatgatatccctcgccatctcctggccccaggcccccaagacatatatgatgtgccgcccgtccggggcctgctgccctcccagtacgggcaggaggtgtatgatactccacccatggcagtgaagggccccaacggaagggaccccctcctggaggtctacgacgtacccccatccgtcgagaaagggctgccaccttctaaccaccatgccgtttatgacgtgcccccttccgtgtctaaggacgtacccgacggtccgctgctgcgggaagagacatatgatgtgccccccgcctttgctaaggccaaaccctttgatcctgcacggaccccccttgtcctggccgcccctccccccgactcgccacctgctgaggacgtttacgatgtccctccaccggctccagacctttacgacgtccctccagggttgcggcggcctggccccgggacactgtacgatgtgccccgtgaacgggtgttaccacccgaggtagccgacgggggcgttgtggacagtggtgtctacgcagtgcctcctcccgctgagcgcgaagcccccgccgaaggcaagcggctgagcgccagtagcactggttccacacggagtagccagtctgctagtagccttgaagtggccgggccaggtcgagaaccactggagctggaagttgccgtggaggcactggctagactccagcaaggcgtgagcgctacagttgctcatctgctggacctcgcaggatctgccggcgccacaggttcttggcgttcgccaagcgaaccccaggaacctctggtccaagatctccaggccgctgtcgccgctgtgcaatccgccgtccatgaacttttggaattcgctcggtcagctgtcggaaatgctgcccacacttcagatcgtgccttacatgccaagcttagccgccagctgcaaaagatggaagatgttcaccagaccttagtggcccacggtcaggctctggacgccggtagggggggtagcggggctacgctcgaggacctggacaggctcgtcgcatgcagtagagccgtacccgaagatgctaagcagctggccagttttctgcacgggaatgccagcctcctgttcagaagaacgaaagcaactgctccggggcctgaaggagggggtactctgcatccaaatccaacagataaaacttcttctattcaatcccgaccacttccgtctcctccaaagttcacctcacaggactcccctgacggacagtacgagaatagtgagggcggctggatggaagattatgactacgtccatctgcagggtaaggaagagttcgaaaagacacagaaagagctgctggaaaagggctccatcacccgccagggcaaaagccaattggagctgcaacaactgaagcagtttgaacgactggagcaagaggtgtcccgtcctattgatcatgacttggcgaactggacaccagcccaacctctcgcacccggacggactggcggactgggcccctcagacagacagctcctactgttctatctcgagcagtgcgaggctaacttaaccacactcacaaacgccgtggacgcatttttcaccgctgtagcaaccaaccagccaccgaagattttcgtggcacacagcaaatttgtcatcctgtctgcacacaagttggtctttataggcgacactctgagccgccaggctaaggctgctgatgtgagaagccaggtgacacactattccaatctcttgtgtgatttgctgcggggcattgttgccacaaccaaggccgccgctctccagtatccgtcaccgagcgcggcccaagacatggtggagcgggtcaaggaattaggccatagcacgcagcagtttcggcgcgtgcttgggcaacttgcagccgcatag

SEQ ID NO: 14131 - DNA, 2613 bp, synthetic construct
  misc_feature 1..2613: note = Description of Artificial Sequence: Synthetic coding sequence
  source 1..2613: mol_type = other DNA
atgaaccatttaaacgtgctggccaaggcactgtacgacaatgttgctgaaagtcctgacgagctctccttcaggaaaggtgatatcatgactgttctggagcaggacacgcaaggattggatggctggtggctgtgttctttgcacggacgacagggaattgtgccaggaaaccgcctgaaaatactcgtggggatgtacgacaaaaagccagccggacctggccccggccccccagctacacccgctcaaccgcaacctgggctgcacgcgcctgctccgcctgcttctcagtacacccctatgctccctaacacttatcaaccccagcccgattccgtgtatctcgttcccaccccctctaaggcccagcaaggcctgtaccaggtacctggtccatccccccagttccagtcaccccctgcgaaacagacaagcaccttctctaaacagacccctcatcacccatttccctcccccgccactgatttgtaccaggtaccccctggaccgggcggacctgcacaggacatttaccaagttcctccttccgcaggaatgggacacgacatttatcaagtcccaccctcaatggacaccaggtcctgggaaggcactaagccacccgctaaggtggtggtgcccaccagagttggtcaggggtacgtgtacgaggcagcccagccagagcaggacgagtatgacattcccaggcatctgttagccccaggcccacaggatatctatgatgtgcctcctgttagggggctgttgcccagtcagtacggccaggaggtctatgatactccacctatggccgtgaagggaccgaatggacgagatcctcttctggaagtttacgatgtgccccctagcgtcgagaagggactacctccatccaatcatcatgcggtctatgatgtgcccccatctgtcagcaaagacgtgccggatggcccacttctgcgcgaagaaacatacgatgtgcctcccgctttcgcaaaagccaaaccttttgaccctgccaggactccactggtactggccgcaccgcctccagattcaccgcccgccgaggacgtgtacgatgtgcctcctcctgcacccgatctgtacgatgtaccccctgggctgaggcgccccggccccggaactctctacgatgtgccgagagaaagagtgctgccaccggaggtggcagatggaggagtagtggactcaggggtgtacgccgtccctccccccgcagaaagggaggccccggctgagggcaaacggctgtccgccagctccactggctctactcggagcagccaaagcgccagctccctggaggtggctggccccgggcgggaacctctcgagctggaggtcgctgttgaggccttagcacggttacagcagggtgtgtctgccaccgtagcgcacttactggatcttgctggttccgccggcgccacaggaagctggcgctcccccagtgagccccaagaacctctggtgcaagatctgcaggctgccgtggccgctgttcaatctgctgtccatgaactgctggaattcgctcgcagtgcggtagggaatgcggcccacacgtctgacagagccttgcacgctaaactgagccggcagttacagaagatggaggacgtacaccaaacccttgtggcccatgggcaggcactcgatgctggacggggggggagtggagcaacgttagaggacttggaccggctggtggcctgctctcgcgccgtccctgaagacgctaagcagctggccagtttcctgcatggcaacgccagcctgctgttccggcgtactaaggctaccgcccccggcccggaagggggagggaccctgcatccaaatcccacggacaagactagctccattcagtcacgtcctcttccaagtccccccaaatttacttcccaagacagccccgatgggcagtatgaaaacagtgaaggcgggtggatggaagattacgattacgtccacctccaggggaaagaggagttcgagaaaacacagaaagagctgctcgaaaagggatctatcactcgccaaggaaaatcacagctggagcttcagcagcttaagcagtttgagaggctggagcaggaggtctcccggccaatcgaccatgatctggctaattggactcccgcgcaacctttggccccggggcggacaggtggactcggtccttctgaccgccaactcctgcttttctatctggagcaatgcgaagccaacttgacaaccttaactaacgctgttgacgcgttcttcactgcagtagccacaaaccagccccccaaaatcttcgtcgctcatagtaagttcgttatcctgagcgcacacaaactcgttttcattggagacactttatctcggcaagccaaggccgctgatgtgcggtcccaggtgactcattactcaaacttgctctgtgacttattgcggggtatagtggccaccacgaaggccgcggcgttgcagtatccaagtcctagtgcagcccaagacatggttgaacgcgtgaaggaactgggccacagcacgcagcagttccgcagggttttaggacagctagccgcagcctag

SEQ ID NO: 14132 - DNA, 2667 bp, synthetic construct
  misc_feature 1..2667: note = Description of Artificial Sequence: Synthetic coding sequence
  source 1..2667: mol_type = other DNA
atgaatcatctcaatgtcctggctaaggcactgtatgacaatgtcgctgagagtcccgacgagctttccttcagaaagggcgatataatgaccgtcttggaacaggatactcaggggcttgacggatggtggttgtgtagcctacacggaaggcagggcattgtccccgggaatagacttaaaatcctagtgggcatgtatgataaaaagcccgccgggccaggtcctgggccacctgcaactcctgctcagcctcagcccggacttcacgctcctgcaccacctgcatcacagtataccccaatgctccccaacacctaccagccccagccagacagtgtctatctggtgcccacgccttctaaggcacagcagggtctctaccaggtaccaggccccagccctcaatttcagagtcctcctgccaagcagaccagtacttttagtaaacagacaccgcatcacccctttccaagccccgcaaccgacctgtaccaggtgccccctggcccaggcggccccgctcaggatatctatcaggtgcccccgagcgccgggatgggtcatgacatttaccaggttccaccttcaatggacacccgtagctgggagggaaccaagccccctgcgaaggtggtggtgcctacaagggttgggcagggctacgtgtacgaggccgcgcagcccgagcaggatgaatatgacattccccgccatctactggctccggggccccaggatatctatgacgtgccacccgttcgcgggctactgccgtctcaatacggccaggaagtgtatgacactcctccaatggctgtgaagggcccgaacggccgcgacccactgctggaggtttatgacgtacctccctcggtagagaaagggctgcctccttcaaatcaccatgccgtgagcaaatgccagggtaacgcgagggccaggctcagattgtggggcgtgtgggtctacgatgtccccccctcggtgagcaaggatgtccccgatggccccctcctgagagaggagacgtacgacgtccctcctgccttcgcgaaggctaagccattcgatcctgcaagaacccccctggttctggcggcgccccctcctgatagccctcccgctgaggatgtgtatgacgtgccgccaccagctccggacctatatgacgttcccccaggcctgcgaagaccagggccagggacactgtatgacgttccccgtgaacgagttcttccacccgaggtggccgacgggggtgtggtcgactcgggcgtttatgccgtgccaccaccagcagagcgcgaagcacctgccgaagggaagagactgtccgcaagcagcaccggcagcacgcgctctagtcagtctgcatcctccctggaagtggctggccctggcagggaaccgctggagctggaagttgccgtcgaggccttggccagattgcagcaaggcgtgtcagcaacggtggcacacctgttagacttggctgggagcgcgggcgcaactggttcctggaggtcccctagtgagcctcaggagccgctggtgcaggatctgcaagctgccgtcgctgctgtgcaatcagccgtccatgagctgctggagtttgcccgatccgctgtcggtaacgcagctcacacaagcgatcgggctttacatgcgaaactgagtagacagctgcagaagatggaagatgtgcatcagaccctggttgcccatgggcaagcgttggatgccggacgaggagggagcggagcgaccttagaggatttggatcgcctggtggcctgttctagggccgttccagaagatgctaagcagcttgcgagtttcctccatgggaacgcctccctgctctttaggcgcacaaaagcaaccgcacccggccctgaggggggtgggactctccaccccaatcctacagacaagacatcttctattcagagccggcctctaccctctccaccaaagttcacttctcaagattcacccgacggccagtacgagaactcagaaggaggctggatggaggactatgactatgtgcatttacagggcaaagaagaattcgagaagactcagaaagagctattggagaagggtagtattaccagacaggggaagagccagctagagctgcagcaactgaagcagtttgagcgactggagcaggaggtgagtagacccatcgaccacgatctcgctaattggactccggctcaacctctggcccccggcagaactggtggcctggggccaagcgaccgccagcttcttctgttttatctggagcagtgcgaggcaaatcttacaaccctgacaaacgcggtggacgctttttttactgcagtggccacaaaccagcccccaaagattttcgtggctcactcgaaattcgtgattctgtctgcccataagctcgtattcataggcgacactctgtcaagacaggccaaagctgccgacgtgaggtctcaggtgactcattatagtaacctgctgtgcgatcttctaaggggtatagtagcaacgaccaaagccgcggccttgcaatacccgagcccatcagctgcccaggacatggtagaaagggtcaaagagctgggacatagcacccagcaattcagaagggtcctgggccagctggccgccgcgtag

SEQ ID NO: 14133 - DNA, 2751 bp, synthetic construct
  misc_feature 1..2751: note = Description of Artificial Sequence: Synthetic coding sequence
  source 1..2751: mol_type = other DNA
atgccagcaaagccatttttatcgagtgtgctgctgtcctggaaggtgttagattttagcgggcccgggccccagggcaccggccagccctgctcatgcgggcactgggccgaagggcagggcggtccccctgagccagccgggggacctaatgtactggctaaagctctctatgacaatgttgcagagagccctgacgaactgagcttcagaaagggtgacatcatgacagtgttggaacaagacactcagggtctggacgggtggtggctctgctccttgcatggacggcagggcattgtgcctggaaatagactgaagatcctggtggggatgtatgacaagaaacctgccggccccggtcccggaccacccgcgactccagcacagccccaacccgggttgcacgcgccagctccacccgcctcccagtacactcccatgcttccaaatacctaccagcctcagcccgacagcgtttatctcgtgcccacaccctcaaaagcacaacaggggctgtaccaggtgcccggaccttcacctcaattccagagcccacccgcaaaacaaacctccactttttctaagcagacaccgcaccaccctttcccttcccccgcaactgacctgtatcaagttccccccggacccgggggaccagcccaggacatttaccaggtacctccatctgccggtatgggccacgatatatatcaggtgcctccctcaatggacactcggtcttgggaggggacaaagccgccagccaaggtcgtggttccaacacgcgtgggacaggggtacgtatatgaggccgcgcaaccagaacaggacgagtacgatattccccgacatctgttagcacccggaccccaggatatctacgatgtgccgccggtgaggggactgctgccatctcagtatggccaagaggtgtacgatactccccccatggcggttaaggggccaaatgggcgggaccccctgttagaggtatatgatgttcccccatcagtggagaagggactgccaccctcaaatcaccacgcagtgtacgacgttccaccctctgtttccaaagacgtcccggatggaccattgttacgggaggagacttacgacgtcccacccgcgttcgccaaggctaaaccttttgatcccgcacggacgcctctggtgctggccgctcctccccctgattcccccccagcggaggacgtgtatgacgtccctccacctgcccctgacctgtatgatgttccaccagggctccgcagacccggcccgggaaccctctacgatgtgccccgcgagcgtgtgctcccccccgaagtagcggatggaggagtggttgattctggagtctatgccgtcccccctccagcagagagagaggcccctgcagaaggtaagaggctaagtgctagctctaccggttcaacacggtcaagccagtcggctagtagcctcgaggtcgctggaccaggtcgcgagcctttggagctggaggtggccgtcgaggctcttgcaaggctgcagcagggcgttagtgccacagtggcccacctgcttgatctggccggtagcgctggggcgaccggctcgtggcgaagtccttctgagccgcaggagccactggtacaggatctgcaggccgcggtcgccgccgtgcagtctgcagtgcacgaattgctggagtttgccaggtcggccgtgggaaatgccgctcatacttcagatcgtgcgcttcacgccaagctgtcccgccaattgcagaaaatggaggacgtgcaccagactctcgtggcacacgggcaggccctggatgccggaagaggcggttccggcgctacccttgaggacctcgatcgattagtggcgtgctcgagagcggtacccgaggatgccaagcagctggcttcattcctgcacgggaacgcctctctcctctttagacgtaccaaagctacagctcccgggcccgagggaggcggcaccttgcacccaaatccgacagataaaacaagttccattcaatcccggccactgccgagtccccctaagttcaccagtcaggactctcccgatgggcagtacgagaacagtgaggggggttggatggaggattatgattacgtccatctccagggcaaagaggagttcgagaagacccagaaagaactgctggaaaaaggttcaatcacccgtcagggcaagtcccaactcgagctccagcagctgaaacaatttgagagactggagcaagaagtgtcccgtcctatcgatcatgacctggcaaactggacccctgcccagcccttggctccaggtaggaccggcggcctaggaccttctgaccggcagctgttgcttttctacctggagcagtgcgaggccaacctgacgacgctgacaaatgccgtggacgcattttttacagctgttgccactaaccagccacccaaaatctttgtcgcccatagcaaattcgtaatcctctccgcacacaaactagtgtttattggcgacacactgtcgaggcaggcgaaggctgccgacgtgaggagccaggtgacacattacagcaatctgttgtgtgatctgctcagagggatagtggccaccaccaaagccgcggcactgcaatacccgtccccctctgcagctcaagatatggtcgaacgggtaaaagaacttggccattcaactcaacaattcagaagggtgttaggacagctggccgccgcatag

SEQ ID NO: 14134 - DNA, 2667 bp, synthetic construct
  misc_feature 1..2667: note = Description of Artificial Sequence: Synthetic coding sequence
  source 1..2667: mol_type = other DNA
atgctgactcatcgcccacaggaagccgagcagagggggcgtacgcccggcccttcttttgagtggaatgtgctggccaaggccctgtacgacaacgtggctgaaagcccagacgaactgtcttttaggaaaggggatattatgactgtgctcgagcaggatacacagggacttgatggttggtggctgtgctccctgcatggcaggcagggaattgttcccggcaataggcttaagattctcgtggggatgtacgacaagaagcccgctgggccaggcccaggacccccggccacccccgcccaaccccaacccggactccacgcccctgcacccccagcatctcagtacaccccaatgctaccgaacacataccagcctcagcccgatagtgtatacctggtccccaccccatccaaggcccagcaaggcctatatcaggtgccaggaccatcccctcagttccagtccccaccagccaagcagacttctacattctccaaacagacccctcaccatccctttccaagcccagccactgacctctaccaagttcctcctggcccaggaggcccagctcaagatatataccaggtgcctccatcagctggaatgggtcacgacatctatcaggtccccccaagcatggataccagaagttgggagggcaccaagcccccagctaaggttgtggtgccaactagagtgggccaaggatatgtctacgaggccgcccaacccgaacaggatgagtacgacatacctcgtcacttattggcgcctggcccacaggatatttacgacgtcccgcctgtgcggggcctgctgccttctcaatacgggcaggaagtctacgatactccacccatggctgtgaaagggccaaatggtagggaccccctgttagaggtgtacgatgtccccccctccgttgaaaaaggacttcccccttctaaccaccacgccgtatacgatgtccctccaagcgtttctaaggacgtgcccgacggaccgctgctgcgtgaggagacgtacgacgtgcctccagcgtttgccaaggctaaaccattcgaccctgcccggacgcctctggtgctcgccgcccctccgcctgactctcctccagctgaagacgtgtatgacgtgccaccaccggcacccgacttatatgatgtcccccctggactgcgaaggccaggaccgggcactctgtatgacgtcccacgtgagcgcgtactccccccagaagtagcagacgggggcgtcgtggactccggcgtttacgcagtgcctccgccagcagaacgggaagcgcccgcagaaggtaaaaggctgtcggccagcagtaccggctcgacgaggagcagccagtctgcttcaagtttggaagtggccggccccggacgcgagcctttggagcttgaggtcgccgtggaagcactagctaggttgcagcagggggtgtctgccacagtggctcatctattagatcttgccggaagtgccggcgccactgggtcctggcgttctcccagtgaaccacaggaaccactggtccaggacctccaggccgctgtggctgccgtgcagtccgccgtgcacgaactgctggagtttgctcgttccgccgttggtaacgctgctcatacctctgaccgggcactccatgccaagctatcacgacagctgcagaagatggaagacgtacaccagaccctggtcgctcatggccaggcacttgacgccgggcgcggcggatctggcgctaccctggaggatttggatcggctcgtggcttgtagtcgggctgttcctgaggacgccaagcaattggcctcatttcttcacggcaacgcctcactgctttttcggcggacaaaggccactgcgcccggacccgagggaggtgggactttacatcccaaccccacagataaaacgtcttccatccaatctagacccctcccgtcaccgccgaaatttacatcacaggactcccccgatgggcaatacgagaatagcgagggtggttggatggaggactacgactatgtgcacctccagggtaaagaagaatttgagaaaacccagaaggagctgcttgagaagggcagtattaccaggcaaggcaaatcacaactggagctgcagcagttaaaacaatttgagcgactcgagcaggaagtctctaggccaatcgaccacgacctggcaaattggacgcccgcccagccccttgccccaggacgaacgggcggactggggcccagcgataggcagcttctgttgttctaccttgaacagtgcgaagcaaacctaaccacacttaccaatgcagtggatgcatttttcacagctgtcgcgactaaccagccccccaaaatctttgtggctcactccaagtttgtcatcctaagtgcacataagctggtgtttataggcgacactctctcgcgacaggccaaagcagccgatgtaagatctcaggtgacacactactcaaaccttctctgcgacctgttacgcggcatcgtggccacaacaaaggccgcggccctgcaatatccttctccgtctgccgctcaggatatggtcgaaagagtcaaggagctggggcattctacacagcagtttaggagggtgttgggacagttggctgcggcttag

SEQ ID NO: 14135 - DNA, 2169 bp, synthetic construct
  misc_feature 1..2169: note = Description of Artificial Sequence: Synthetic coding sequence
  source 1..2169: mol_type = other DNA
atgcagggaaagaacgtcctggcgaaagctctgtacgacaacgttgccgagagccccgatgagctttccttccgaaagggcgatatcatgaccgtactggaacaggatacccaaggtctcgatggatggtggttgtgcagcctccatggacggcaagggatcgttccaggtaacaggctcaagatcttagtcgtggtgccaactagggtggggcagggctatgtttacgaagctgctcaaccggaacaagatgagtatgacatcccaagacacttactggcccctggaccacaggatatttatgatgtgccccccgtgcggggtctgttgccgagtcagtacgggcaagaggtttacgataccccaccgatggctgttaagggaccaaatgggagagaccccctcctcgaagtttacgacgtgccacccagcgtggagaaggggctgcccccctcgaatcaccacgctgtttatgatgtccctccttcagtgagtaaagacgtccctgatggccctctcttacgggaagagacttacgacgtccctcccgcgtttgccaaagcaaagccgttcgacccagccagaacacctctcgtgctcgcggcgcctccaccagacagcccaccagctgaggacgtatacgacgtgcctccaccggccccagatttatatgatgtgccccccggcctgaggaggcccggacccggtactttgtatgatgtcccaagggaacgggtgctaccacctgaggttgccgacggaggggttgtggactctggggtgtatgcggtgccaccccctgccgagcgcgaagccccagctgaaggtaaacgactgagcgctagctcgaccggtagcaccaggagtagtcaaagtgcgagttctctggaagtagctggacctgggcgtgagcccctggaactagaggttgccgtggaagccctggcacgtctgcaacaaggtgtgtcagctactgttgcccacctgctggatctagctgggtcagctggcgcaacggggtcgtggcgctcaccatccgaaccacaggagcctctagttcaagatctgcaggctgccgttgccgccgtccagtccgcggttcacgagctcttggaattcgcccgtagcgcggtgggtaacgcagctcatactagcgaccgtgccttgcacgctaaactaagcaggcagctccagaaaatggaagacgtacaccagaccctggtggctcacggccaagcgctcgacgctggccgcgggggttctggggcgaccctggaagacttagataggctggttgcctgtagcagggcagtgcccgaagatgccaaacaactggcatcctttttgcatgggaacgcgagtctgttatttcgccgcacgaaagccactgcgccaggtccggagggtggtggcacgctgcacccgaatccaactgataaaacatcgtcaatacagtcacggcctttaccctcaccccctaaattcacgagccaggattcgccagatggacagtacgagaactccgagggcggatggatggaggattatgattatgttcaccttcaaggaaaggaagaatttgagaaaacccagaaagaattactcgagaaaggctccattactcgccagggcaaaagccaactcgagcttcaacaactgaagcagttcgaaagactcgagcaggaagtctctcgccccattgatcacgacctggctaactggacaccagctcagcccttagcccccggacgcacaggcgggctgggccctagcgataggcaactgttgctgttttaccttgaacagtgtgaggctaatctaaccaccctaactaacgctgtggacgcctttttcactgcagtggcaactaaccagccccctaaaatttttgtggctcattctaagtttgtgattctctctgctcataaactggttttcatcggggacacactgtcccgccaggccaaagccgccgatgttaggagtcaggtgacccactactccaacctgctgtgcgatcttcttagaggtatagttgccaccactaaagccgccgccctgcagtaccccagccctagtgccgcacaagatatggttgaaagggtcaaggagctgggccactcgacccaacaattccggcgggtgttgggtcagctggccgccgcttag

SEQ ID NO: 14136 - DNA, 2613 bp, synthetic construct
  misc_feature 1..2613: note = Description of Artificial Sequence: Synthetic coding sequence
  source 1..2613: mol_type = other DNA
atgtccgtccccaatgtgctggcaaaagccttgtatgacaatgtggccgagagccctgatgaactctcgtttcgaaagggggacataatgacagtgctcgaacaggacacgcagggtctcgatggatggtggctgtgctctttacatggcaggcagggcatagttccagggaaccggctgaaaatcctggtgggcatgtacgataagaaacccgcagggcctggacccggcccgcctgcaaccccggcacaaccacagcctggactgcacgcaccggctcctcccgcaagtcaatatacccccatgctcccaaatacctaccagccgcagcccgacagcgtttacttggtacccactccttcaaaagctcagcagggactataccaggtcccgggaccctcccctcagtttcagagtcctccagccaaacaaacctcgacattctctaagcagactccccaccaccccttcccctctccggcaactgatctttatcaggtcccccctggcccagggggtccagcccaggatatttatcaggtgccccctagtgcaggcatggggcatgacatctaccaagtccccccaagcatggacactcggagttgggaaggcactaagcctcccgcgaaggttgtagtgccaacgagggtgggacagggctacgtgtacgaggcggcacagccggagcaggatgaatatgacatccctagacacctcctagcccctgggcctcaggatatctatgatgttccccctgtccgggggttactgccaagccagtatggtcaggaggtctacgacacccccccaatggccgtaaaaggccccaacggccgcgatccacttcttgaggtgtatgacgtacccccctccgtcgaaaaggggctacccccatcaaatcaccacgctgtatacgatgtcccgccaagcgtgagcaaagatgtgcccgacgggccgcttctgagggaagaaacctacgatgtgccccccgcattcgccaaggcaaaacctttcgaccccgcaaggactccactggtgctggccgctccgcctccagattccccccctgcagaagacgtttatgatgttcctccccctgccccagacttgtacgacgtgcctccagggctgaggcgaccaggacccggcacattgtatgacgttcctagagaacgggtgctgcctccagaagtggctgacggcggggtagtggatagcggcgtgtatgccgtcccaccacccgctgagcgggaagcacctgcagagggaaagcggctaagcgcatctagtacgggatctacacgtagcagccagagcgccagctcactggaagttgcaggacccggccgtgaacctcttgagttggaggtggccgtggaggctctcgcacggctgcaacagggggtgtcagccacagtcgcccacctgctggacctcgctggctcggcaggtgccactgggtcttggcggtctccatccgagccgcaagaacctctggtgcaggacctgcaggccgctgtggccgcggtccagagcgcggtgcacgagttgctcgaatttgctcgttcagctgtggggaacgccgcgcacaccagcgaccgggccttgcatgcgaaactgagcaggcagctccagaagatggaagatgtgcaccagacacttgtggcccatggtcaggcccttgacgccggacgtggcggctccggggccacactcgaggacctggatcggctggtggcgtgctctagggccgtgcccgaggatgctaagcaactggcttcattccttcatggtaatgccagcctgctgtttcggagaaccaaagccaccgccccagggcccgaggggggcgggactctccaccccaaccctaccgacaaaacctcttcgattcagtctagaccacttccctccccaccaaaattcacctcccaagactcgccagatggacagtacgagaattctgaaggaggctggatggaggattatgactatgtgcacctgcaaggtaaagaagagttcgagaaaacgcagaaagagctgctcgaaaagggatctatcaccagacaggggaaatcccaactggagctccagcaactgaagcagttcgaacggctggagcaagaggtctcacggcccatcgaccacgacctggccaattggacacctgcacagcctctggcacccgggcgcactggtggcctgggaccttccgaccgccaactgttgttgttctatcttgagcagtgtgaggccaatctgaccactttgacaaatgctgtggatgcgttttttaccgcagtcgccacaaatcagcctccaaagatttttgtggcccacagcaaattcgtaattctctctgcccacaagctggtgttcataggcgatactctctctaggcaggctaaggccgccgatgtcaggtcacaggtcacacactactctaacctcctgtgtgacctactacgaggcatcgtggctactaccaaggcggctgcacttcagtacccctcgccatccgcagcccaagacatggtggaacgggtgaaagagctgggacactccactcagcagttccgccgagtcctgggacaactcgcagctgcatag

SEQ ID NO: 14137 - DNA, 2607 bp, synthetic construct
  misc_feature 1..2607: note = Description of Artificial Sequence: Synthetic coding sequence
  source 1..2607: mol_type = other DNA
atggagaatgttctcgcaaaagctttatacgataacgtggccgagtcccccgacgagcttagttttaggaagggagacataatgacggttcttgagcaggatactcagggcttagacgggtggtggctctgctcattgcatggtcggcaggggatcgttcctgggaaccggttaaaaattctggttgggatgtatgataagaagcctgctggtcctggaccaggccctcccgctacccctgcgcagccccagcccggactgcacgctcctgcaccacccgcctcacagtatacacctatgttgcccaatacctaccagccccagcccgatagcgtgtatctggttcccacgccctcaaaagcccagcagggcttataccaggtgcctggaccaagcccccaattccagtctcctcctgcaaaacagacctcaacattcagtaaacagacaccacaccaccctttcccctctcccgcaaccgacctctaccaggtgccacctggacctggtggcccagcacaagatatctaccaagttcctccaagtgcaggaatggggcatgatatataccaagtcccaccctcgatggacactcgttcttgggagggaacaaagccccctgctaaggtggtggtgccgacccgcgtcggacaaggttacgtgtacgaagctgcacagcctgagcaggacgaatacgatatccctcggcacctgttagctcccggtccacaggatatatatgatgtgcccccagtcaggggcctgttgccttctcagtacggacaggaagtttacgatacccctccaatggcggtgaagggccctaacggccgcgatccacttcttgaagtatacgatgttcctcccagtgtcgaaaaaggcttgcctccctcaaaccatcatgcagtgtacgacgtgccccccagcgtcagcaaagatgtcccagacggaccccttctgcgggaggagacctatgatgtccctccagccttcgcaaaagccaagccttttgatcccgctagaaccccccttgtgctggccgcgccaccacctgacagtccacctgccgaagacgtctacgatgtaccccctccagccccagacctatacgacgtcccgccagggttgcgaaggccagggcctggcaccctgtacgatgtacctcgcgagcgggtgctgccacctgaggtcgccgatggcggagtcgtcgactcaggggtttacgcagtgcctccacccgccgagagggaagcgcccgcagaaggcaagaggctatcggcatcaagcacagggagcacccggtcatcacagagcgccagcagcctcgaagtcgctgggcctggaagagaacccctggaactggaagtggccgttgaggctctcgctcgactccagcagggggtcagcgccaccgtggcccacctgctcgacctcgctggatcagccggcgccaccgggagttggagatcccccagtgaaccacaggagcccctcgtgcaggatcttcaggctgccgtagccgctgtccagagcgccgtccacgaactcctcgaatttgcccgtagtgcagttggcaatgccgcccacacatctgaccgggcgctccatgcaaaactgagtcggcagctccagaaaatggaggacgtccaccagaccttggtggcacacggacaggctctcgatgctgggcgtggagggtccggcgctacactagaagatttggatcgccttgttgcctgctcacgagctgtccccgaggatgccaaacaactagcctcgttcctgcatggcaacgcttcactactcttcagacggacaaaagccaccgccccaggacccgaaggcggcgggacgctgcatcccaacccgactgacaaaacctcctctatccagtccaggccgctccccagcccccctaaattcacgagtcaggacagccctgatggccagtatgaaaactccgagggagggtggatggaggattacgactacgttcatctgcaggggaaggaggaattcgagaaaacgcagaaggaactactggagaaaggaagtattacacgtcagggcaaaagtcagcttgaactccagcagcttaaacagtttgaaaggcttgaacaggaagtgtctagacccatcgaccatgacctcgctaactggaccccagcacagcccttggctccaggacggaccggaggacttggccccagcgaccggcagttgttattgttttacctcgaacagtgcgaggcaaatctgacaaccctcacgaatgccgtggacgcgttcttcaccgccgtggccaccaatcagccgcccaaaatcttcgtggcccactccaagtttgtcatcctgtccgcgcataagctggttttcattggtgatactctgtcaaggcaagcgaaggcggcagacgtgcgatctcaagttacccattacagtaacctactgtgcgatcttcttaggggtatagtcgcaactactaaagctgccgctttgcaatacccgtctccatcagccgctcaggacatggtggagagagtcaaggagctcggccactctacccaacagtttcggcgagttctcgggcagcttgcagccgcttag

SEQ ID NO: 14138 - DNA, 2526 bp, synthetic construct
  misc_feature 1..2526: note = Description of Artificial Sequence: Synthetic coding sequence
  source 1..2526: mol_type = other DNA
atgacagtgctggaacaggatacccagggacttgatggttggtggctgtgctccctgcacggaagacaaggcatagtaccggggaatagacttaagatactggttggcatgtacgataaaaaaccagctgggccaggacctggtcctcctgccacacctgcccagccccagcctggcctgcacgcccccgccccacccgcatctcagtacacaccaatgctgcccaacacatatcaaccccagccagatagcgtgtacctggtgccaaccccctctaaggcccaacagggcctatatcaagtccccggccctagcccacaattccagtccccacctgcaaagcagaccagcacctttagcaagcagaccccccaccacccttttccctcgccagcaaccgacttgtaccaggtgccacctgggccgggcggacctgcacaggacatttaccaagtgcctccatctgccggaatgggacacgatatttatcaagtgccccctagcatggatactaggtcctgggagggaactaagccacctgccaaggtagttgttcctaccagggtggggcagggatatgtttacgaggcagcccaaccagagcaggatgagtatgacatcccccgacacctactcgctcccggaccccaggatatttatgacgtcccgcctgtaaggggcctcctgccaagccagtacgggcaggaggtctatgatacacctccaatggcagtaaaggggcccaacggcagggaccccctactggaggtgtatgacgtccctccaagcgtggaaaagggactgccacctagtaaccatcacgcagtatacgatgtccctccgtcagtgtccaaagacgttccagacggtcccctgctccgcgaggaaacctatgatgtgcctcccgcttttgctaaggctaaacctttcgaccccgctcggactcccctggtcttagctgcgccccctcccgactcccctcccgccgaggacgtttacgatgtaccaccaccagcccccgacctgtatgatgtgcctcccggtctccgtaggcctggcccaggaacattatatgatgttcctcgggagcgcgttttgcccccggaagtggccgacggaggtgtggtggactctggagtctacgcggtgccgcccccagccgaacgcgaagcccctgccgaaggaaaaagactctctgcttccagtactgggagcacgcgatccagccagtcagcatcatccctcgaagtcgctggccctgggcgggaaccgctcgaactcgaggtggctgtagaagccctagctcgcctgcagcagggagtgagcgccaccgtggcacacctcctggatcttgccggctctgccggggcaaccggatcttggagatcacctagcgagccccaggagcccttggtgcaagacctccaggccgctgttgctgcagtgcaatctgccgtacacgagctacttgagttcgcaagaagcgcagtgggcaacgccgcacatacctctgatcgtgctctccatgccaagctgagtaggcagctacaaaaaatggaggatgtccaccagaccctggtagctcatggacaagctcttgatgccggtcggggtgggagtggggcgaccctggaagacctggacagactggttgcgtgctcccgtgctgtgccagaggatgctaaacagcttgcctcattcctgcatgggaacgcttctctgttgtttagaaggacaaaagctacagcaccaggcccagaaggcggtggaacattacatcctaatccgacagataaaacctcctctatacagtcccggcccctgccctcccccccaaagtttacatctcaggattctccggacggacaatatgaaaactctgagggcggatggatggaggactatgactatgttcacctgcagggaaaggaggaatttgaaaaaacgcagaaagagctgctggagaagggttcaataacccggcaggggaaatcacagcttgagctgcagcagctgaagcaattcgaaagactcgagcaggaggtgagccgccccattgaccacgacctggctaactggaccccagcccagcctctggcacctggcaggacaggtggcctcggtccatctgaccggcagttactgctgttctaccttgagcagtgcgaagccaacctcaccacacttacaaatgcggtcgacgccttcttcacagccgttgccaccaatcagccaccaaagattttcgtggcgcactcaaagttcgtgatcctgtctgcccacaagctcgtgttcatcggtgacactttatctagacaagcgaaggccgccgacgttagatcacaggttacccactactcgaatttactgtgcgacctgctgcgaggcattgtagctacaaccaaagcagctgctcttcagtaccccagccccagcgcggcacaagacatggtcgagcgcgtcaaggagctgggccattccacccagcaatttcgcagagttttagggcagcttgctgccgcctag

SEQ ID NO: 14139 - DNA, 741 bp, synthetic construct
  misc_feature 1..741: note = Description of Artificial Sequence: Synthetic coding sequence
  source 1..741: mol_type = other DNA
atgcctgtccaaccccctagcaaagacacagaagaaatggaggctgagggtgatagtgccgctgagatgaacggagaagaggaagagagcgaagaagaaaggtcaggctctcaaaccgaatccgaggaagaaagctccgaaatggacgacgaggactacgagaggaggcggtccgaatgcgtgagcgaaatgctagatctcgaaaagcagttttccgagttaaaggagaaactgttccgagaaagactcagccaactgcgcctcaggctggaagaggtgggagccgagcgtgcgccagaatacacagaacctcttggcggcctgcagcggtctcttaaaattagaatccaggtcgccggcatttacaagggtttctgtctggatgttattagaaacaagtacgaatgcgaacttcagggcgcgaaacagcaccttgagtcagaaaaactgctgctgtacgatacactgcagggcgagttacaggaacgcatccagcgacttgaggaggaccgccagtcacttgacctatcatctgaatggtgggacgataaactgcatgcacgaggatccagtcgatcttgggattcactgccaccctccaaacggaagaaggccccattagtcagtggaccctacattgtttatatgctccaagagattgacattctcgaagattggacagcgattaaaaaagcccgcgccgccgtgtccccgcagaagcggaagagtgatgggccgtag

SEQ ID NO: 14140 - DNA, 873 bp, synthetic construct
  misc_feature 1..873: note = Description of Artificial Sequence: Synthetic coding sequence
  source 1..873: mol_type = other DNA
atgcctgtacagccgccttcaaaggacacagaagagatggaggcagagggtgactcagccgcagagatgaatggcgaggaggaggaatctgaagaggaacgtagtggcagccagacagaaagcgaagaagagagttctgagatggatgatgaggactatgagaggcgacgctctgagtgcgtgagcgagatgttggatctggagaaacagttttcagaactgaaagagaagctgtttagagagcgcctgtcccagctgcgtctgagactcgaagaagtgggcgccgagagagcgcctgagtacacggaacccctagggggcctgcagagatccctgaagatccgaattcaggtggctggaatctacaaaggcttttgtctggacgtcatcaggaacaagtacgagtgcgaactgcaaggcgccaagcagcatctggagtcagaaaagctactgttatacgatacgcttcagggcgaactgcaggagcggatccagcgcctggaggaggaccgccagtctctggatctgtcctctgagtggtgggatgataagctgcacgcccgcggaagttcccgttcttgggactctttgccccccagcaaaagaaagaaagccccgctcgtgagcggtccctacatcgtgtacatgcttcaggagatcgatattctggaggactggaccgccatcaagaaggctagagccgctgtttcccctcagaagcgcaagtccgacgatcgtcgcacgcacaggccattgcgagtctgtcccgcacggctgctttggtgctgttgggccctcccactgcacctggcactagcttggacccctccactgcccagtagcagacctgcacagctctggccttggtcttag

SEQ ID NO: 14141 - DNA, 735 bp, synthetic construct
  misc_feature 1..735: note = Description of Artificial Sequence: Synthetic coding sequence
  source 1..735: mol_type = other DNA
atgcctgttcagcctccgtccaaagatacggaggagatggaggccgagggggattccgcggccgagatgaacggggaggaggaggaatcggaagaagaaagatcaggaagtcaaactgagtccgaggaggagagtagcgagatggacgatgaagactacgaacggcgaaggtcagaatgtgttagcgaaatgctggatctggagaaacagttttctgagctgaaagagaagttgttccgggaacggctgtctcagcttcgacttagactcgaggaggttggcgctgaacgcgcacccgaatacacagagcctcttggcggacttcagcggagtctgaagatccggatacaagtggccggtatttataaggggttttgcctcgacgtgattcgcaataagtacgagtgcgaactccagggcgcaaagcagcatctggaaagcgagaaactgctcctgtatgacacacttcagggcgagctccaggaacgtatacagcgcctggaagaggacagacagtcattggacctcagctctgagtggtgggatgacaagttgcatgccagggggagttcccggtcatgggatagtctgcctcccagcaaacgcaaaaaggcccccttagtcagtggcccgtatatcgtctacatgctccaggaaatagacatcctcgaagattggacagccattaaaaaagctcgtgccgctgtgtctcctcagaagaggaaatccgactag

SEQ ID NO: 14142 - DNA, 1494 bp, synthetic construct
  misc_feature 1..1494: note = Description of Artificial Sequence: Synthetic coding sequence
  source 1..1494: mol_type = other DNA
atggcggaaatgggaagcaagggcgtcaccgccggcaaaatagcctcaaacgtgcagaagaagctgacacgggctcaggaaaaggtgctccagaagcttggtaaggctgacgagaccaaggacgagcagttcgagcagtgcgtccaaaactttaataagcaactgacagaggggactaggctgcaaaaggacctgcgaacctatctagcatcagtgaaggccatgcacgaggcttccaagaaacttaatgagtgtttacaggaggtctacgaacctgactggccgggccgcgacgaagccaataaaattgccgagaataacgacttgttgtggatggactaccaccagaaactggtggatcaagcactgctgacgatggacacgtaccttgggcagtttcctgatataaagtcccgtatcgcaaaacggggacgtaagctggtagattacgactctgcccggcatcactacgagagcttgcaaacggctaaaaagaaggatgaggccaaaattgccaaagccgaggaagagttaattaaagcgcagaaagtatttgaagaaatgaatgtggacctgcaagaggagctgccatctttgtggaacagtcgcgtcgggttctatgttaacacatttcagtcgatcgcgggacttgaggaaaatttccacaaggagatgtctaagcttaaccagaacctaaacgacgtcctggttgggctagagaagcagcatggcagtaatacattcactgtcaaggcacagcccagaaaaaaaagcaaactattctcccgacttcggaggaagaaaaactcggataacgccccagcaaaggggaacaaatctccttcaccaccagatgggtcacccgcggccacacctgagataagggtgaatcacgaacccgagcccgctggaggcgctaccccaggagccacccttccgaagtccccatctcaactccgtaaaggacctccagttcctcccccaccgaagcatactccctccaaggaggtaaaacaagaacagatactgtccctctttgaggatacgtttgtgcccgaaatctccgtcactaccccatctcaaccagctgaggcttccgaagtcgcggggggcacacagccagctgccggggcccaggagcctggcgagactgccgcgtcagaagctgcctcttcgtcactcccagcggtggtcgtagagacattccccgctaccgtcaatggcaccgttgaagggggctctggcgctggccggctggacttgcccccagggtttatgttcaaggttcaggctcaacacgactatacagctaccgacacagatgagctgcaattgaaggccggcgacgtggttctcgtcatcccgtttcaaaaccctgaggagcaggatgagggctggctgatgggggtcaaagaatccgactggaatcaacacaaggaactcgagaaatgtaggggagtgttcccagaaaactttaccgagcgcgtgccttag

SEQ ID NO: 14143 - DNA, 1782 bp, synthetic construct
  misc_feature 1..1782: note = Description of Artificial Sequence: Synthetic coding sequence
  source 1..1782: mol_type = other DNA
atggccgagatgggatccaaaggggtgaccgctggaaagattgcgtccaacgtccagaagaaactgacccgtgcccaagagaaggtccttcagaagcttggaaaggccgatgagactaaggacgagcaatttgagcagtgcgtgcagaatttcaacaagcagcttacagaggggacgcggctgcagaaggacttacgcacataccttgccagtgtgaaggctatgcacgaggctagcaaaaagctgaatgaatgtctgcaagaagtgtacgaacccgattggccgggccgcgatgaagccaataaaatcgccgagaacaacgacctcctctggatggattatcaccaaaagctcgtagaccaggctttattgactatggacacttatctgggtcagttccctgatattaagtctcggatcgcaaagcgtggccgcaagctcgttgattacgacagcgcccggcaccattatgaatctctacagaccgctaaaaaaaaggatgaggccaaaatcgccaaacctgtgagcctcctagagaaagcggcgccccagtggtgtcaggggaagctccaggcacacctcgtggcccagactaacctgcttagaaaccaggccgaagaagaactaatcaaggctcaaaaagtgttcgaggaaatgaatgtcgaccttcaggaagaactgcctagcctttggaatagccgtgtaggtttttacgtcaacacgttccagagcatcgctgggctggaggaaaatttccataaagagatgtctaagctgaatcaaaaccttaacgatgtgctagtgggcttagaaaagcagcacggttccaacacattcacagtgaaggcacagccaagcgataacgccccagccaaaggaaataaatcacctagccctcccgatgggtccccagccgcaaccccggagattcgggtgaatcacgaaccggaaccagccggaggcgcaacacccggagcaacactgccaaagtctcccagtcagctcaggaaaggaccccccgtgcctccgccccctaagcacacacctagcaaggaagttaagcaggagcagatccttagcctgtttgaggataccttcgtaccagagatttccgtcacaactcctagccaattcgaagctcccgggcctttttcggagcaggcgtcactgctcgatttggactttgatccactgcctccagttaccagtcctgtgaaggcacccacccccagcgggcagtcaatcccctgggatctgtgggagcccacggaatcccccgcggggagtttaccctcaggggagccaagcgcagctgaaggaacattcgccgtaagttggccaagccagaccgccgaacctggacctgcccaaccggcggaggcctccgaggtggctggtggcacccagcccgccgccggggctcaggaacccggcgagacagccgccagtgaggctgcatcctctagtctacctgctgtggtcgtcgaaacgtttccagcgactgttaatggaactgtggaaggagggtcaggagctggacgtttggatctgccaccaggattcatgtttaaagtccaggcccaacacgattatactgccaccgacaccgacgaactacaactcaaagccggcgacgtggttctggtgattcctttccagaatccggaagagcaggatgaaggctggttgatgggggttaaagagagcgattggaaccaacataaggaactagagaaatgtaggggcgtcttccctgaaaatttcacagagcgcgtgccatag

SEQ ID NO: 14144 - DNA, 1557 bp, synthetic construct
  misc_feature 1..1557: note = Description of Artificial Sequence: Synthetic coding sequence
  source 1..1557: mol_type = other DNA
atggccgagatgggctccaagggtgtcaccgctggcaagatagcatctaatgtgcagaaaaaactgactcgagctcaggagaaggtcctgcagaagctggggaaagctgacgagaccaaggacgaacagttcgagcaatgcgtacagaatttcaataaacagctgactgaaggaacacgcctacagaaagatcttaggacctacttggccagcgtgaaagccatgcacgaggcatccaagaaattaaacgaatgtttgcaggaagtgtatgaaccagattggccagggcgggacgaagccaacaaaattgccgagaacaacgacttactctggatggattaccatcagaaacttgtagaccaagctctgctgacgatggacacgtacctcgggcagttccccgacatcaaatcgcggattgcgaagcggggacgaaagctggttgactatgattcggcgcggcatcactacgaatctttacagactgccaagaagaaggatgaagccaagatcgccaaggccgaagaggagctgattaaagctcaaaaggtgttcgaagagatgaatgtggacctccaagaggaactgccatctctatggaatagtcgagtcgggttctatgttaacaccttccagagcatcgctgggctggaagaaaatttccacaaggagatgtcaaaattgaatcagaatctgaacgatgtgctcgtgggtctagaaaagcagcatggttcaaacacgttcactgtaaaggcccaacctagtgacaacgcacccgcaaaaggaaacaaaagtccctccccgcccgacggcagtcctgcagccactcccgaaattagagtgaaccatgaacccgaaccagcaggaggggcgacacccggagctaccttgccaaagtcccccagtcagctgcggaaaggcccacctgtgccaccccctcctaaacacacacctagcaaggaagtgaagcaggaacagatcctgagcttgttcgaagataccttcgttcccgaaatctctgtgacaactcctagccagccgaccgagagccctgcaggtagtctgccctcaggcgagccatccgcagcggaaggcacttttgccgtgtcgtggccatcacagacggccgaaccgggcccagcacagcccgcagaagcaagcgaggttgccgggggtacacagcctgccgcgggggcccaggaacctggtgagaccgctgcctcggaggccgcctctagctccctgcctgcagtggtggtggagactttccctgccaccgtcaatggtacggtcgaaggtggatctggcgcgggaaggctcgatttgccaccaggatttatgttcaaggtgcaggcccagcacgactatacagccaccgacactgatgagctccagctgaaagccggggacgtcgtcctggttataccgtttcaaaatccagaagaacaggatgaaggatggctcatgggggttaaggaatccgactggaatcagcacaaagagctggagaagtgtaggggggttttccccgagaacttcactgaaagagtgccctag

SEQ ID NO: 14145 - DNA, 1230 bp, synthetic construct
  misc_feature 1..1230: note = Description of Artificial Sequence: Synthetic coding sequence
  source 1..1230: mol_type = other DNA
atggccgaaatggggagcaaaggggtgacagctggcaaaatcgcaagcaacgttcaaaagaaactcacgagggctcaggaaaaggtcctgcagaaacttggaaaagctgacgaaacaaaagacgaacaattcgaacaatgcgtccaaaattttaataagcagctgaccgagggtactcgcctgcagaaagatctgaggacttacctggcttcagtgaaggctatgcatgaggctagcaaaaagctaaatgaatgcctccaggaggtctacgagcctgactggccagggagggatgaggccaacaaaatagcggagaataacgacctgctttggatggactaccatcagaaattggtggaccaggccctattaacgatggacacttacctcgggcagttccccgacataaagagtcggatagcgaagcggggtaggaaattagtggactacgatagtgcaaggcatcactatgagagcctgcagaccgccaagaagaaggacgaagcaaaaatcgccaaggcggaagaagagctgatcaaggcccagaaggtgtttgaagaaatgaatgtggacttgcaggaggaactgcctagcttgtggaacagtcgggtgggcttctatgtcaacacatttcaatccattgccggattagaggagaacttccataaggaaatgtctaagctaaaccagaatctgaacgacgttctggtgggactggagaagcaacatggatctaacaccttcacagtcaaagctcagccatccgataatgctccagcgaagggaaacaaatctccatctcccccagacggctccccggcggcgacccccgagattcgcgtgaaccatgaacctgagcctgccgggggcgctacacctggggctactctgcccaaatctccttctcagtcctccctgcccgctgtggtggtagaaactttccctgcgaccgttaatggcacagtggaaggtggctccggcgcggggcgcctggacctgcctccagggtttatgttcaaagtgcaagctcagcatgattatacagctactgacacagatgagttgcaactaaaggctggcgatgtcgtcttggtgatcccgttccaaaatcctgaggaacaggacgaggggtggctgatgggagtcaaggaatcagattggaaccaacacaaagaactcgaaaagtgccggggtgtgttcccagagaatttcacggagcgcgttccatag

SEQ ID NO: 14146 - DNA, 1521 bp, synthetic construct
  misc_feature 1..1521: note = Description of Artificial Sequence: Synthetic coding sequence
  source 1..1521: mol_type = other DNA
atggctgagatgggatcaaagggcgttactgccggcaagatcgcttctaacgtccagaagaaactgacgagggcgcaggagaaggtgctccaaaagctcggcaaggctgatgagactaaggacgagcagtttgagcagtgcgtgcaaaattttaacaaacagttgacagagggaacgcgactgcagaaagatctgaggacatacctcgcgtccgtcaaggcgatgcatgaggcatcaaagaaactgaacgagtgtctgcaggaagtgtatgagcccgattggcctgggagagatgaggctaacaagatcgccgagaacaatgacctgctgtggatggattaccaccagaagctagtggatcaagccttgctgacaatggacacttacctcggtcagttcccagacattaagtctcgtatcgccaaacggggtcgaaagcttgtggactatgacagcgcacggcatcactacgagtccctacagacagcaaagaagaaggacgaagccaagatcgccaagcccgtgtcccttctggagaaagctgctcctcagtggtgccagggtaaactccaggcacatctcgttgctcagaccaacctcctacgtaaccaagcagaagaggaactcatcaaggcccagaaggtgttcgaagagatgaacgtcgacctgcaagaggagctgcccagcttatggaatagtagagtggggttttacgtgaacactttccagtccattgccggcctggaggagaatttccataaagagatgagcaaactaaatcagaatctgaacgacgttttggtggggctggaaaaacagcacggtagcaatacatttactgtaaaagcccagccaagcgataatgccccggcaaaggggaacaagtctcctagtcccccggatggcagtcctgccgccactcccgagattcgggtgaaccacgaacctgaacccgcaggcggggccaccccgggtgctacactgccaaaaagtccttctcagcctacggaatctccagccggctccctgccatccggcgagcccagtgctgctgaaggcaccttcgccgtcagctggccctcacagacggcggagcctgggccagcccagcctgcggaagcatccgaggtggccggggggacacagccagcagccggtgctcaggagcccggcgaaactgctgcctccgaggctgcaagctcctcacttcctgcagttgtggtggaaacattccctgctacagtgaatggaacggtggaagggggcagcggcgcaggcaggctagatcttcccccaggtttcatgttcaaggttcaagcacagcacgactacaccgccacggacacagatgaactgcagttgaaagccggtgatgtggttctggttattccttttcagaacccagaggagcaggatgaggggtggctcatgggagtgaaagaatccgattggaatcaacataaagaactggaaaagtgccgcggagtgtttccagaaaacttcacagaacgcgtgccttag

SEQ ID NO: 14147 - DNA, 1365 bp, synthetic construct
  misc_feature 1..1365: note = Description of Artificial Sequence: Synthetic coding sequence
  source 1..1365: mol_type = other DNA
atggccgaaatgggaagcaagggcgtaactgcagggaagatagcatccaatgtgcagaaaaaactcaccagagcccaggagaaagtgctacagaagttgggaaaggcagacgagacaaaggacgagcagttcgagcaatgtgttcagaatttcaacaagcaactgactgagggaactcgcctgcagaaggatttaaggacatacctggcgagcgtgaaagccatgcacgaggcgtccaaaaaattgaacgagtgcctgcaggaggtgtatgagcctgactggcctggacgggacgaagctaataagatcgccgaaaacaatgacttactatggatggattaccaccaaaaattagtggaccaggctctgctgacaatggatacctacttgggtcaattccctgatatcaagtcacggatagctaaaagggggcgaaaacttgtagattacgattccgctcggcatcactatgagtctctccagaccgcaaaaaaaaaagacgaggctaagattgcaaaagcagaggaagagttaattaaggctcagaaggtctttgaagagatgaatgtagacctccaggaggagctcccctctctgtggaactctcgggtggggttctatgtaaacacctttcagtcaatagctgggctcgaggagaactttcataaggagatgtcgaagcttaaccagaacttgaacgatgtccttgtgggcctggagaagcagcacggatccaatacgttcacagtaaaggcgcagccacgcaagaagtctaagctcttctcaagacttcggcggaaaaagaattccgataatgctccagccaaaggaaacaagagcccatctccccccgacggctcccccgcagcgacccctgaaatacgggtgaatcatgagccagagccggcgggcggggccaccccgggggcaacgctacctaaatctcccagtcagccggctgaagccagtgaggttgccggcggcacacagcccgctgccggtgctcaggagcctggggagactgctgctagtgaagctgcctcctcctcacttcctgccgtcgttgttgagacctttcccgccaccgtgaacggcaccgtggagggcggatcaggggctggaaggctcgacttgccacccggcttcatgttcaaagtgcaggcccaacatgactacacagctactgacaccgacgaactgcagcttaaggccggcgatgttgtattggttattcccttccaaaacccggaggagcaagatgaagggtggctcatgggcgttaaagagtctgactggaaccagcataaagaacttgagaaatgcaggggagtttttcccgagaactttacggaaagagtgccctag

SEQ ID NO: 14148 - DNA, 1653 bp, synthetic construct
  misc_feature 1..1653: note = Description of Artificial Sequence: Synthetic coding sequence
  source 1..1653: mol_type = other DNA
atggccgagatgggatccaaaggagttactgccggaaaaatagcgtccaacgtgcaaaagaaactaacccgcgcccaggagaaggtgctgcaaaagcttggtaaggctgatgagacgaaagacgagcaatttgaacagtgcgtgcagaactttaataaacagctgacagagggaacccgtcttcagaaagaccttcgaacgtaccttgcatccgtaaaggctatgcacgaggcttcaaagaagctcaatgaatgccttcaagaagtgtacgagccagactggcccggaagggacgaagcgaacaagatcgcggaaaacaacgaccttctgtggatggattaccatcagaaactggttgatcaagcattgctaaccatggatacctacctgggacagttccctgatatcaaatctagaatcgctaagagaggtagaaagcttgtggactacgacagcgcccgccatcactatgagagtctgcaaactgccaaaaagaaggacgaggcaaaaatcgccaagccagtgtcgcttctggaaaaagccgccccacaatggtgccagggcaaactgcaggctcatttagtggcacagactaacctgctacggaatcaggccgaagaggagttgatcaaagcccaaaaggtttttgaggagatgaacgttgacctgcaggaagaactcccatctctatggaactctagggtggggttctacgtgaatactttccagagcatcgcagggcttgaggagaatttccacaaagagatgtcaaagcttaatcaaaacctaaatgatgttctcgtaggcctagagaagcagcatggcagcaataccttcactgtaaaggcacagcccagtgacaatgcccccgccaagggtaacaagagtccgtccccccccgacggctcaccagccgcaactcccgaaatacgagtgaaccatgagccagaacctgccggaggggctacccctggcgctaccctgccaaaatctccatcccagttcgaagctccaggccctttttctgagcaggcatcactgctggacctcgatttcgacccactgcccccggttacatctcccgttaaagcacccactcccagtggacagagcatcccctgggacctctgggagcccaccgaatcgccagccggctcactgccttctggggagccttctgctgcagagggaacctttgctgtgtcgtggcctagtcaaaccgctgagcccggtcccgcacagcccgcagaggccagtgaggtcgctgggggaacacagccagctgccggggctcaggagccaggcgagactgctgccagcgaagccgccagctcatcactgcccgcggtcgtggtggaaaccttcccagctaccgtgaacggtaccgtcgaagggggcagtggtgcgggcagacttgacctgccccccgggttcatgttcaaggtccaggcccaacatgactatactgcaactgacacagatgagctgcagctaaaggcaggagacgtggtgctcgttatccctttccagaatccagaggaacaggacgaagggtggctaatgggtgtgaaggagtccgattggaaccagcacaaggagcttgaaaagtgtaggggagtgttcccggaaaatttcacggaacgggttccttag

SEQ ID NO: 14149 - DNA, 1449 bp, synthetic construct
  misc_feature 1..1449: note = Description of Artificial Sequence: Synthetic coding sequence
  source 1..1449: mol_type = other DNA
atggctgaaatgggcagcaagggagtcaccgccggtaaaattgcctccaatgttcaaaagaaacttaccagggcacaagagaaagtcctccagaaattgggtaaggcggatgagaccaaggatgagcagtttgagcaatgcgtgcaaaacttcaataaacaactgacagagggaaccagactgcagaaggatctgaggacctatctcgcctctgttaaagccatgcatgaggcttctaaaaagctgaacgaatgtctgcaggaagtgtacgagcccgactggcccggtcgcgatgaagcgaacaagatcgccgaaaataatgatcttctgtggatggactaccatcagaaacttgtggaccaggcactgctgactatggatacgtacttaggccaattccctgatatcaagtcacggattgccaagcgtggaaggaagctggtcgactatgactcagctcgacaccactatgaatccctccaaacagctaaaaagaaggacgaggccaagatagcgaaggcggaggaggagttgatcaaggcacagaaggtattcgaagaaatgaatgttgacctccaggaggagctgccctccctgtggaacagtcgggtggggttctacgtcaatacttttcagtccatcgcaggcctggaggagaatttccacaaggagatgtctaagctaaaccagaatctgaatgacgtcctggtcggacttgaaaagcagcacggctcaaacaccttcacggtaaaggcacagcctagcgataatgcccctgctaagggcaataagagccctagtccgcccgacggcagtcctgcagctacacctgaaatccgagtgaatcacgagccggaacccgcaggtggtgccactcccggcgccactctgcctaagtctccatcgcagctgcgtaaaggaccgcctgtgccgcccccaccaaagcatacaccgagcaaagaggtgaagcaggagcagatccttagcttgtttgaagatacattcgttccggagattagtgtgactacacctagccagccagctgaggcgagcgaagtggccggaggaacacagccggctgccggagctcaggaaccgggcgaaacagcggctagtgaggccgcgtctagctccttgccagctgtcgtagtggagacgtttcctgccaccgtgaacggaaccgtagagggaggcagcggagctgggaggctggacctgccccctgggttcatgttcaaggtgcaggcgcagcatgactacacggcgactgacactgacgagcttcagctgaaagccggcgatgtggtgctagttattccttttcagaaccctgaagagcaggatgagggctggctcatgggtgtcaaagagagcgactggaaccagcataaggagctcgaaaagtgcaggggcgtttttccagaaaactttacagagcgcgtcccctag

SEQ ID NO: 14150 - DNA, 1428 bp, synthetic construct
  misc_feature 1..1428: note = Description of Artificial Sequence: Synthetic coding sequence
  source 1..1428: mol_type = other DNA
atggccgagatggggagcaaaggggtcactgctgggaagatcgcttccaacgttcagaagaaacttaccagggctcaggagaaagtcttgcagaaactcggcaaagccgatgaaacaaaagacgaacagttcgaacagtgcgtccagaattttaataaacaactgaccgaagggaccaggctgcagaaagacctccggacatatctggcttctgtcaaagccatgcatgaagccagcaagaagttgaacgaatgcttgcaggaggtgtacgaaccagactggccaggtcgcgacgaagcaaataaaattgcggaaaacaacgatcttctgtggatggattaccaccagaaactggtcgaccaagccctcctgactatggacacctatctcgggcagttccccgatattaagagccgtatcgctaaaagaggccggaaactggtggattacgacagcgcaaggcaccactatgagtctctccaaaccgcgaaaaagaaagacgaggccaagatcgcaaaggctgaagaggaacttatcaaagcccagaaagtgttcgaagagatgaatgtcgatctgcaggaggagctcccctccctctggaactctagagtgggtttttatgttaatacctttcaaagcatagccggactggaggaaaactttcacaaggagatgagcaagctgaatcagaatcttaatgacgttctcgtcggccttgagaaacaacatggctcaaacactttcacagtcaaggcccagccctctgacaacgctcccgccaaaggaaataagagtccttcaccgcccgacggatcacccgccgctacccccgaaatacgagtgaatcatgaacccgagcctgcaggaggcgcgactccaggagctaccctgcctaaatctccgtcccagcccaccgaaagtcccgctggcagcctgcccagtggagagccttccgccgccgagggcacctttgcagtgtcctggccctcccaaactgcagaacccggcccggcgcagcccgccgaagcgagtgaagttgcaggaggcactcagcctgccgctggagcgcaggagcctggtgaaacagcagcttctgaggcagcaagctcctcactccccgccgtggtggtggaaacgttccccgcaaccgtgaatggtacagtggagggtggctccggggctggccgtctcgaccttcctcccggattcatgtttaaggtacaggctcagcatgattacactgccaccgataccgacgaactgcagcttaaggccggagacgtggtgctagtgatccccttccaaaacccagaagagcaggatgagggttggctgatgggcgtcaaagaaagcgactggaatcagcataaggaactggagaaatgcaggggggtgttccctgaaaactttacggagcgagtgccctag

SEQ ID NO: 14151 - DNA, 1320 bp, synthetic construct
  misc_feature 1..1320: note = Description of Artificial Sequence: Synthetic coding sequence
  source 1..1320: mol_type = other DNA
atggccgagatgggttccaaaggcgtgaccgccggcaagattgccagcaacgtgcagaaaaagctgactagagctcaggagaaggtcctccaaaagctgggcaaagccgatgaaacaaaggacgagcagttcgagcagtgcgtgcagaactttaacaagcagctgacagaggggacacggttgcaaaaagacttgcgcacctacctcgctagtgtgaaggccatgcacgaagcttccaagaagctcaatgagtgtttgcaggaggtctacgaaccagactggcctgggcgtgatgaggctaataaaattgctgaaaataatgatcttctctggatggactaccatcagaagctggtcgaccaagccctgttgacgatggacacatacctgggtcagttccccgacatcaagtcaagaatcgctaagagaggacgcaaactggttgattatgattccgcgagacaccactacgaatctctgcaaacagccaagaagaaagacgaagccaagatagcgaaggccgaggaagaacttatcaaagctcagaaagtctttgaagaaatgaacgtggacctccaggaggagctccccagtctgtggaacagccgggtgggcttttatgttaacacttttcagagcatcgcaggcctcgaggagaatttccacaaggagatgtctaagttaaatcagaacctgaatgacgtgcttgtggggctggaaaagcagcatggcagcaacaccttcactgtgaaggcgcagcccagtgacaacgctccagccaagggcaacaaatccccttcgccacccgacggtagccccgcagccacacctgagatccgagttaaccatgagcctgagcctgctggaggcgccacacctggtgccactcttcctaagtctccttcccaaccagcggaagcaagtgaagtggccggcggtacacagcccgccgctggggcgcaggagccaggtgagactgccgcttccgaggcagcgagcagttcactgcctgctgtcgttgtggaaacctttcctgcaaccgtcaacggcacagttgaaggagggtcaggggcagggcggctggacctgcctcctggcttcatgtttaaggtacaggcccagcatgactacacagccacagataccgatgagttacagctcaaagcgggggatgttgtgctcgtgattccattccaaaacccagaagaacaggatgaaggatggctcatgggagtgaaggaatctgattggaaccaacataaggaactggagaagtgtagaggggtcttcccagaaaactttactgagcgggttccttag

SEQ ID NO: 14152 - DNA, 1956 bp, synthetic construct
  misc_feature 1..1956: note = Description of Artificial Sequence: Synthetic coding sequence
  source 1..1956: mol_type = other DNA
atgggaaaaaagcataagaagcacaaaagtgataagcacctctatgaagaatatgtagagaagccgctgaagctggtgttgaaggtcggtgggaacgaggttacggagctaagcaccggaagctctggccacgactctagtctgttcgaggataaaaacgaccatgataaacacaaggacaggaaacgcaaaaagagaaaaaagggggaaaagcagattccaggcgaggaaaaagggagaaagcgtcgtagagtgaaagaagacaagaagaagagagacagagacagggttgaaaatgaagctgagaaagacttgcaatgccatgctcctgttcggttggacctgccaccggaaaaaccgctgactagtagccttgcaaaacaagaggaagtcgagcagacacctctgcaagaggctcttaatcagctaatgagacaattgcagcgcaaagatcctagtgccttctttagttttcccgtcacagacttcatcgcccctggttacagcatgatcattaaacatcccatggatttctccaccatgaaagaaaaaattaagaacaacgactaccagtccatcgaggaactcaaggacaatttcaagctgatgtgcactaatgctatgatctacaataagccagagaccatctactataaggctgccaagaagctgttgcatagtgggatgaaaatactcagtcaggaacgaatccagtctctcaagcaaagcattgacttcatggccgatcttcagaagacccgcaaacagaaggacggaaccgacaccagccagtcaggagaagatgggggctgttggcagagggagcgggaggatagcggggacgctgaggcacatgccttcaaaagcccatctaaggaaaataaaaaaaaggataaagatatgctcgaagacaaattcaaaagcaataatctggagcgcgagcaggaacagttggataggatagtgaaagaatctggcggcaaactgacaagacggctcgtgaattcgcaatgcgagttcgagaggcgcaaaccagatggtacaaccactttgggcctgctgcacccggtcgaccctatcgtaggagagcccggatattgtcctgtaagactgggaatgacaacggggagacttcagtcaggtgtgaacacacttcagggatttaaggaggataaacgaaacaaggtcacccctgtactttacctgaattatggcccgtactcctcttacgctcctcactacgattccacgttcgccaatattagcaaagatgactcagaccttatttactccacatacggcgaggatagcgacctacccagcgacttctctattcatgagttcctcgctacatgccaggactacccctacgtcatggctgactctctcctggacgtgctcaccaagggcgggcattctagaactctgcaggagatggagatgtctctccccgaggacgaggggcacacccgcaccctcgacactgctaaagaaatggagattaccgaagttgaaccgccaggtcgcctggactcttcaacccaggataggttgatagctctgaaagccgtcacaaacttcggcgttccagtagaggtattcgattctgaagaagctgagatcttccagaaaaaactggatgagacaacccggctgctgcgggagcttcaggaggcacaaaacgagaggctcagcactagaccgccacccaatatgatctgcttgctcgggccatcttatcgggaaatgcatcttgcagagcaagtgacaaacaatctgaaggagcttgcacagcaggttacccccggtgatatagttagtacttacggagttcgaaaggccatgggaatcagcattccttcaccagtgatggagaataacttcgtggatctgacagaagatactgaggagcccaagaagacagatgtggctgagtgcggcccgggaggctcttag

SEQ ID NO: 14153 - DNA, 1959 bp, synthetic construct
  misc_feature 1..1959: note = Description of Artificial Sequence: Synthetic coding sequence
  source 1..1959: mol_type = other DNA
atgggcaaaaagcataagaaacacaaatctgacaagcacctgtacgaggaatacgtggaaaagcctcttaagctcgttttaaaggtgggaggcaacgaggttaccgagctgagcacaggctcatcaggacacgactcgagtctgtttgaagacaagaacgaccatgacaaacataaggacagaaagcgaaagaagcgaaagaagggcgagaagcagatcccaggggaggagaaaggccggaaacgacggcgtgtgaaggaagataagaaaaaacgagatagagaccgcgtggagaatgaggccgaaaaagatcttcagtgtcacgcacctgttcggcttgatctgcccccggagaagcccttgacaagtagtctagccaaacaagaggaggtcgagcagactcctcttcaggaagcactgaaccagttgatgcgacaactgcagagaaaggatccttctgcttttttctcttttcctgttaccgatttcatagcacctgggtatagcatgatcattaagcacccaatggacttttccacaatgaaggagaaaattaaaaataacgattatcagtctattgaggaactcaaagacaattttaaactgatgtgtactaatgctatgatatataacaaacccgaaacaatctattataaggctgccaaaaaactgctgcattccggcatgaagatcctgtcccaggaacgaatccagagcctcaagcagtcaatcgatttcatggcagacctgcagaagacgcgcaagcagaaggatggcactgacaccagccagagtggcgaggacggagggtgttggcagcgcgagcgtgaggattctggcgacgcagaggcccatgcttttaaaagcccctctaaagaaaacaagaaaaaggataaggatatgctcgaggataaatttaaaagcaacaacttggaaagggagcaggaacaattagatcgcattgtgaaggagtctggtggaaagctgacaagacgcctggtgaattcccaatgcgaatttgagagacggaaaccagatggtacaaccactctggggttattgcatcccgtggatccaattgtcggagagcctggctactgccctgtgcggctgggaatgaccacgggcaggctgcagtctggtgttaatacactgcaaggcttcaaggaagacaaacgaaacaaggtcactccggtgctctatctcaactacgggccttacagttcttatgccccccattacgacagcacattcgccaacatcagcaaggatgactccgatctcatatattcaacctatggcgaggactccgatctgccaagcgacttctctattcacgagttcttggctacttgccaagattacccatacgtcatggccgatagccttttggatgtcctcacaaagggcgggcactccaggacactgcaggaaatggagatgagtctgcccgaagacgaaggtcacaccaggacacttgatacggccaaagaaatggagcagattactgaagttgaaccccctgggcggctggactccagcacacaggacaggttaattgctttaaaggctgtgaccaacttcggagtacccgtcgaggtgtttgatagtgaagaagctgaaatctttcagaagaagttagatgagacaacgcggttgctccgcgaactgcaggaagcccagaacgagcgcttgtcaacacgcccaccgccaaacatgatctgtctcctgggtccatcataccgcgagatgcatctggctgagcaggtcacaaacaatctcaaagagttagcccagcaggtcacccccggggatattgtttccacatacggggtcaggaaagcgatgggcatatccattccaagcccagtcatggaaaacaactttgttgacctgaccgaggatacagaggagcctaaaaaaaccgacgtggccgagtgcgggcctgggggcagctag

SEQ ID NO: 14154 - DNA, 1959 bp, synthetic construct
  misc_feature 1..1959: note = Description of Artificial Sequence: Synthetic coding sequence
  source 1..1959: mol_type = other DNA
atgggcaagaaacacaagaagcataagtccgacaaacatctttatgaagagtatgtagaaaaacccctgaaactggtactcaaggtaggaggtaacgaggtcacggaactgtcaaccgggtcctcagggcacgacagctccctgtttgaagataaaaatgaccacgacaagcacaaggatagaaaaaggaagaaacggaagaagggtgagaaacagatccccggcgaagaaaagggccgcaaacggcggcgagtaaaagaggacaagaaaaaacgagatagagaccgggtcgagaacgaggccgaaaaagatctgcaatgtcatgccccggttaggctagacctacccccagagaaacccctgacttctagcttagctaaacaggaagaggtggaacagaccccactccaggaggccctcaaccagctcatgcgccaactacagcgaaaggatccgtctgcgtttttctcattcccggtgacagattttattgcccccggctactccatgatcatcaaacatcctatggatttctcaactatgaaggagaaaattaagaataacgattatcaaagtattgaagaactcaaagataacttcaagcttatgtgcacgaacgccatgatttataacaaaccagagactatctattataaagcagcaaagaagctccttcatagcgggatgaaaatactgtctcaggagcgaatccagtccctcaagcagagtattgattttatggcagaccttcagaagacacgaaagcaaaaggatggcactgatacaagccagagcggtgaggacggtggctgctggcagcgtgagcgcgaggactccggcgacgcggaggcccacgcgttcaagtcccccagcaaggagaacaaaaaaaaggataaagatatgctcgaagacaaatttaagtccaacaacctcgaaagagaacaggaacaattggatcgtattgttaaagaatctggcggcaaactcacccggaggcttgtgaattctcagtgcgaatttgagcggcgaaagccagatggcaccacaaccctgggactgttgcaccctgtcgaccctatagtcggtgagccaggatactgtcctgtgcgcctgggtatgaccacggggcgcctgcagagcggagtaaacacgctgcagggtttcaaagaagataaacggaacaaggtaacacccgtgctctatctgaactatggtccctacagctcatatgcacctcattacgattctactttcgcaaacatttctaaagatgacagtgacttgatttattctacatacggtgaggactctgacctgccttccgacttcagtatccatgagttcttagccacatgccaagattatccatatgtgatggcggactcactgctcgacgtgctgaccaaggggggccattcaagaaccctccaggaaatggaaatgagcctgcctgaggatgagggccacacacggacactagacacagccaaagaaatggagcagatcacagaagttgagccaccgggtagactggactcatctacccaggaccgtctgatagccctcaaggctgtgacaaattttggagtgcctgtggaagtgttcgactctgaagaggccgaaatcttccagaaaaaactggacgaaactaccaggctgctgagagaattgcaggaggcccagaacgaaaggcttagcacacgccctccgcctaatatgatttgcctgcttggcccaagttatcgggaaatgcacctggccgaacaggtcactaataacctaaaagagcttgctcagcaggtaacccctggtgacattgtctcaacgtatggggtgagaaaggccatggggatttctataccaagtccagtgatggagaataatttcgtggatctgactgaggacacggaggaacctaagaagaccgatgtcgccgaatgtgggccgggagggtcatag

SEQ ID NO: 14155 - DNA, 1980 bp, synthetic construct
  misc_feature 1..1980: note = Description of Artificial Sequence: Synthetic coding sequence
  source 1..1980: mol_type = other DNA
atggccgcggtcatcctggagagtattttccttaaacggtcacagcagaagaaaaagacttctccccttaattttaagaagcgactgtttctcctgactgtccataagctgtcctattatgagtacgattttgagcgtggacgtcgcggatccaagaaaggctctatcgatgtggaaaagattacatgcgtggagacggttgtgccagaaaagaacccccccccggagaggcagatccccagacgcggcgaagagtctagcgaaatggaacaaatatccatcattgaacgcttcccttacccctttcaggtggtgtatgacgagggtccactctatgtgttctcacccacagaggagctgaggaagcggtggatacaccagctcaagaatgtcatccgatataattcagatctggttcagaagtaccacccctgtttctggattgatggccagtatctgtgttgtagccagaccgcaaagaacgccatgggctgccagattctagaaaatcgcaatggcagtcttaaaccaggctcctcccatcgaaaaaccaagaaacctctcccacctacaccagaggaggaccagatactcaagaaaccactacctcctgaacccgctgccgctccagtgagcacgagtgaactcaaaaaggttgtcgcgctctacgactatatgcctatgaacgccaatgatttgcagctccgcaagggcgacgagtattttattctcgaggaatcaaacctgccatggtggcgagcccgggacaagaatggtcaagagggctacattccctctaactacgtaacagaagcagaggatagtatcgaaatgtacgaatggtattccaagcacatgacgagaagtcaggctgaacagcttctgaaacaagagggaaaagagggcggctttattgttcgcgacagctccaaggcaggaaaatacactgtaagcgtgtttgccaaatccacaggcgatccacagggggtgattcggcactacgtagtctgtagtactccccagtcacagtactatctagcggagaaacacctttttagtacaatcccagagctgataaattaccaccagcataattctgccggcctcattagccgactgaaatatccagtttcgcagcagaataaaaatgcaccctcgacggccggcctgggctatggctcttgggagatcgaccctaaagacctgaccttcctcaaggaactaggaacagggcagttcggtgtcgttaagtatggaaagtggcgcggacagtacgatgttgcaatcaagatgataaaagaggggtctatgtccgaagacgagttcatcgaagaggcaaaagtcatgatgaatttatcccacgagaagctggtgcaactgtacggcgtgtgcacaaagcagcgccctatcttcattatcacagagtatatggcgaacggatgccttttgaattatctgcgggagatgcgccacaggtttcaaactcagcaactgctcgagatgtgtaaagacgtctgcgaggccatggagtatctagagagcaagcagtttctgcatcgcgatcttgctgcccgcaactgcctggtgaacgatcagggtgtagtcaaagtaagcgattttgggctgagtcgttacgtcttggatgatgagtatacttctagcgtgggatcaaagttcccggtaagatggtcacctccagaggtcctgatgtactcaaagttctctagcaaaagtgacatctgggcatttggggtgctcatgtgggagatctatagcctcggtaaaatgccttacgaacgttttaccaactcagagactgcagaacacatagcacagggcctccgcctttaccggcctcatttggcctccgagaaggtgtacaccatcatgtattcttgctggcatgagaaagcggatgaacggcctacctttaagatcctgctcagcaatattttggacgtaatggatgaggagagctag

SEQ ID NO: 14156 - DNA, 627 bp, synthetic construct
  misc_feature 1..627: note = Description of Artificial Sequence: Synthetic coding sequence
  source 1..627: mol_type = other DNA
gttattaggcactatgtggtgtgcagcacaccccaaagccagtattacctagctgaaaaacacttgttctccaccatcccagagctgatcaactaccatcagcataactctgcagggttgatatccagaacccaacagctcctggagatgtgtaaagacgtatgcgaggcgatggagtacctggagagcaaacagtttctccatagagatcttgcggcccggaactgcttggttaacgaccaaggcgtggtgaaggtgtcagacttcgggttgtcccgctacgtactcgacgatgaatacacttcttccgtgggctcgaaattccccgtgcgatggtccccccccgaagtgttgatgtatagcaaattttctagcaaaagtgatatatgggccttcggcgttctgatgtgggaaatctattcattgggaaaaatgccatacgaacgctttacaaacagtgagacggcagaacacatagcacagggcctgcggttatacaggcctcacctggcgagtgaaaaggtgtatacaatcatgtacagttgttggcatgaaaaagccgatgaacgtcctacattcaagattttgttatccaatatcctcgatgttatggacgaagaatcatag

SEQ ID NO: 14157 - DNA, 420 bp, synthetic construct
  misc_feature 1..420: note = Description of Artificial Sequence: Synthetic coding sequence
  source 1..420: mol_type = other DNA
gtgattcggcattatgtggtctgctccacgcctcaaagtcagtactaccttgcggagaaacacctgttttctacgattcctgagctgattaactatcaccagcacaattccgcgggcctgataagcagacttaagtatcctgtgagccaacagaacaagaacgccccatcgacagctgggttggggtacggtgttttgatgtgggagatctactctctggggaagatgccatacgagcgctttacaaactctgaaaccgccgagcatatcgcgcagggcctgcgtctttatcgcccacacctggctagtgagaaggtgtacacaattatgtatagctgctggcacgaaaaggcagacgaacgacccacgtttaaaatcctgctctccaacatcctggacgttatggacgaagaaagctag

SEQ ID NO: 14158 - DNA, 705 bp, synthetic construct
  misc_feature 1..705: note = Description of Artificial Sequence: Synthetic coding sequence
  source 1..705: mol_type = other DNA
cgacattacgtcgtgtgcagtacaccccaatctcagtactatttggcagagaagcacctattcagtaccattcccgagctgatcaattatcaccagcataatagtgccgggttgatttcccgcctgaagtatcctgtatcacaacagaataaaaacgctccctctaccgccggcctaggctatggctcttgggagatcgacccaaaggatctcactttcctcaaggagttggggacgggccagttcggtgttgtcaaatatggtaagtggaggggccagtacgacgtcgctataaagatgatcaaggagggctcaatgtccgaggacgagtttatcgaagaagcaaaagtgatgatgtacgtgttggatgatgaatatacatcttctgtcggatccaaatttccagttcggtggtccccgcctgaggtgctcatgtactccaagttttcatctaagtctgacatctgggcatttggcgtgctcatgtgggagatctatagccttgggaagatgccctatgagagatttaccaactcagagactgcggaacacatcgctcaaggactaagactgtatagaccacatctggcatcagaaaaagtgtataccatcatgtattcttgctggcacgagaaagccgacgaacgacccacttttaaaatcctactctcaaatattcttgacgtaatggatgaagaatcctag

SEQ ID NO: 14159 - DNA, 225 bp, synthetic construct
  misc_feature 1..225: note = Description of Artificial Sequence: Synthetic coding sequence
  source 1..225: mol_type = other DNA
gtcattagacattatgtcgtgtgtagtacccctcaatcacagtactacctggcagagaagcatctattttctaccattcccgagctgatcaactaccaccaacacaacagtgcagggctgatctcccgacttaaatacccagtttctcaacagaacaaaaacgcgcctagtacagcaggactgggatacgggatgtcatggatgatgaatacgcaggcccaatag

SEQ ID NO: 14160 - DNA, 1452 bp, synthetic construct
  misc_feature 1..1452: note = Description of Artificial Sequence: Synthetic coding sequence
  source 1..1452: mol_type = other DNA
atggcggccgttatactggagagcattttcttaaagcgatctcagcaaaagaaaaaaactagccctttaaactttaaaaagcgtctgtttcttctcacggtccacaagctctcttactacgaatatgacttcgagcggggaaggcgaggaagcaagaaggggagcatagatgtggagaagattacatgcgtggagactgtagtacccgaaaagaatcctcctcccgagcggcagatccctcgacggggcgaagaatccagcgagatggaacagatctccatcatcgagagattcccatacccgtttcaagttgtgtacgacgaaggacctctttacgtttttagtccaacggaggagttgagaaagagatggattcaccagcttaaaaacgtcatacgctacaactctgatctcgtgcagaaatatcatccctgcttctggatcgacgggcaatacttatgttgtagccagactgctaagaacgcgatggggtgtcaaatcctcgagaatcggaacggctcgttaaagcctggcagttcccacaggaagacaaagaagcccctgccacccactcctgaggaagaccagatcttaaagaaacccctgccccccgaaccagctgcagctcctgtgtccactagcgagctaaaaaaggttgtagctctgtacgactatatgcccatgaatgcaaacgacctgcagctgcgaaaaggcgatgaatattttattctagaagaaagcaacctgccttggtggcgtgcgagagacaagaacggacaggaagggtacattccaagcaactacgtcaccgaagcagaagactcaattgagatgtatgagtggtattctaaacacatgactagaagtcaggcagagcagctcttgaagcaagagggtaaagagggaggattcattgtccgggattccagtaaagccggcaagtatactgtttcagtgtttgcaaaaagtacaggagatccgcagggcgtaatccgccactatgtcgtttgtagcactccacagtcccagtactatttggcggccaggaactgcctcgttaacgaccagggggtggtgaaggtgagtgacttcgggctgtcaaggtatgttctggatgatgagtatactagttccgtgggatcaaaatttccagtgagatggagcccacccgaagtcctgatgtattctaaattctcttccaagtcagacatatgggcttttggagtccttatgtgggaaatttacagccttggcaaaatgccttacgaaagattcacgaacagcgagactgccgagcacatagcacaggggctgcggctctaccggcctcacctcgcttctgagaaggtttacactataatgtattcctgttggcacgagaaggcagatgaaagacccacatttaaaatcctgctgagtaatatactggatgtgatggacgaagagagctag

SEQ ID NO: 14161 - DNA, 519 bp, synthetic construct
  misc_feature 1..519: note = Description of Artificial Sequence: Synthetic coding sequence
  source 1..519: mol_type = other DNA
gttatccgccactacgtggtgtgttcgacccctcaatcccagtactacttggcagagaagcatctgttcagcaccatccccgaactgattaattatcaccaacacaactccgctgggctgatttctaggttgaaataccctgtgagtcagcaaaataagaacgcaccgtccacggccggtctaggctacggcagctgggagattgatccaaaggaccttactttcttaaaggagctgggaaccgggcaattcggagtggtgaagtacggaaagtggagaggtcagtacgatgttgccataaaaatgataaaggagggctcgatgagcgaagacgaatttatcgaagaggccaaggtgatgatgaacctgtcacatgaaaagttggtgcagctgtatggagtgtgtacaaagcagcgccccattttcataattactgaatacatggcgaacggctgcctgccctgtactgtagctgggatgagaaagcaaatgagcgttccactatccaagttcttctag

SEQ ID NO: 14162 - DNA, 594 bp, synthetic construct
  misc_feature 1..594: note = Description of Artificial Sequence: Synthetic coding sequence
  source 1..594: mol_type = other DNA
gttataaggcactatgtcgtatgcagcactcctcagtctcagtactatctggccgaaaagcatctgttttcaacaattcctgagctgatcaactatcatcaacacaatagcgccggcctaatatccaggcttaagtatcccgtgtcccagcagaacaagaatgcgccctctactgcgggcctgggttatggatcctgggagatcgatcctaaggacctcactttcctgaaagagctcggtacagggcagtttggcgtggtgaaatatggcaagtggcgaggacagtatgatgtcgccatcaagatgatcaaagaaggttccatgagtgaagacgagtttattgaggaagccaaggtgatgatgaatctgtctcatgagaaactcgttcagctgtacggcgtctgtacaaaacagaggccgatcttcataatcacagagtatatggcgaacggatgtttgctgaactacttgcgagaaatgcggcataggttccagacccagcagctcctcgagatgtgcaaagatgtttgtgaggcaatggaatatttagaaagcaagcagtttcttcatagggacctcgtctgtcctggatag

SEQ ID NO: 14163 - DNA, 156 bp, synthetic construct
  misc_feature 1..156: note = Description of Artificial Sequence: Synthetic coding sequence
  source 1..156: mol_type = other DNA
attcgtcactacgtagtttgctccacccctcagtcccagtactacctggctgagaagcatttgtttagcacgattcctgagcttataaactaccaccagcataacagcgcgggcgaggactcggcggccgctcgcgatgtccagggctgtctctag

SEQ ID NO: 14164 - DNA, 891 bp, synthetic construct
  misc_feature 1..891: note = Description of Artificial Sequence: Synthetic coding sequence
  source 1..891: mol_type = other DNA
atgaagaatgaaatcgcagccgtcgtctttttcttcacacgcctggtgcgcaagcatgacaagctgaagaaagaggccgtggagcgctttgctgagaaactgaccctgattctgcaggagaaatataagaaccactggtatccagagaagcctagcaagggccaggcttatcggtgtatacgtgtaaataagttccaacgggtggaccctgacgtattgaaggcatgtgagaactcatgcatcctctactccgacctcggcttgccaaaagaattgactttatgggtagatccatgcgaggtatgttgtaggcgcgacggggtgtccccgtgttggcctgattgcagccagactcctgatctcgtgattaggcctccttggcccccaaaggctctggattataggagggaaccgcttagacccgcttcttcctttcttattatgtacggcgagaaaaataacgccttcattgtggcgagtttcgagaacaaggatgagaataaggatgagatcagccggaaagtgacacgggctctggacaaggttacaagcgactatcattcaggaagcagttctagtgacgaggaaacctcaaaagagatggaagtgaaacctagtagtgttaccgccgctgcgtcccctgtataccaaatctcagagctaatctttccgcctctgcctatgtggcaccccctgcctagaaagaagcccggcatgtacaggggcaacggccatcagaatcactaccccccgcccgtgccttttgggtatcctaaccaggggcgaaaaaataagccttacagacccattccagtgacatgggtcccccctccaggaatgcactgcgaccggaatcattggataaaccctcacatgctcgccccgcattag

SEQ ID NO: 14165 - DNA, 759 bp, synthetic construct
  misc_feature 1..759: note = Description of Artificial Sequence: Synthetic coding sequence
  source 1..759: mol_type = other DNA
atgaagaatgaaatcgcggccgtggttttctttttcactcgactggtgcgcaagcacgacaagctgaagaaggaagcagtggagcggtttgcagagaagctcaccctgatcctccaggagaaatacaaaaaccattggtatccggagaagccttctaagggacaagcctaccgatgtatccgggtgaacaagtttcagcgcgtggatcccgacgtcctgaaggcatgtgagaacagttgcatactgtactctgacctgggcttgcctaaagagcttacgctgtgggtagacccttgtgaggtgtgttgcagatacggagaaaagaataacgctttcatcgtcgcttcgttcgagaataaggacgagaataaggatgagatctctcgtaaggtcacaagggctttagataaagtgacctcagattaccactctggaagcagcagctcggacgaagagacctcaaaagaaatggaggtcaaaccctcctccgtaactgcggctgcgtccccggtataccaaattagtgagctcatatttccccctcttcccatgtggcatcccctacctcgcaaaaagccaggcatgtacaggggcaacggtcatcagaatcattacccaccgcctgtgccctttggctatcccaatcagggaagaaaaaacaagccttacagaccaattcccgtgacctgggtgcctccaccaggcatgcactgcgatcgcaatcactggattaacccgcatatgctcgcaccccactag

SEQ ID NO: 14166 - DNA, 141 bp, synthetic construct
  misc_feature 1..141: note = Description of Artificial Sequence: Synthetic coding sequence
  source 1..141: mol_type = other DNA
atgaagaacgagatcgccgcggtggtgtttttttttacacgcctcgtgagaaagcatgacaagctgaagaaagaagcagtggagcgatttgccgaaaagctgaccctcattctccaggagaaatacaagaatcactggtag

SEQ ID NO: 14167 - DNA, 1560 bp, synthetic construct
  misc_feature 1..1560: note = Description of Artificial Sequence: Synthetic coding sequence
  source 1..1560: mol_type = other DNA
atgatgagtgagcacgacctggcggacgtcgtgcagatagctgtggaggatctctctcctgaccaccccgtcgtattggagaaccacgtcgttaccgacgaggatgaacctgccctgaagagacagcgattagaaatcaattgccaagatccttccatcaagaccatttgcctcaggttggattcaatcgaagctaagttgcaagccctggaagccacttgcaagagccttgaagagaagttggatctcgtaacaaataagcagcactccccgatccaagtgccaatggtggctggaagtcctttgggtgcaacacagacctgtaataaggtcagatgtgtagtgccacagacaaccgtgatcctcaataatgaccgacagaacgcaatcgtcgccaaaatggaggatcccctctccaatagggcgcctgatagcctggaaaacgtgatttcaaatgccgtgcctggccggcggcagaacactatcgtggtgaaggtccccggccaggaggattcacaccacgaggacggggaatctggctcagaggcctcagattctgtttcctcatgtgggcaggctggatcccagtccatcggatctaatgtgacactgattaccctgaattcagaggaggattaccccaacggcacctggctcggcgatgaaaacaaccccgagatgcgagtgcgttgcgcgattatcccaagtgacatgttgcacattagcaccaattgccgcacagccgagaagatggccctgactctgctcgactacctctttcaccgggaggttcaagccgtgtcaaatctgtcaggccagggtaaacacggcaagaagcagttggatcctctgacgatctacggtatccggtgtcacttattctacaaatttggaatcactgagagtgactggtaccggattaagcagtcgattgattccaagtgccgaacagcctggagacgaaagcagaggggtcagagtctcgcggtgaaatctttttcccgacgcactccgaattccagttcctattgtccctctgagccaatgatgagcacacctccccccgcctccgagctcccccaaccgcagccccaacctcaggctctccactatgccctggccaacgcccagcaagtccaaatccaccaaattggcgaggatggacaggtgcaggtagggcatctgcacatcgcccaggtgccacagggcgaacaggtccagatcacccaggattccgaaggcaatctgcagattcatcacgtcggacaagatggccaactactagaggctaccaggattccctgcctgcttgctccatcagtgtttaaggccagctctgggcaagtcctgcagggggcacagcttatcgctgttgcttcttctgatccagccgccgccggagtggacggttctccgctccagggctccgatatccaagtccagtacgtccaactcgcccctgtgtcagatcacacagctggcgctcagaccgcggaagctttacagcccactctgcaacccgaaatgcagttggagcacggagcaatccaaattcagtag

SEQ ID NO: 14168 - DNA, 1398 bp, synthetic construct
  misc_feature 1..1398: note = Description of Artificial Sequence: Synthetic coding sequence
  source 1..1398: mol_type = other DNA
atgatgtcagagcacgatcttgccgacgttgtgcagattgccgtggaggacctgtcacctgatcatcctgtggttttagaaaaccatgtggtgaccgacgaggatgaacctgcgctcaagcggcagcgtcttgaaataaattgtcaagatccctccataaaatcgtttctatattcgatcaatcagacaatttgcctaagactggattctatcgaggccaagcttcaggcgctcgaggcaacctgcaagagccttgaggagaagctcgatttagtgacaaacaaacaacattctccaatccaggtgcccatggtggctggatccccgctgggggcgacccagacatgcaatgccgtgccaggccggcgtcagaacacaatcgtggtgaaggtgcccggtcaggaggactcccaccacgaagacggggaatcaggaagtgaggcatcagattccgtgtcctcatgcggtcaggctggatcgcagagtatcggatctaatgttaccctcatcaccttgaatagtgaggaggattatcctaatggcacatggctgggtgacgagaataaccctgagatgcgagtcaggtgcgctatcattccctcagatatgttacacatatctactaattgccgaaccgccgagaagatggccctgaccctcctcgattacttgttccatagagaggtgcaggccgttagtaatcttagtggacaaggtaaacacggcaaaaagcagttagatccgctaaccatctacgggatccgctgccacttgttttacaagtttggcattaccgaatctgactggtacagaatcaagcagtccatcgatagtaagtgcaggaccgcctggcggcggaaacagcgcggacaatccttggcggtgaagtccttttcaagacgcacacctaactcgtcatcctattgtccatcagagccgatgatgtcaacacctcctccggcttccgagcttcctcagccgcagccacagcctcaggcactgcactacgcgctggccaatgcccagcaggtgcagatacatcagattggagaggatgggcaggttcaagtgatcccccagggccacttgcacatcgcccaggtgcctcagggtgagcaggtccagataactcaggacagcgaggggaatctccaaatacaccatgtagggcaggacggccaagtcctccagggagcccagctgattgctgtggcatcatcagaccctgccgctgctggggtggacggcagtccgctgcagggcagcgacatccaggtacaatatgtgcaacttgcacctgtttcagaccacacagctggagcacagaccgcagaagccttacaacccaccttgcagccggagatgcaactagagcacggggccatacaaattcagtag

SEQ ID NO: 14169 - DNA, 1410 bp, synthetic construct
  misc_feature 1..1410: note = Description of Artificial Sequence: Synthetic coding sequence
  source 1..1410: mol_type = other DNA
atgatgagcgagcatgaccttgccgatgtggtgcagatcgccgttgaggatctcagtcctgatcacccggtcgtcttggaaaatcatgtggtaactgatgaagatgagcccgcgctgaagcggcaaagactagagataaattgccaggacccctccattaagtctttcttgtacagcattaaccagaccatatgtctaagactggactccattgaagccaagttgcaggccctcgaggcaacttgcaagtccctagaggaaaagcttgacctcgttacaaataaacagcatagtccaatacaggttccgatggtcgctggttcacccctgggagcaacccagacctgcaacaaagtgcggtgtgctgtgcccgggcgccgccagaatacgattgtggtgaaggtccctgggcaggaagactcccatcacgaagatggagagagcggtagcgaggcttctgatagtgtgagtagctgcggtcaagccggctctcagagtattgggagtaatgtaacacttatcacattaaattccgaagaggattatccgaatggtacttggctcggggatgaaaataatccagaaatgcgcgtgaggtgcgcgattattcctagtgacatgctccatatcagcactaattgccgaaccgccgagaagatggccctcactctgttggactatctgtttcaccgggaggtccaggccgtatcaaacctgtcggggcaggggaagcacgggaagaaacaactcgatccactcaccatctacggcataagatgccacctcttttataagtttgggataacagagtcggattggtatcgtatcaagcagtctattgactctaaatgtaggactgcctggagacgaaaacagcgcggacaaagcctagccgtaaagagtttttcccgccgcacgcccaactctagcagctattgtcctagtgaaccaatgatgagcactccaccccctgccagcgagctcccgcagccgcaaccacagccccaggccctccactacgctctagctaatgcccagcaggttcagattcaccagattggcgaggatggccaagtccaagtgattcctcagggccatttgcacattgcacaggtcccacagggagaacaggttcaaataacacaggattcggagggaaacttgcagattcaccacgtgggccaggacggacaggtgttgcaaggagctcagctcattgctgtggcttcctccgatccggcggcagcaggagtggacggcagtcccttgcagggaagtgacattcaggtgcaatacgtgcagctcgcccctgtcagcgaccatactgctggggcacaaacagccgaagccctgcagccaactctgcagcccgagatgcagcttgaacatggcgcgatacaaatacagtag

SEQ ID NO: 14170 - DNA, 1494 bp, synthetic construct
  misc_feature 1..1494: note = Description of Artificial Sequence: Synthetic coding sequence
  source 1..1494: mol_type = other DNA
atgatgagcgaacacgatttggctgatgtggtgcaaatagcagtggaagatctgtcaccggatcatccaggtactgaactttgggacattgtgctcgagaaccatgtggttaccgatgaggacgaaccggcactcaagaggcagaggctggaaatcaactgtcaggatccatcaattaagtcttttctgtattccatcaatcagacgatttgtctcaggctggactccatcgaggccaaattacaagctctggaagctacctgcaaatctcttgaggagaagctcgatctggtcaccaataaacaacactccccaatacaagtaccaatggtcgcgggttcccccctgggggccacccagacttgcaacaaagttaggtgcgcggtcccagggcgccggcagaatacaatcgttgtcaaggtgccaggacaggaggattcccaccacgaggatggagagagtgggagtgaagctagtgacagtgtgtcctcatgcggacaggccggctctcaaagcatcggaagcaacgtgaccctgatcacccttaactctgaggaagactatcctaacgggacctggttgggcgatgagaataaccccgaaatgagagtccgatgtgcgattattccctccgatatgctgcacatctcaaccaactgccggaccgccgagaagatggctttgaccttgctcgactatctgtttcatagggaggtacaggcggtgagcaatttatcagggcagggtaaacatgggaagaagcagctggatcccctgacaatttacgggattaggtgccatctgttttataagtttggaatcaccgagtctgactggtatcggataaagcaaagtattgattctaagtgccggacagcatggcgtcggaaacagaggggccagagcctggctgtgaaatctttttcacgccggacaccaaatagttcatcatattgtccgtcagaacccatgatgagcactccaccacccgcttctgagctgcctcagcctcaacctcaacctcaggcattgcattacgccctggcaaacgcgcaacaggtacagatccatcaaatcggggaagatggccaggtccaggtgatcccccaaggacatctccacatagcacaggttccgcagggagagcaggttcagatcacccaggactcagagggaaacctgcagattcaccacgtgggccaagatggccagctgcttgaggcaacacggattccgtgcttattggctcccagcgtgtttaaggcttcgagcggccaggtactgcagggggctcaactgattgccgtggcttcatcagaccccgccgcagctggagtggatggttcccctttacagggctctgatattcaggttcaatacgtgcagctcgctccagtttccgatcacacagcgggcgctcaaaccgccgaagctttgcagcccaccctccagcccgagatgcagctagagcatggagcaattcaaattcagtag

SEQ ID NO: 14171 - DNA, 1560 bp, synthetic construct
  misc_feature 1..1560: note = Description of Artificial Sequence: Synthetic coding sequence
  source 1..1560: mol_type = other DNA
atgatgtccgagcatgacctggctgacgtagtgcagatcgctgtcgaggacctgagccctgatcaccctgtggtgctcgagaatcacgtcgtgaccgacgaggacgagcccgcccttaaacgccagcgtctggagattaactgtcaggatcctagcattaaaacaatatgcctacgcctcgactccatcgaagcaaagctgcaagccttggaagccacctgcaaatctctcgaggaaaagctggatttggtgactaataaacagcattccccaatccaagtgccaatggttgccggctcccctctcggagccacccagacatgcaacaaagtgcggtgtgtcgtgcctcagactaccgtgattctgaataatgacaggcaaaatgccatagtcgcgaagatggaggatcccctctcgaacagggcccccgattccctggagaatgtgataagcaacgcagtccccgggagacgtcaaaacactattgtggtaaaagtgccaggacaggaggactctcaccatgaggatggagagagtggctctgaagccagcgatagtgtgtcgagttgcggacaggccgggtcacaatctattgggtctaacgtgacgctgatcacccttaatagcgaggaagattatcctaacggaacctggcttggcgacgagaacaatcccgaaatgagggttcgatgtgcaatcataccaagcgatatgctccatatcagcactaactgcagaacagctgaaaagatggcactgacgctattggattacctgtttcacagagaagtgcaagcagtcagcaatctgtccgggcaggggaagcacggtaaaaaacagctagacccactaaccatttatggcatccggtgccatttgttttataagttcggcatcactgaatcagactggtatcggatcaagcagagcatcgacagcaagtgcagaacggcctggcggagaaagcagcggggacagagcctggctgtaaagagcttctcaaggaggaccccaaatagcagcagctattgtcccagtgagcccatgatgtctacacctccccctgcatctgaattgccccagccacagccacagccccaggccctccattacgcactggccaacgcccaacaggtgcagatccatcagattggcgaggacgggcaggttcaggttggccacctgcacatcgcgcaggtaccccagggggagcaggtccagattacacaggacagcgaggggaatctgcagatccaccacgtgggccaggacggccagctgcttgaggctaccaggatcccatgtttattagcccctagcgtgttcaaagctagctccggacaggtgctccagggtgctcaattaatagcggtagccagcagcgacccagccgctgctggagtcgatggatccccgctgcagggatcggatatccaggttcaatacgtgcaacttgctcctgtgtccgaccacacggccggtgctcagacagccgaggccctccagcccaccctgcaaccggaaatgcaactcgagcacggggcaatccagattcagtag

SEQ ID NO: 14172 - DNA, 1476 bp, synthetic construct
  misc_feature 1..1476: note = Description of Artificial Sequence: Synthetic coding sequence
  source 1..1476: mol_type = other DNA
atgatgtctgaacacgacctcgctgacgtggtgcagattgccgttgaggatctttcccctgatcacccggtggtcctcgaaaatcacgttgtcaccgacgaagacgagccagctttaaagcgacagcggctggagatcaattgccaggatccctctataaagtctttcttgtactccataaatcagaccatctgcctgcgacttgattcaatagaagctaagctgcaggctctggaggcaacttgcaagtccttggaggaaaagttagatctggtaactaataagcagcattctccaattcaggtgccaatggtcgccggctctcccctcggcgccacgcagacatgtaacaaggtaaggtgtgcagtgcctggaagacgccaaaatacgatcgtagtgaaggtgcctggccaagaggactcccaccatgaggatggcgaatccggctcggaagcttccgatagcgttagttcctgcgggcaggcaggcagccagagcatcgggagcaatgttaccctcattactctaaacagtgaagaggactatcctaacggcacatggttaggagacgaaaacaaccctgagatgcgggtgcgatgcgccatcatcccgagcgacatgcttcacatttccacaaattgcaggacagccgagaagatggccttaactttgctagattacctttttcacagggaagtgcaggccgtgagtaacctttccgggcagggtaaacacggcaaaaagcagctcgatcccttgacgatctacggcatccgctgccaccttttctacaaatttggcattacagagtcagattggtaccggattaaacagtccatcgatagtaagtgccgaacagcttggagaagaaagcaaaggggccagagcttggccgtcaagagcttctccaggcgcactccaaactcaagctcctactgcccaagcgaaccaatgatgtcaacacctccccctgcatcagaacttccacagccccagcctcagcctcaggctctccactatgcccttgccaatgctcaacaggtgcagatccatcagatcggagaggatggacaggtgcaagtgattcctcagggacacctgcacatcgcacaggtgccacagggggagcaggtgcaaattacacaagactcagagggcaacctccagattcatcatgtggggcaggacgggcagctcctggaagcaacgagaatcccatgtctcctggccccttcagtctttaaggccagttctggtcaggtcttacagggggcccagctcatcgcagtggcatcatccgacccggcagcagctggcgttgatggatcccccttgcagggaagcgatatacaagtccagtacgtgcagctggcccccgtgtccgaccacacagctggggcccagacggcggaggccctgcagcccactctgcagccagaaatgcaactcgagcatggggccatccagattcagtag

SEQ ID NO: 14173 - DNA, 357 bp, synthetic construct
  misc_feature 1..357: note = Description of Artificial Sequence: Synthetic coding sequence
  source 1..357: mol_type = other DNA
atgatgtctgagcacgaccttgccgatgtagtacaaatagcggtagaagacctgagccctgatcaccccgttgtgctggagaaccatgtggtgacagatgaagacgaacctgctctcaaacgccagagattggagatcaattgccaagatccaagcattaagagtttcctttactccatcaatcaaaccatttgtctgcgactggattctatcgaggccaaactccaggctctggaggctacgtgcaaaagtctcgaagaaaagcttgatttggtcacgaacaagcaacattccccaatccaagtgcccatggtggctggctcacctctgggcgccacacaaacttgcaataagtag

SEQ ID NO: 14174 - DNA, 87 bp, synthetic construct
  misc_feature 1..87: note = Description of Artificial Sequence: Synthetic coding sequence
  source 1..87: mol_type = other DNA
atgatgagcgagcacgatctggccgatgttgtacaaatcgccgttgaggatctctcccctgaccatcccgtggtccttgagaattag

SEQ ID NO: 14175 - DNA, 288 bp, synthetic construct
  misc_feature 1..288: note = Description of Artificial Sequence: Synthetic coding sequence
  source 1..288: mol_type = other DNA
atgatgtctgagcacgaccttgcggacgtcgtgcagatcgcagtcgaggacctgtcacctgaccatccagtggtactggagaaccacgtggtcactgacgaagatgaacctgccttgaaacgacagcggctggagatcaattgtcaagacccttcaatcaagtcttttctttactctattaatcaaaccatctgtctgcgcctggactccattgaggccaagttgcaggccctggaagcaacctgcaaatctctcgaggaaaagcttgacctcgtcactaataaatag

SEQ ID NO: 14176 - DNA, 372 bp, synthetic construct
  misc_feature 1..372: note = Description of Artificial Sequence: Synthetic coding sequence
  source 1..372: mol_type = other DNA
atgatgtccgaacacgacctggccgatgtggtccaaatcgcagtggaagatctgtccccagatcacccggtagtgctagagaaccatgtggtgaccgacgaagatgaacccgctctaaaaaggcagcgtctcgaaatcaactgccaggacccttctattaagagctttctctacagcattaaccaaaccatctgcctaaggcttgattccatcgaagccaagctacaggcattagaagctacctgcaagtccttagaggaaaagcttgatctggtgaccaataaacaacattcccccatacaggtgccaatggtggctgggtctccgttaggtgccacccagacttgtaacaaggtgaggtgcgtcgtgtag

SEQ ID NO: 14177 - DNA, 588 bp, synthetic construct
  misc_feature 1..588: note = Description of Artificial Sequence: Synthetic coding sequence
  source 1..588: mol_type = other DNA
atgatgagcgaacatgacttagctgacgttgttcagatcgcagtggaagatctcagtcccgaccaccccggcaccgagctttgggatattgtactggagaaccacgtcgtgacagacgaggacgagcctgccctcaaacgccagcgactcgaaataaactgccaagacccatcaatcaagtcgtttctgtacagtatcaatcagacaatatgcctcaggctggatagtattgaggctaagctgcaggccttggaggccacatgcaaatcacttgaggaaaagctcgatttggtgacaaataaacagcactcacctatccaggtcccaatggtcgcgggcagcccattgggcgccactcagacttgcaacaaggtgaggtgtgcagtgcccggccgtaggcagaataccatcgtggtgaaagtgccaggccaagaagacagccatcatgaagatggcgagagcggctcagaagcttctgacagcgtgtcatcctgcgggcaggctgggagccagtctatcggtagcaacgtgaccctcatcactctcaactccgaagaggactatcctaacggtacatggctcgggtag

SEQ ID NO: 14178 - DNA, 360 bp, synthetic construct
  misc_feature 1..360: note = Description of Artificial Sequence: Synthetic coding sequence
  source 1..360: mol_type = other DNA
atgatgagcgagcatgaccttgccgatgtggtgcagattgccgtcgaggacctgtccccagatcaccctgtagtcctcgaaaatcatgtcgtgaccgacgaggacgagcctgctttgaagaggcaacgactcgagatcaactgccaggacccctccatcaagtcttttctttacagtattaatcaaactatttgcctgaggctggactcgatcgaggcaaagctgcaggcgctcgaggctacttgtaaatcactagaagaaaagctggacctggtgaccaataaacagcattcgcccatccaggtgccaatggttgccgggtctcccctaggcgccacgcaaacctgcaataaggtgtag

SEQ ID NO: 14179 - DNA, 1401 bp, synthetic construct
  misc_feature 1..1401: note = Description of Artificial Sequence: Synthetic coding sequence
  source 1..1401: mol_type = other DNA
atgatgtccgaacatgacctggcagatgtcgtccaaattgcagtggaagatttgtccccagaccatcctgtagttctggagaaccacgtcgttaccgatgaagatgagcccgcacttaagcgccagcgtctggagattaattgccaggatccctcaatcaagagtttcctgtactccattaaccagactatctgcctccgactcgattcgattgaggcaaagctacaggctcttgaggccacatgcaaaagcctggaagaaaagctggaccttgttaccaataaacagcacagcccaatccaggttccgatggttgctggatcacctctgggtgctacccaaacatgtaataaggtccgatgtgctgtgcctggcagacggcaaaacacgattgttgtgaaagtgccagggcaagaggacagccaccatgaggacggcgagtcaggaagcgaggcctccgatagtgtatccagctgcggccaagcaggatctcaaagcatcgggtccaatgtgactctgatcacattgaactctgaagaggattaccctaatggcacctggctcggagatgagaacaatcctgagatgagggtgaggtgtgccattatccctagtgacatgctacatatatcaacaaactgcaggactgctgagaaaatggcactgacgcttttggattatctgtttcatagagaggtccaggctgtgtctaatctctccggtcagggaaaacacggaaagaaacaattggaccccttgaccatatacggtatccgctgtcacttgttctataaattcggaatcactgaatcggattggtatcgaatcaaacaatctattgattccaagtgtcggaccgcatggaggcggaagcagcgcggacagtccctggccgtaaagtccttttcgcgcaggaccccaaactcctcctcctattgcccttcagagccaatgatgagtactccgcccccagcctctgagctgccccagcctcagccacagccccaagctctccactacgctctcgcaaacgcacaacaggtccagatacatcagattggagaggatggacaggtgcaagtgggccacttgcacatcgcccaagtgcctcagggagagcaggtccaaatcacccaagacagcgaaggtaatctgcagatccatcacgtgggccaagacgggcaggtgctgcagggggcacagctgatagccgtggccagtagtgatcccgctgctgcgggggtggacggctcccccctgcaggggtctgacattcaggtccagtacgtgcagctcgcccctgtatctgaccacaccgcgggagcccagaccgctgaagcactccagcccaccctccagcccgaaatgcagcttgagcatggcgccatacagatacagtag

SEQ ID NO: 14180 - DNA, 753 bp, synthetic construct
  misc_feature 1..753: note = Description of Artificial Sequence: Synthetic coding sequence
  source 1..753: mol_type = other DNA
atggggtcacctgagcctactcagggaccccggctgtctcccatcctgatcccatacagcggcagacgctataaggtggggagagcttctggcgctctttgccaccaggactccctaccacccatattggagctgggactgactttcctaagagcgagtgctgggttttccgtgcctacaagctcctctttcgcattacctgaaccactccgtagcctctgcctcgggaacggcgagggcctcgggctgtctctgactctcaccgtcctggcctggatcctcggactgtctgggacactgggcgccttggtcctcttcatggtggcgaccgggatctttcaagaggccctctggcacctgctgctcctgtcattcagcgtcgaagcacttccctgctttttcttcttccctttttttctgctgtgtcgctgcctcagagcagagttacagattcagcaaagacttgatggcacactctcccttgaccttatgcgcctggaatcagacggagaaacaggttgtgcagctgagagttccgtgctacagggggcccaactgatagccgtagcttcttccgatcccgccgcggccggggttgatggttcgcccctgcaaggatcagacatccaggtgcagtatgtgcagctggcccctgtcagcgaccacacggctggcgcccagacagccgaggctctgcaacccacgctgcagcccgaaatgcagctcgagcacggcgctatccaaatccagtag

SEQ ID NO: 14181 - DNA, 1527 bp, synthetic construct
  misc_feature 1..1527: note = Description of Artificial Sequence: Synthetic coding sequence
  source 1..1527: mol_type = other DNA
atgatgtccgagcatgacttggcagacgtagttcagatcgccgtggaagatctgtccccagatcaccccgtagtgttagagaaccacgtcgttaccgacgaggacgagccggccctgaaaagacaaaggcttgagattaattgtcaggatccttctatcaaatcattcttgtactcgatcaatcagactatctgcctccggcttgattcgattgaggccaagttgcaggccctggaagccacatgcaaatctctggaggagaaactggacctggttaccaataaacagcacagtccgattcaagtgcccatggtggccggtagtccgctcggcgctacccagacctgcaataaggtgcgatgcgtggtgccacagacgaccgtgatcttgaacaatgatcggcaaaacgctattgtcgctaagatggaagaccccctttccaaccgcgctccagactcgctggagaatgtaatctccaacgccgtccctggccgacggcagaacacgatcgttgtcaaagtgcctggtcaagaggacagccaccacgaggacggtgaatctgggtcagaagcctcagacagcgtgtccagctgcgggcaggcaggcagtcaatcgattggcagtaacgtcaccttgatcactctgaacagtgaggaggattatcctaacggcacgtggctgggagatgaaaataaccccgagatgcgggttcgctgtgcgatcattccctctgatatgctccacatctccactaattgtcgcaccgctgaaaagatggctttgaccctgttagactacctgttccatcgtgaagtgcaggcagtctcaaatctgagcggccagggcaaacacggcaaaaaacagttagatccactaactatttacgggattcgatgtcatctgttctacaagttcgggattacggaaagcgactggtataggataaaacagagcatagatagcaaatgccggaccgcgtggcgccggaaacagcggggacagagtctggcagtgaaatcattttcccggcgaactccaaatagttcctcctactgtcccagcgaaccaatgatgtccacaccgccacccgcaagcgagttgccacagcctcagccacagccccaggccctgcactatgccctggccaacgctcaacaagtccaaattcaccagatcggtgaggatggccaggtgcaagtcatccctcagggccatctacacatcgctcaagtgccacagggagagcaagtgcagatcacccaggatagcgagggaaaccttcagattcatcacgtgggtcaggatggtcaagtattgcagggggctcaactcattgccgtcgcaagcagcgacccagccgcagccggagtcgacggtagcccactacagggatccgacattcaggtacagtacgtccagttggcacctgtgtcggaccacactgccggagcccagactgccgaagcacttcagccaaccctgcagccggaaatgcagctggaacacggcgctatccagatccaatag

SEQ ID NO: 14182 - DNA, 1476 bp, synthetic construct
  misc_feature 1..1476: note = Description of Artificial Sequence: Synthetic coding sequence
  source 1..1476: mol_type = other DNA
atgatgtcagaacatgatttggctgacgtggtgcagatagcagtggaagacttatctcctgatcatccagtcgtgttggaaaatcacgtggtgactgatgaggatgagccggcccttaagaggcagagattggaaattaactgccaggacccatcaattaaatcctttctctattctatcaatcagacaatctgtctgagactggactctatcgaagcaaaattacaggccctcgaagccacttgtaaaagcctggaggagaagttggacctggtgactaataaacagcactcaccgatccaagtgccgatggttgctgggagtccactgggcgcaactcagacctgtaataaagtgcgttgcgctgtccccggccgtcggcagaacactatcgtggtcaaagtgcccgggcaagaagactcccatcacgaggacggagaatccgggtcagaagcaagcgatagtgtctcaagctgcggccaagcaggctcacagtcaatcggaagcaatgtgacactaatcacgctcaattccgaggaagattacccaaatggcacatggctcggggatgaaaataatcctgagatgcgagtgaggtgcgcaattattccatccgacatgctccatatctctaccaattgcagaacggccgaaaagatggcactgacactgttagactatctgttccaccgggaggtccaagccgtgtctaacctgagtggacagggaaaacatggtaaaaagcagctggaccccctgactatctacggcatccgttgccacctgttctacaaatttggtattactgagtctgactggtaccgcatcaaacagagtattgactctaaatgtcgaacagcatggcggcggaagcaaaggggccagtctttggccgttaaaagcttcagtcgtcggactccaaactctagtagctattgccccagcgaacccatgatgtcaacacccccccctgcctcagagttaccacagccacaaccccagccgcaggctcttcactatgccctcgctaacgcacaacaagtgcagatccatcaaatcggcgaagacggccaggtgcaggtgatccctcagggccaccttcacatcgcccaggttccccaaggcgaacaagtccagattacccaagactctgaaggcaatcttcaaatccaccatgtgggccaagatggccaactactcgaggccacacgcatcccttgcctgcttgccccatctgtgtttaaagcatcttccggacaggtgctacagggggcccagctcatcgctgtcgccagcagcgaccccgctgctgccggtgtggacgggtcacctctccagggctccgatatacaagtacagtatgtgcagctggctcccgtgagcgaccatacagcaggggcgcagaccgcggaggcattacagcctacactgcagccagagatgcaacttgagcacggggctattcagattcaatag

SEQ ID NO: 14183 - DNA, 3153 bp, synthetic construct
  misc_feature 1..3153: note = Description of Artificial Sequence: Synthetic coding sequence
  source 1..3153: mol_type = other DNA
atggcagctgtgaagaaagaggggggggctcttagcgaggcgatgagcctggaaggagatgaatgggaactctcaaaagagaacgtacagccattgcggcagggtcggatcatgtctaccctgcaaggcgctctcgcccaagagtcagcatgtaacaacactttgcagcagcaaaaaagggcattcgaatacgagattcggttttacaccggaaacgatcctctcgacgtgtgggataggtacatcagctggactgagcaaaactatcctcagggtggaaaggagagcaacatgagcaccctcctggagcgggcagtcgaagccctgcagggagaaaagcgatattattcagatcccagattcctgaatctgtggctaaaattggggagactttgtaacgaaccactggacatgtattcctatctgcacaaccagggcattggtgtctctctggctcagttctacatatcatgggcagaggaatacgaggcgcgcgagaatttcagaaaggcagatgccatctttcaggaagggatccagcagaaggccgagccattggagaggcttcagtcccagcaccgtcagtttcaggctcgagtatctcgccagactctgcttgcactggaaaaagaagaagaagaggaggtgtttgaaagcagcgtgccccagaggagcaccctggctgagctaaagagcaaagggaaaaaaacagcacgtgcgccaataatccgtgtgggtggggcattaaaggcccctagtcagaatcgtggattgcagaacccgttcccccagcagatgcaaaacaacagcaggattacagtctttgacgagaacgccgatgaagcctccacagccgagctgagcaagccaacagtgcagccctggatagcacctcccatgcctcgggccaaagaaaatgagctgcaggcgggtccctggaatacagggcgctctctggaacataggccgcgtggcaacacagcatccttaatagccgtgccagctgtcctcccttccttcaccccttatgttgaggaaaccgcacggcaacccgttatgactccctgcaaaattgagccaagcattaaccacatcctttccacacgcaagcccggaaaggaagagggcgaccctctgcagcgagtgcagagtcaccagcaagcttcggaggaaaaaaaggaaaagatgatgtactgcaaagagaagatttacgccggtgtgggagagttttcatttgaggaaatcagggccgaggtcttcaggaagaagctaaaggaacagagggaggccgagctgctgactagcgctgagaagcgagcagagatgcagaagcagattgaagaaatggaaaaaaaacttaaggagatccagactacgcagcaagaacgaacaggagaccagcaggaagaaactatgccaactaaagagaccactaagctgcagattgcttcggagagtcagaagattcctggcatgacactgagtagtagcgtatgtcaagtgaactgctgcgctcgcgaaacctcccttgccgagaacatttggcaggaacagccccacagtaagggcccatccgtgccattttccattttcgacgaattcctactgagcgagaagaagaacaaaagcccaccggcagacccacctcgcgtgcttgcccagagaaggcctctcgcagtcctaaagacctcagaaagcatcacctcgaatgaggacgtaagtccagatgtttgtgatgaattcacgggcattgaacccttatcagaagacgccattataacaggattccgtaatgttactatttgccccaatcctgaggatacttgtgatttcgctagagctgcaagatttgtgagtacccccttccacgaaattatgagccttaaggatcttccatccgatcctgagcgcctgctgccagaggaggaccttgacgttaagacatccgaggatcagcagacggcttgtggaacaatttatagccagactctatctatcaagaagctttcaccaatcatcgaggacagccgtgaggcaacacattctagcgggttctccggtagcagtgcttcagtagcttctacatcaagcatcaagtgtctgcagatcccagagaagctagaactaacgaatgagacaagcgaaaatcctacacaaagcccatggtgttctcagtacaggaggcagttgcttaaaagcctacccgagctctccgcaagtgcagaattatgcatagaggaccgccctatgcccaaactagagattgaaaaggagattgaattaggaaatgaggactattgtatcaagagggagtacttgatttgcgaggattacaaacttttctgggtggcaccgcgcaattccgccgaactcactgtcatcaaagtgagctctcagcctgtgccctgggacttctatattaaccttaagttgaaagagcgcctcaatgaggattttgaccatttttgctcctgctatcagtaccaggatgggtgtatcgtatggcaccaatatataaattgcttcactctgcaagacctgttacagcatagtgagtacattacacatgagattacagtgctgattatctataacctgctgaccatcgtcgaaatgcttcacaaggctgagatagttcatggagatcttagtccaaggtgcctgatcttaagaaacaggattcatgatccttacgactgcaataagaataaccaggccctgaaaattgtggatttctcatacagcgtcgatctccgcgtgcaactggatgtgttcacactcagcggctttagaacagttcagatactggagggccagaagatcttggctaactgctcaagtccctaccaggtggacctcttcggcatagctgacctggcgcatctcctgttgttcaaagagcatttacaggtgttttgggacggaagcttctggaagctatcccagaacatttctgaactcaaggacggcgaactctggaacaagtttttcgttcggatcctgaatgcaaatgatgaagcaacagtaagcgttttaggggagctggctgctgaaatgaacggagtctttgataccacattccagtcacatctgaataaagcgctatggaaagttggcaagctaacctcacccggtgcattgctatttcagtag

SEQ ID NO: 14184 - DNA, 3195 bp, synthetic construct
  misc_feature 1..3195: note = Description of Artificial Sequence: Synthetic coding sequence
  source 1..3195: mol_type = other DNA
atggccgctgtcaaaaaggagggaggcgcactgtccgaagccatgtccctggagggcgatgagtgggagctcagcaaggaaaacgttcaaccacttcggcagggtaggatcatgtctaccctccagggtgctctagctcaagagtcggcctgtaacaatactctgcagcagcagaaacgggcattcgagtacgagatccgcttctatactggcaacgaccctctggatgtatgggacaggtgggtgtttctgtttcacaaggataacagaaatatcaaccgttatatctcatggacagagcagaattatcctcagggcggcaaggagtccaacatgagcactctgcttgagagggccgtcgaggctcttcagggtgagaagcggtactattccgaccctagattcctgaacttgtggctgaagcttggccgtctgtgcaacgaacctctggacatgtactcctatctgcacaaccagggaatcggggtctcgctcgcccaattctatatcagctgggcagaagagtacgaggcgcgcgaaaattttcggaaggcagatgccattttccaggaaggaattcagcagaaagctgaacccttggaacggttgcagagccaacaccggcagttccaagccagagtttcaagacagactctcctggcactggagaaggaagaagaggaggaagtttttgagtctagcgtgccacaacggagtactctcgccgagttgaaatcaaaagggaagaagacggctcgcgcaccgattataagagtaggaggtgccctcaaggctccaagccagaatcgcgggctccagaatcccttcccccaacagatgcagaacaatagcaggatcacagtgttcgacgagaacgccgacgaggcgtccactgctgagttgtctaagcctaccgtacagccctggatcgccccaccaatgcctcgggccaaagaaaatgagttgcaggctggaccatggaatacagggagatccctggagcacaggcccaggggaaatacggctagtctgatcgccgtgcctgccgtgctcccgtctttcactccttacgtcgaggaaacagcccgacagccagtcatgactccttgtaagattgaaccctctataaaccacattctgagtacccgaaagcctggcaaggaagagggtgatccgctgcaacgcgtacaaagtcatcaacaggcttccgaggagaaaaaggagaagatgatgtattgcaaagagaagatctacgccggtgttggagaattctccttcgaggaaattcgagcagaagtgtttcgaaaaaagttaaaggagcaacgcgaagcggagctactgaccagcgccgagaaacgagcagaaatgcagaagcaaatcgaagagatggaaaaaaaactgaaagaaatccagaccacgcagcaggagcggacaggcgaccagcaggaagaaactatgccaaccaaggaaacaacgaagttgcagatcgcttccgagagtcaaaaaatccccggcatgacattatctagttcggtttgtcaagtgaattgctgcgctagggagaccagccttgcagagaatatttggcaggagcagccccactctaaaggcccttccgtgccattcagcattttcgacgagttcttacttagcgagaagaagaacaagtcaccaccggcagatcccccacgcgtcctagcccagcgccgccctcttgcagtgcttaaaacaagtgagagtatcaccagtaatgaggacgtatcgcccgatgtatgcgacgagtttacagggatcgaaccgctgtcagaggacgccatcatcaccggattccgaaacgtgaccatttgtcccaacccggaagatacatgcgactttgcgagagcagctcgctttgtaagtactcccttccacgagattatgtctcttaaagatttgccatccgacccagaaaggttgctccctgaggaggatcttgacgtcaagaccagcgaggatcagcagacagcttgcggcaccatttacagccaaacgctttcaataaaaaaactcagtccaattattgaggactccagggaggcgactcacagtagtggattctccggctcatcagccagtgttgcatcaacatcctccattaagtgcttgcagatccctgaaaagttggagctcaccaatgagacatctgaaaatcccacacagtctccctggtgctctcagtacagaagacagctgctcaaatctttgccagagctatcagcttctgcagaactgtgcatcgaggaccgaccaatgcctaagctggaaattgagaaggagatagaattagggaacgaggattattgcatcaagagggaatacctgatctgcgaggattataagctcttctgggtcgccccgcgcaacagcgccgaacttactgtgataaaggtttcatcccagccagtgccttgggatttctatattaacctgaagctgaaagagagacttaacgaagacttcgatcacttttgttcttgttaccaataccaggacggatgtatagtgtggcaccagtatatcaactgttttacgttgcaagatctgttgcaacactccgagtatataactcacgaaattaccgtgctgattatttacaacttactgacaatagttgaaatgctgcataaggccgagatagtgcacggcgacctttcgccccgctgcttgatcctgcgcaacagaattcacgacccttacgactgcaacaagaacaaccaggcactgaaaatagtggactttagttactccgttgatctcagagtgcagctcgatgtgttcactctcagcggcttccgcactgtccagatcctggaaggccagaaaatcttagccaactgcagtagcccttaccaggtggatttgtttggaattgctgacctggcccacctgcttctcttcaaagagcacctccaggtgttttgggacggctcattctggaagctatcccaaaacatctccgagctgaaggacggcgaactgtggaacaaattcttcgttcgtatcctcaacgccaatgacgaggccacagtttccgttttgggagagctcgccgcagaaatgaacggggtgttcgatacaacctttcagtctcacctcaataaggcattatggaaggttggcaagctgacttcccctggtgccctgctgttccaatag

SEQ ID NO: 14185 - DNA, 2802 bp, synthetic construct
  misc_feature 1..2802: note = Description of Artificial Sequence: Synthetic coding sequence
  source 1..2802: mol_type = other DNA
atggccgcagtgaagaaagaaggtggtgccctttcagaggccatgagcctggaaggtgatgagtgggagctgagcaaggagaacgttcagccactgcgtcaggggcgaattatgagcacacttcagggagccttagcccaggaatctgcatgcaataacacactgcaacagcagaagagggcctttgagtacgaaatccgcttttacacagggaacgaccctctggatgtttgggaccgatacatctcatggacagagcagaactaccctcaggggggcaaagaaagcaacatgagcactctgctcgaaagggctgtggaggctctgcagggtgaaaacttctggaaggctgacgccatatttcaagaaggcatccagcagaaagccgagcccctcgagaggcttcagagtcagcatcggcaatttcaggccagggtcagccgccaaaccctcctcgccctcgaaaaggaggaagaggaggaggttttcgagtccagtgtccctcaacgatccacactggcagagctcaagtccaaaggcaagaagaccgcaagggcccctatcatccgcgttggaggagccctcaaagcaccatcacaaaatcgcgggctgcagaacccctttccccagcagatgcaaaataactcgaggatcaccgtgtttgatgagaacgccgatgaagcgtctactgcagagctaagtaaacccactgtgcagccatggattgccccccccatgcctcgtgccaaagagaatgaactgcaggccggaccgtggaataccggcagaagcttagagcacagaccgcgcgggaacaccgcgagtctcattgctgtacctgctgtgctcccgtctttcaccccttacgtggaagagaccgctcggcaacccgtcatgaccccctgcaagattgagccaagcatcaaccacattctgtcaactcgcaaacctggcaaggaggagggggatcctctccagagggtgcagtcccaccagcaggccagtgaagagaaaaaggagaagatgatgtattgcaaggaaaagatttacgcaggagttggagagttttcgttcgaggagattcgggccgaagtatttaggaagaagttgaaggaacagagagaggctgagttgcttacatcggcagagaagcgggctgagatgcagaaacaaattgaggagatggagaaaaagcttaaggaaattcagaccacacaacaggagaggactggcgaccagcaggaggagacgatgcctacaaaagaaaccactaaattacaaattgccagtgagtctcagaagatacccggaatgactttgagctccagcgtttgccaggtgaattgctgcgcccgcgagacaagtcttgccgagaacatctggcaggaacagcctcactccaaggtgtcactttcactcggcccctcagtcccattcagcattttcgacgagtttttgctgagcgagaagaagaacaagtctcctcctgccgatccgccacgggtcttagcccagcggcggcccctggccgtgctgaaaacctctgagtctataacctctaatgaagacgtgagtcccgacgtgtgcgatgagtttactggcatcgagccgctttcagaagacgccatcattactggattcaggaacgtaaccatatgtcccaatcctgaagatacacgcgaggctacacacagtagtggctttagtggttccagtgcctctgttgccagtacatcgagcatcaaatgtctgcaaattccagaaaaactcgaactgaccaacgagacatctgaaaaccccacccagtcaccctggtgttcacagtaccggaggcagctcctgaagtctctccctgagttaagcgcctcagctgagctgtgcatcgaagatcgacccatgccaaaactcgagatcgagaaggagatcgagttaggaaacgaggactactgcatcaagagagaatatctgatctgcgaggattataagctgttctgggtagcccccagaaacagtgccgagctgaccgtcattaaagtgtcttcccagcctgtcccctgggacttttacattaatcttaagctcaaggaacgcttgaacgaggacttcgatcatttctgttcctgttatcagtaccaagacggatgcatcgtgtggcaccaatatatcaattgtttcacactgcaggatctcctgcagcactctgagtacatcacccatgagatcaccgtcctgattatctataacctgctgactatcgtggaaatgctacacaaggctgaaatcgtgcacggggacctgtccccgcgatgtctcatcctaagaaaccggatccacgatccctacgactgtaataagaataatcaagccctgaagatagtagacttttcctatagtgttgacctccgggttcagctggacgtctttacactttcaggattccgcacagtgcagatacttgagggacagaagattttagctaactgttccagtccctaccaagtggatttatttggaatagccgatttagcacatctgttgctgtttaaggagcacctccaggtcttttgggatggtagcttctggaaactttctcaaaatatttccgagctgaaagacggggagctatggaacaagttcttcgttaggatcttgaatgcaaacgatgaagctactgtgtctgtgctcggcgagctggccgcggagatgaatggcgtgtttgacacgacatttcagagccatctgaataaagctttgtggaaagttggaaagcttacaagtcctggcgccctcctctttcaatag

SEQ ID NO: 14186 - DNA, 3393 bp, synthetic construct
  misc_feature 1..3393: note = Description of Artificial Sequence: Synthetic coding sequence
  source 1..3393: mol_type = other DNA
atgctcgagatctgcctgaagcttgtgggctgcaaaagtaagaaaggtctgagcagttcttcaagttgttaccttgaagaagccctccaaagaccagtggcaagtgacttcgagcctcaagggctgtccgaagcggcaagatggaacagtaaagaaaatctgctggccgggccctcagaaaacgacccgaatctgttcgttgctctctatgacttcgtggccagtggcgacaataccctgtcgattactaagggagaaaagctgagggttctgggatacaatcacaacggggaatggtgtgaggctcagaccaagaatggacaggggtgggtgccctccaattatatcaccccagtcaactcgttggaaaaacactcctggtaccatggacccgttagcaggaacgctgccgagtacctcttatcatccgggatcaacggctcattccttgtgcgcgaatccgaatcttcccctggccaacgctccatcagtcttagatatgaggggcgggtatatcattataggatcaacaccgcctccgatggcaagttatacgtcagttcagaaagcaggtttaacaccctggccgaactggttcatcatcacagtaccgtagcagacggcttgataactactctacactatcctgcccctaagcgtaataagccgaccgtgtatggtgtaagcccaaactacgacaagtgggagatggaacgaaccgatatcacgatgaagcacaagctaggggggggacagtacggtgaggtgtatgaaggtgtgtggaaaaaatactcactgaccgtggcggtcaaaaccttaaaagaagacactatggaagtcgaagagtttttgaaggaggccgccgtgatgaaagagatcaaacatccaaatctagtgcagttattgggcgtctgcacccgcgagccccctttttatataatcactgaatttatgacatatgggaatttattagactacctgagagagtgcaatcggcaagaggtcaacgcggtggttctcctgtacatggccacccagatttcatccgctatggagtatctagagaagaaaaatttcatacatagagacctggctgccaggaattgcctggtcggcgagaaccatcttgtgaaagtcgccgacttcggtctgtcacgtcttatgactggcgatacatataccgcgcacgccggagcaaagttcccaattaagtggaccgcccccgagtcactggcttacaacaaatttagcatcaagtcagatgtgtgggcctttggagtcctgttgtgggaaatcgcaacatacgggatgtcaccttaccccgggatcgacctgtctcaggtctatgagctgctcgagaaggattaccggatggagcgtcccgaaggatgtcctgagaaggtgtatgagctaatgagggcctgctggcaatggaacccctctgaccgaccttcctttgccgaaatccatcaggctttcgagactatgttccaggagtcttcaatcagcgatgaggtggagaaggagttgggcaagcagggggtgcggggcgccgtgtcaaccctgctgcaagcacccgagctccctacgaagactcgaacctctcgacgggctgccgagcaccgagatacgaccgatgtgcccgagatgccccatagcaaaggccaaggggagagcgaccccctggaccatgagccagctgtctccccgctacttcccaggaaagaaaggggcccaccagagggaggtcttaacgaagatgaacggctgcttcctaaagataaaaaaacaaacctgttttctgcactgatcaagaaaaaaaaaaagaccgctcccacgcctccgaaacgctccagtagctttcgagagatggacggccagccagaacggcgaggagcgggcgaagaggagggtcgcgacatctctaacggagcactggctttcacgcccctggatactgccgacccagccaagtcccccaagccgtcaaacggtgcgggggtgcctaatggtgccctaagggaatcggggggcagtggattccgtagccctcacctgtggaagaagtcctcaaccctgacatcttctcgccttgctacaggtgaagaggaaggcggcgggtccagttccaagcgcttcctcagaagttgctccgcatcttgcgttccgcacggcgccaaggacactgagtggcggtccgtgacgctccctcgggacctgcaatcaactggccggcaatttgattcgtctacttttgggggtcataaatccgagaaacctgcccttccgagaaagcgggccggcgagaatcgcagcgatcaggtgactcgcgggactgtgaccccccctccaagattggtgaagaaaaacgaggaagccgccgacgaggttttcaaagatataatggaaagctctcccggcagcagcccacccaacctgacgccaaagccgctgcggagacaggtcactgtcgccccagcctcaggtcttccccacaaggaagaggctgggaaaggttccgccctggggacacccgccgcggcagagccagttacccccactagcaaagctggctctggggctcccggaggcacctcaaagggcccagcagaggagagtagggtgcgtcgccacaagcacagcagtgagagtcctggaagggataaggggaaactatcacgcctcaaaccagctccacctccaccaccagccgccagcgcaggcaaagctggcgggaaaccctcccagagtcccagccaggaagccgctggtgaggcagtcttgggagcaaaaacaaaggccacttccctggttgatgctgtaaacagcgacgccgccaagccttcacagcctggagaaggcctgaagaaacccgttctgcccgcaacccccaaaccccagagcgcaaagccatcagggactccgatatcgcccgcccccgtgcccagcacactcccgagcgcatcatccgcgctcgccggagaccaaccatcctctaccgcgttcatacctctgatttctaccagagtctctttgagaaagacacgacagccacccgagcgtatagcatccggtgccattacgaagggcgttgtccttgatagcacagaagccttatgtttggctataagccggaactctgagcagatggcttctcatagtgcagttctggaggcgggcaagaatctgtacaccttttgtgtctcatatgtcgactccatccaacaaatgagaaataaatttgcctttcgggaggccatcaacaaactggagaacaacttgcgagagttacagatctgtcccgctacagcagggagcggtccggcggcaacacaggatttctcaaaactcctgagctccgtgaaagaaatcagcgacattgtgcagcgctag

SEQ ID NO: 14187 - DNA, 3450 bp, synthetic construct
  misc_feature 1..3450: note = Description of Artificial Sequence: Synthetic coding sequence
  source 1..3450: mol_type = other DNA
atgggacagcagcctgggaaggtgctgggggatcagcgcaggccctcgctgccagctctccatttcatcaagggagcaggcaaaaaggagagctctcgccacggtggtcctcattgtaacgtctttgtggaacatgaagctttgcaacgcccggtggcttccgatttcgaaccccagggtctgtcagaagccgctaggtggaactcaaaagagaacctcctggcaggcccttctgaaaacgaccccaatctgttcgtcgctttgtacgacttcgtcgcgtctggggacaacaccctgtcaataactaaaggcgagaagttgcgagtgctggggtataaccataacggggaatggtgcgaggcccagactaagaatgggcagggctgggtgccatccaattatatcactccagtgaactcccttgaaaagcactcttggtatcacggtcctgtgagccggaacgcggcagagtacctcctatcatctggcataaatgggtctttcttggtccgtgaatcggagtccagtcccggtcagaggtccattagcctgcgctacgaggggagagtttatcattatcggatcaacaccgcatctgacggtaagctgtatgtaagctctgaatctcggtttaatactcttgcagaactagtgcaccatcattcaaccgtggcagacggactgatcacaactctacattatcccgcccccaagcgaaacaaaccaacggtgtacggtgtgtctcctaattatgacaaatgggagatggagcgaactgacataactatgaagcataagcttggaggaggacagtacggtgaggtgtacgaaggcgtttggaagaaatattctctgacggtcgctgttaagaccttaaaagaggatacgatggaagtcgaggagttcctgaaggaggccgcagtaatgaaggaaatcaagcaccccaacttggtccagcttctgggtgtatgcactcgggaacctcccttttacattattaccgagttcatgacctacgggaacctgcttgactatctgagggaatgcaacagacaggaagtcaatgccgtggtcctgctatacatggccacacagatctctagcgccatggaatatttggagaagaaaaactttatccatagggaccttgccgctcggaattgcctagtaggtgaaaatcacctggtaaaagtggctgatttcgggctgtcccgactgatgacaggcgatacttatactgcacatgcgggagcaaaattcccaatcaagtggaccgctcccgaatcgctggcttataataagttttcaatcaagtctgatgtgtgggcctttggtgtgctgctgtgggagatagccacttacggaatgtccccatatccaggtattgacttgtcccaggtctacgaattactcgagaaagactatcggatggagcggcccgaaggctgcccagaaaaggtatacgagctcatgagggcctgctggcagtggaacccttcagaccgtccctcctttgctgagatccatcaggctttcgagacgatgtttcaagagagctccatctctgacgaggtagaaaaggagttaggcaagcaaggggtacggggagcagtttctactctgctccaggctccggagcttcctacaaagacccgcacctctcgtcgcgctgcagaacatcgcgataccacagatgtccccgaaatgccgcactctaaagggcagggcgaaagcgaccccctggaccatgagcctgccgtctccccactgctgccgagaaaggaaaggggacctcctgagggtggcctcaacgaggatgaacgtttactgcctaaggataagaagactaatctgttttccgctctgattaagaagaagaaaaagaccgcaccgacccccccaaaacgctccagcagtttccgagagatggacggacaaccagagaggcggggtgctggcgaggaagagggtcgggacatttctaatggcgcgctggcctttactcctcttgataccgcggaccccgctaagagtccgaagccttccaacggcgctggagtccccaatggagcattgagagaatccggcggtagtgggtttagaagtccccatttgtggaagaagtcctcaacactgacgtcgtctagactggccaccggtgaagaagagggaggggggtcttcctccaagcggttcttgcgcagctgcagtgctagttgtgtccctcatggcgccaaagacacagagtggaggtccgtgactttacccagagacctccaatctaccggtagacaattcgactctagtacatttggagggcacaagtccgagaagcccgcactcccgagaaagcgggctggagagaaccgcagcgatcaagtgacgagggggactgtgacgccgccaccgaggctggtcaagaaaaatgaggaggcagctgatgaggttttcaaggacatcatggagtcttcaccaggatctagcccacccaatctgactcctaaaccacttcgacgtcaggtgacagttgcccctgcatcgggcttgccccataaggaagaagccggaaagggatccgcactaggaaccccggccgcggctgagcctgtgacaccaacatctaaggccggctctggagcacctggcggaactagcaaggggccagccgaggagtcccgggtacgtagacataagcacagtagcgagagcccaggacgagataaggggaagctgagtagacttaagcctgccccacctcccccacccgcggccagtgcaggtaaggctggcggtaaaccttcgcagagcccaagtcaagaggccgccggagaagcggttctgggggccaaaactaaggccacaagtctggtcgatgcagtaaactctgacgccgccaaaccttcacaacctggagaaggattgaagaaacccgttctccccgccacacccaagccacagagcgccaaacctagtggaacccctatctcccctgctcctgttccttcaaccttaccttccgcatcctctgccctcgccggagatcaaccaagcagtacagcgtttatcccccttatatccacccgcgtgtccctgcgtaaaactcgccagccacctgagcgtatagcgtcaggcgccattaccaagggagtggtgcttgacagcaccgaggccttgtgcctcgccatttctaggaattctgagcagatggcttctcactctgctgttttggaggctggtaaaaacttgtacacattctgcgtgagctatgttgattccatccagcagatgaggaacaagtttgctttccgggaggcaatcaataagctggagaacaatctcagggaactgcagatttgtccggccacagcaggctctgggccagctgccactcaggacttttctaaacttttgtccagtgtcaaggagatctccgacattgtgcagagatag

SEQ ID NO: 14188 - DNA, 195 bp, synthetic construct
  misc_feature 1..195: note = Description of Artificial Sequence: Synthetic coding sequence
  source 1..195: mol_type = other DNA
atgggtcagcaacccggaaaggttcttggtgatcaaaggaggccctctctccctgctctccactttatcaaaggagcaggaaagaaagagtcttcccgccacggtggcccccattgcaatgttttcgtggaacaggccctccagcgcccagtcgcctccgactttgaaccccagggattatcagaagctgcttag

SEQ ID NO: 14189 - DNA, 486 bp, synthetic construct
  misc_feature 1..486: note = Description of Artificial Sequence: Synthetic coding sequence
  source 1..486: mol_type = other DNA
ggtcgccccgggcgcagtagagctcggggaggcggagaaggtggatggagaggtggcggtagagctggacgcgccgggccggagcccggccccagagctggtagaggagttcccgcccctgactgttggcgaggtaagatgctggagatttgtctgaaattagtcggctgcaagtcgaagaagggcttgtcctcttcgtcaagctgctatctggaggaagcacttcagcggcctgtggcaagtgattttgagcctcaggggctttccgaggccgctcgatggaacagcaaggagaacctgctggcgggaccctccgaaaacgaccctaacctttttgtcgctctctacgactttgtcgccagtggcgacaacacacttagcatcacgaagggagaaaagctgagggtcctgggctataatcacaacggagaatggtgtgaggcccagactaagaatggacagggttgggtacctagcaactactag

SEQ ID NO: 14190 - DNA, 2838 bp, synthetic construct
  misc_feature 1..2838: note = Description of Artificial Sequence: Synthetic coding sequence
  source 1..2838: mol_type = other DNA
ttacgcctcctgcgggagcctttacagcatccaggacgcgtaggctcttcatctttcaacggcgggcggcgggcccatcatcatgcacccctgtcctctcccaaggctcaacaggcccattgtttatggtgcgtgccccaactgagacaggtgggtgacggaacccatggtcaccaccacgaggcccagggggggggccaatatggcgaggtgtacgaaggcgtctggaagaagtattcactcactgtcgcagttaaaaccttaaaggaggatacgatggaagtggaagaattcctgaaggaggcagccgtgatgaaagaaattaagcatcccaacttggtccagcttctcggcgtctgcacacgcgagcctcctttctacattatcaccgagtttatgacatatggtaatttgctcgattatctaagggaatgtaatagacaggaagttaatgccgtcgtgctcttgtacatggctacacaaattagcagcgctatggaatacctcgagaaaaagaattttattcacagggatttagcggcccgcaactgcctcgttggcgagaaccatttggtcaaagtagccgacttcggcttgtcaaggctgatgaccggtgatacttataccgcccacgcaggcgcaaaattcccaataaagtggactgctccagagagcctggcttacaacaaattcagtataaaatcagatgtgtgggccttcggcgtcttactgtgggagattgcaacatacggcatgagcccctacccaggcattgacctttcccaggtctacgagctccttgagaaagactacagaatggagaggcccgaaggttgccccgagaaggtgtatgaactgatgcgggcctgttggcaatggaacccttccgacagacctagtttcgccgaaattcaccaggcctttgagaccatgtttcaagaatcatccattagcgacgaggttgagaaggagctcggaaagcagggggtgcggggcgccgtgagcacactgctgcaggcccctgaactacccacgaagacaaggacatcaagacgggccgcagaacacagggacactaccgatgtgccagagatgcctcatagcaaaggacagggggagtccgatcccctcgaccacgagcccgctgttagtcccttgctgcctagaaaggagagaggtccccctgaaggtggtcttaacgaagacgagagattacttcctaaggacaagaaaacgaaccttttcagtgcccttatcaagaaaaaaaagaaaaccgccccaacaccacctaaaaggagtagcagttttcgcgagatggacggccagcctgagcgacgcggtgccggcgaggaggaagggcgcgatatatcaaatggagctctggcatttacccctttggacactgctgaccccgcaaaatccccaaagccaagcaatggagccggtgtgcctaacggggcgttgcgcgaatccgggggctcgggcttcaggtcacctcatctatggaagaagagctccacattgaccagtagtcgactggcaaccggcgaggaggaagggggaggttcttccagcaagcggttcctccggtcttgtagcgcctcttgcgtcccacacggagctaaggacacagagtggcgctctgtcaccctgcccagagatctgcagagcaccggacgccagtttgactcttctacctttggtggacacaaatcggagaaacccgctctgcccagaaaacgggccggggagaatcgtagtgatcaggtgactagaggcacagtgacgccacctcccagacttgtcaagaaaaacgaagaggccgcagacgaggtgttcaaagatatcatggagtcctcacctggttctagcccccctaatttaacacccaagcctctccgccggcaggttaccgtcgctccggcctctggtcttccgcacaaagaagaggcgggaaagggcagcgcccttggcacaccagctgccgccgaacccgttacccccaccagtaaggcggggagtggcgcacctggtggcacttccaaaggcccagcagaggagtctcgggtccgacggcacaagcactcgagcgagtcacctggtcgcgacaaagggaagctcagccggctgaaaccagcaccaccccctccccccgcagcatcagccggaaaggcaggtgggaagcctagtcaaagtccctcccaggaagctgccggagaggccgtgttgggggctaagactaaggccacgtctttggtagacgcagtgaatagcgacgcagctaaaccatctcagccaggggagggccttaagaagcctgttctccctgcaacaccgaagccacagtcggcaaagccttccggcaccccaatcagtccagcacctgttccatctacgctaccctcggctagttcagcattggctggggatcaaccaagctctactgccttcattccgctcatatctaccagggtgtctctgagaaaaacgagacagccacctgagcgaattgcctccggcgcaatcactaaaggcgtggtcctggatagcactgaggctctgtgcctcgcaatatctagaaatagtgaacaaatggcatctcattcagccgtgctggaggctggaaagaatctttatacgttctgcgtgagctacgtggattctatccagcaaatgagaaataaatttgctttccgcgaagcaatcaacaaattggaaaataatttgcgggaattgcaaatctgtccagccaccgccggatctggccccgcggctacccaggatttctctaagctgttgagttctgtgaaggagattagcgatatcgttcaacgctag

SEQ ID NO: 14191 - DNA, 2649 bp, synthetic construct
  misc_feature 1..2649: note = Description of Artificial Sequence: Synthetic coding sequence
  source 1..2649: mol_type = other DNA
atgggcccctggagtcggtctctatccgcccttctgctcttattacaggtgtcgtcatggctctgccaggaacctgagccttgtcaccccgggtttgatgctgagtcatacacatttactgttcccaggaggcacctcgagcgggggagggtgctgggacgtgtgaatttcgaggattgcacgggtcgccagagaactgcgtattttagtctcgacactcggttcaaggtaggtaccgacggagtcattaccgtgaaacgcccacttaggttccacaacccacagatccacttcctcgtctacgcatgggactcgacatacaggaagtttagtactaaggtaacactgaacaccgtgggtcatcaccatcgaccccctcctcaccaagcctctgtctcagggatccaagcggagctgctcacctttccaaatagtagccccggccttagacgccaaaaaagagattgggttatcccccctatctcatgccctgagaatgagaagggaccgttccccaaaaacttggtgcagatcaaaagtaacaaagataaagaagggaaagtgttctactcaataaccggtcagggggctgacaccccacccgtgggagttttcatcatcgagcgcgagaccgggtggctgaaggtgacggagcccctggatcgcgagagaatagctacgtacacactcttctcccatgctgtgtcgtccaacggaaatgctgtggaagacccaatggagatccttattactgtaaccgatcagaacgataataagcctgaatttacccaggaagtgtttaaggggtcagtgatggagggagcccttcccggtacaagtgttatggaggttacagctacagacgcagacgatgatgtaaatacctataatgccgccatagcatacacgatcctctcacaggatcctgaattgccagacaagaatatgtttactattaaccggaacaccggggttatctcggtggttactactggcttggaccgcgagtcatttcctacatacactctcgtggtgcaagccgcagatttacagggggagggcctaagcactacagcaacagccgtaatcaccgttactgacaccaacgacaaccctcccatcttcaatcccaccacttacaaggggcaggtgccagaaaacgaagccaacgtagtgatcactacacttaaggtgaccgacgcagacgctccaaacactccagcttgggaagcggtctacaccattctgaacgacgatggaggccagttcgtggttacaacaaatcctgttaacaacgatggaatattaaaaactgctaaagggctggatttcgaggcaaagcagcagtacatattacacgtggcagtgaccaatgtggtgccgttcgaggtgagcctgacgacctcaactgcaactgtgaccgttgacgtgttagatgttaacgaggctccaatcttcgtcccgccagagaagagggtggaagtctccgaggacttcggcgtgggccaggaaatcactagttacacagctcaggagcccgatacctttatggagcaaaagatcacctatagaatctggcgcgacaccgcaaactggttggagatcaatcctgatactggggccatttcaacccgcgcggagctggaccgcgaggacttcgagcatgtgaagaactcaacttacacagcattgattatcgccactgacaatggctctcccgtcgcaaccgggaccgggacactgctgttgattctctcagacgtcaatgataacgcccccattccagaacctcgtactatctttttttgtgaacgtaacccgaagccacaggtcatcaacattattgacgccgacctgccccctaataccagcccatttacggccgaactgactcacggggctagtgccaactggacgatacaatacaacgatcctactcaggaatccatcatcctaaaacccaaaatggctttggaggttggtgattataagatcaatttaaagttgatggacaatcagaacaaggaccaagtgaccactcttgaggtctctgtctgcgactgtgagggtgctgccggggtgtgcaggaaggcgcagccggtggaagccggactgcagatccccgctattttgggcatcctggggggaatcttagcgctgctcattttaatacttcttctgctgctgttcttgcgccgccgggcggttgtaaaagagccactcctgccgcctgaagacgatacccgcgataatgtctactattacgatgaagagggcggtggcgaggaagatcaggactttgatctatcccagctgcaccggggcctcgatgcacgccccgaggttacccgcaatgacgttgcacccactctgatgtccgtccctcggtacctccccagacctgccaatcccgacgagatcgggaacttcatagacgagaatctgaaggcggctgatacggaccccaccgcccccccttatgatagtctactggtgtttgactacgaaggaagtggctcggaggccgcatcgctgtcctccttaaacagctccgaatccgataaggaccaggattacgattacctgaatgaatggggtaatagatttaaaaaattggccgatatgtatggcggcggcgaggatgattag

SEQ ID NO: 14192 - DNA, 1944 bp, synthetic construct
  misc_feature 1..1944: note = Description of Artificial Sequence: Synthetic coding sequence
  source 1..1944: mol_type = other DNA
atgggcccatggtcaagatctctcagtgccttattgctgttgcttcaagttagctcttggctctgccaggagcctgaaccttgccatcctggattcgacgccgagagctacactttcactgttccccgcaggcatctggagagaggccgggtgttaggccgggtaaattttgaggattgcaccggacggcagcgaactgcctatttcagcctcgatacacggtttaaagtgggaacagatggagtgataaccgtgaaacgacctctgcgattccacaaccctcagatccattttttagtctatgcatgggattccacctaccggaaattctcgaccaaggtgaccctcaatacggtgggccaccaccatcggccacctccacatcaagcaagcgtgtccggaattcaagccgaactattaactttccctaatagctccccgggtctgcgaaggcagaaaagggactgggtgatccctccaatatcctgtccggaaaatgaaaagggtccgtttcctaaaaatcttgtccagataaagtccaataaagataaagagggaaaagttttctacagcataaccgggcagggcgcagatactcccccagtaggtgtatttatcattgaacgagagactggttggctaaaagtgacagaacctttggaccgagagaggatcgctacctatactttgttctcccatgctgtaagctcaaatgggaatgccgtggaggatcctatggaaatcctaattactgtgaccgaccagaacgacaataagcccgagtttacgcaggaagtgtttaagggaagcgtgatggaaggcgcactgcctggtacttcagtgatggaggtaacagcaacggacgctgatgatgatgtgaacacctataacgccgcaatcgcgtatacaatcctgtctcaagatcccgaactgcccgataagaatatgtttaccatcaacaggaatacaggtgtaatttctgtcgtgacaacgggtctggacagggaaagcttcccgacatacaccctcgtggtgcaggccgcagatctgcagggggaagggctgagcaccaccgccacagcagtgatcactgtaacagacaccaacgataaccctccaatatttaacccgaccacctataaaggccaagtaccagaaaatgaagccaacgttgtcatcacaactttaaaagtgacagacgccgatgctcccaatacacctgcgtgggaggccgtatataccatcctgaatgacgacgggggacagttcgtggttacgactaatcctgttaataatgatgggatcttgaagaccgccaaaggcttggactttgaggctaagcagcagtacatcctccacgtggctgttacaaatgtcgtgccatttgaggtgagtctgaccaccagtacggcaacagtgaccgtcgacgttcttgacgtcaatgaagctccaatcttcgtccccccagaaaagagagttgaggtgtcagaagactttggagtgggacaagagatcacgagctacaccgcccaggaacctgacacattcatggaacagaagatcacctacagaatttggcgggatacagcaaactggttggaaattaaccccgataccggagccattagtacgcgagccgaattggatagggaggacttcgagcacgtcaaaaacagcacttataccgcactgatcatcgccacagataacgggagcccagtggctaccggtactggcaccctgctgctgattctgagtgatgtcaatgacaatgcccccatacctgagcctcgcacaatcttcttttgcgaacggaatccaaagcctcaagtcatcaacattattgatgcggatttgccccctaacctcgctagccagtctattgggattacagatatgtcccactgtacttgccctgcaccgcagctgccagctattttctag

SEQ ID NO: 14193 - DNA, 2703 bp, synthetic construct
  misc_feature 1..2703: note = Description of Artificial Sequence: Synthetic coding sequence
  source 1..2703: mol_type = other DNA
atgggcccttggagtcgatccctgtccgctttgcttctcctgctgcaggtttcttcttggctgtgtcaggagccagagccctgccacccaggcttcgatgcagagagctacactttcacagtgcctcggaggcacctggagcgtgggcgggtactcgggcgtgtcaacttcgaagactgtaccggcagacaaagaacggcttatttctctctcgatactcgcttcaaggtgggcacagacggagtgatcaccgtgaagaggcctctcagattccacaatcctcaaatacattttctggtatacgcttgggattcaacctatcgaaaatttagcacaaaggtgactctcaatacagtgggtcatcaccaccggcctcccccccaccaggcctctgttagtggcatccaggctgagctgctgaccttccccaacagtagtccaggactccggagacagaaaagggactgggttatcccaccgatttcctgtccagaaaatgagaaaggtccattcccgaagaacctggtacagataaagagcaataaagataaagaggggaaggtgttctatagcattacaggacagggcgcagatactcctccagtgggagttttcatcattgagcgggaaactgggtggcttaaggttaccgaaccgcttgatcgcgagaggatagctacttatacccttttctcccatgctgttagctctaacggcaatgcagtagaggaccccatggagatcttgatcaccgtgaccgatcagaatgataataaacctgagtttacgcaggaagtctttaagggctccgtgatggaaggggccctgcccggaacaagcgtgatggaggtgacagctactgatgcagacgacgacgtgaatacctataatgcggcaatagcatacaccatactttcccaggatccagaactccccgataaaaatatgtttactatcaacaggaacacgggagtcataagtgtggtcacaacgggattagaccgggagagttttcccacatacacgttggttgttcaggctgccgaccttcaaggcgaaggattgagcaccacagcgactgcggttattaccgtaacagacacaaacgataacccgccaattttcaatccaactacctacaaaggccaggtcccagagaatgaggccaacgtggttatcaccaccctgaaagtgacggatgcagacgccccaaatacgcctgcatgggaggcggtttacactattctcaacgatgacggcgggcagttcgttgtaactactaatccagtgaataatgacggaatcttgaaaaccgccaaattggcacgttgtaggaactggcacccacactcgtgtagttacccatgtcctctcggactggacttcgaggcaaagcagcagtatatactccacgtggccgtaaccaatgtcgttccgttcgaggtgagcctgacaactagcaccgccaccgttacggtcgacgtgttagatgtgaacgaagcccccattttcgttcctccagagaagagagtggaggtgtcggaggacttcggagttggacaggaaattacctcctacacggctcaagaacctgatacattcatggagcagaaaattacatacagaatctggcgggacacagccaattggctggaaatcaacccagatacaggtgccatttcaacccgcgccgaactggatcgtgaagatttcgaacacgtgaagaactcgacttatacggcattgattatagccacggacaatggttcgcccgtcgctacgggaacaggtaccttgctcctcattctgagcgatgtcaatgataatgcccccatcccagagccccggactatttttttttgcgagagaaatccaaaaccacaggtgatcaacataattgacgccgatttgccccctaatacctctcctttcaccgccgaactcacccacggggcctcagcaaactggacgatccaatacaacgacccaacccaggagagcatcattctaaaaccaaaaatggccctggaggtgggtgattataaaataaatctcaagttgatggataatcagaataaggaccaggtgaccacattagaagtgagcgtgtgcgactgtgagggcgcagccggcgtctgccggaaggcccagcccgtggaagcgggtctgcaaattcccgccatcctgggaatactgggtgggatactcgccctgctgatcctcatactgctgctgctcctctttctgagacgaagggctgtggtcaaggaaccacttctgccgcccgaagacgacactcgcgataatgtgtattactatgacgaggaggggggtggtgaggaggatcaggacttcgacctgtcacagctgcatcgcgggctagatgctagaccagaagtgacgagaaatgacgtggctccaactttgatgtctgtcccgcggtaccttcctcgtccagcgaatcccgacgagatcggcaactttattgatgagaatctcaaggcagcagatacagatccaacagctccaccgtatgattctctgctcgtgttcgactacgaaggctctggaagtgaggctgcttccctctcctcgttaaactcctcagagtcagacaaagatcaggactacgattatctgaatgaatggggaaacaggttcaaaaagctggcagacatgtacggggggggcgaagatgactag

SEQ ID NO: 14194 - DNA, 2466 bp, synthetic construct
  misc_feature 1..2466: note = Description of Artificial Sequence: Synthetic coding sequence
  source 1..2466: mol_type = other DNA
atgggaccgtggtcccggtccctttcggcccttctcctgctcttgcaggtgagctcgtggctatgtcaagagccagaaccttgccacccggggtttgatgccgaaagctacaccttcaccgtgccccggaggcatctagaacgtgggagagtgctcggccgcgttaactttgaagactgcaccggacgccagcggaccgcttattttagcctggacacacggttcaaagtgggcacagacggtgtgattacggttaagagacccctgcggtttcataacccacaaattcacttcctggtgtacgcttgggactcaacataccggaagttttccactaaagttactctaaacacagttggacatcaccaccgcccccccccacatcaggcctcggtcagtggaattcaggcagagctactcactttcccgaacagttccccagggttgcggcggcagaagcgtgactgggtgatcccgcccatcagttgccctgagaatgagaaaggcccttttcccaagaacctcgtgcaaatcaagagcaacaaggacaaggaaggcaaggtgttttactccatcaccgggcagggggccgatactccacctgtgggagtgtttatcatagaacgggagacaggctggttaaaagtaactgagccccttgatagggagagaatcgcgacatataccctattcagccacgcagttagctcgaatggcaacgcggtcgaggatcccatggagatcctgatcactgtcacagatcaaaatgacaacaaaccagagtttacacaagaggtcttcaagggatccgtgatggaaggtgctctgcccggtacttctgttatggaagtaactgcaacagatgccgacgacgatgtgaacacatataatgccgccatcgcttacacaatccttagccaagaccccgagttgcctgacaaaaacatgttcaccataaaccgaaatacaggtgtcatttccgtggttacaaccggtctcgaccgggagtcctttccaacatacaccctcgtcgtgcaggcggccgacctccagggagagggactgagcacaactgcaactgccgtgattacagtgaccgacactaacgacaatccacctatctttaaccctaccacgggactggactttgaggctaagcagcagtacatccttcacgtggccgtcactaatgtggtgccctttgaggtgagccttacgacttcaacggcaacagtgacagtggatgtgttggacgtgaacgaggcaccgatcttcgtgccgccggagaagcgcgttgaggtaagcgaggactttggcgtggggcaggagattacatcctatactgcccaagagcctgatacattcatggagcagaagattacctataggatatggcgagacacagccaattggctcgagattaatcctgacacaggggccatatccaccagggccgagctggatagagaagattttgagcacgtcaagaattctacctacactgctcttatcatcgccaccgacaacggatctccggtggcaacggggaccggcactctgttgcttatactctccgatgtaaatgacaacgcacccattcctgaacctcgaaccatcttcttttgcgaacgaaatccgaagccacaggtgattaacatcattgacgcagacttgcctcccaacacttctccattcactgctgagctgacccatggagcaagcgccaattggacaatccagtacaacgacccaacacaggagtcaattatattaaagcctaaaatggcgctggaggtaggcgattataagattaacctgaaattgatggacaaccagaataaagatcaggtaacaaccctcgaggtctccgtttgtgactgcgaaggggccgctggggtctgtaggaaggcccagcccgtggaggctggtctccagatcccagctatcttgggtatcctcggcggaatattggctttgctgatactgattctgttgctcttgctgtttctgcgcagacgtgctgttgtcaaagaacccctcttgccccctgaagacgacactcgtgataacgtgtattattatgatgaagaggggggtggtgaggaagatcaggactttgatctgagtcagcttcatcgcggcctggatgcccggcctgaggtcacgcgtaatgatgtggcgcccaccctgatgtccgttcccagatacctgcctaggccggcaaaccccgatgagattggaaactttatcgacgagaatcttaaagcagctgacaccgatcctaccgcaccaccttacgattcactgctggtatttgactatgagggctccgggtccgaagccgcctctctgtcctcccttaactctagcgagtctgataaggatcaggattacgactacctgaatgagtgggggaaccgtttcaagaagctcgccgatatgtatggcggtggggaagacgattag

SEQ ID NO: 14195 - DNA, 2391 bp, synthetic construct
  misc_feature 1..2391: note = Description of Artificial Sequence: Synthetic coding sequence
  source 1..2391: mol_type = other DNA
atgaaagaaaactactgtttacaggctgctctggtttgcctcgggatgctgtgccacagtcatgcattcgcacctgagcgtaggggacatctcagaccatcttttcatggccatcacgagaaggggaaggaaggacaggtgttgcagaggtctaagagggggtgggtgtggaaccagttctttgtcattgaagagtatacaggccctgatccagtgcttgtggggaggttgcactccgatatagattccggggatggcaatatcaagtatattttgagtggggaaggcgccgggacaatcttcgtgatcgatgacaagagcgggaatatccatgcaacaaaaacgctcgaccgggaagagcgagcacagtatacactgatggcccaagccgtggatagagatacaaacagaccactcgagccaccttctgagttcatcgtgaaggtgcaggatatcaatgataacccgcccgaattcctacacgaaacttatcatgcaaacgtgccagagagaagcaatgtcgggacgtctgtaatccaggtgacagcctccgacgctgatgatcctacttatggaaattctgcaaagctagtgtatagtattctggagggacagccttattttagcgttgaagcccagacaggcatcatccgcaccgcccttcctaacatggatcgcgaagccaaggaggaatatcatgtggtgatccaggccaaagacatgggcggacatatgggggggttgagtggcaccactaaggtcactatcaccttaaccgatgttaacgacaacccacccaagttcccccagtccgtgtatcagatgtccgttagcgaggctgccgtccccggggaagaggttggcagagtgaaagccaaagatcctgatatcggtgagaatgggttagtgacttacaacatcgttgatggcgacgggatggaaagttttgagattaccacagattacgaaacgcaggagggcgtcattaagttgaagaaacccgttgattttgaaacgaagagggcctacagcctcaaagtggaagctgctaatgtgcacattgaccctaagtttatatccaacggcccgttcaaagataccgttacggtgaagattagcgtggaggatgctgatgaaccgcccatgttccttgctccctcctatatccacgaagtacaggagaatgcggccgcaggcaccgtagtcgggcgggtgcacgcgaaggatcctgacgccgccaactcgccgattagatactcgattgataggcacactgatcttgatagattcttcactatcaaccctgaagatggcttcattaaaacaactaaaccccttgatagggaggaaacagcctggctgaatattacagtattcgcagccgaaattcacaaccgccaccaggaggccaaagtgcctgtcgccattagagtccttgatgtcaatgacaatgctcccaagttcgctgctccctacgagggctttatttgtgagagcgatcagaccaagcccctgtccaaccagccaatcgtcactatttcagcggacgataaggatgataccgctaatgggccacggttcattttttcactgcctcctgagatcatccacaatccaaattttaccgtacgggacaacagggataacaccgccggtgtctacgcccgaagaggagggtttagccgccagaaacaggacctctatctgttgcctatcgtcatctccgacggcggaatccctcccatgtcctctaccaacacgctgaccatcaaagtgtgtggatgcgatgtcaacggagcactgctatcttgcaatgctgaggcatacatcctgaatgccggactgtccactggagcactgattgctatcctagcttgcattgtgatcctgctcgtgattgtcgtcttattcgttacactgagaaggcagaagaaagagcctctcatagtctttgaagaggaggatgtgcgggaaaacataattacctacgatgatgagggaggcggagaagaggatactgaggctttcgacattgctacactgcaaaatccagacggtattaatggcttcataccccgaaaagacatcaagccggagtaccagtacatgcctcgcccaggcctgagacccgcacctaattccgttgatgtggatgactttatcaatacacggattcaggaggccgacaacgatccaacagcacccccgtacgattccatacagatatacggttacgagggtcgggggtccgttgcggggtccctttcctctctggagtccgccacaacagactcagacctggactacgattacttacagaactggggccctcggttcaagaagctggccgatctttacggtagcaaagacacattcgacgacgactcatag

SEQ ID NO: 14196 - DNA, 2082 bp, synthetic construct
  misc_feature 1..2082: note = Description of Artificial Sequence: Synthetic coding sequence
  source 1..2082: mol_type = other DNA
atgaaggagaactactgcctccaggccgccctggtctgcctaggcatgttgtgccactcacatgctttcgctccagaacggcgagggcacctgcgcccctccttccatggacaccatgaaaaggggaaggaggggcaagtcctgcaaagatcaaaacggggctgggtgtggaatcagtttttcgtgattgaggagtatacggggcccgaccctgttctggtggggcggctgcactctgatatagacagcggggatgggaacattaaatacattctcagtggcgaaggtgccggcaccatcttcgtgatcgacgataagtccggcaatatacacgccaccaaaacgctggatagagaggagcgtgcccagtacactttaatggcccaggctgttgatcgcgacacgaatcgccctctggagccaccctctgagttcatcgttaaggttcaggatatcaatgacaatccccctgagtttcttcatgaaacataccatgccaacgtccccgagagatctaacgtcggaacttcggtgattcaggtgactgcctctgatgccgacgaccccacatacggcaacagcgccaagcttgtgtatagcattcttgagggtcagccttatttctctgttgaggctcagactggtatcatcaggaccgctttgcccaacatggatcgggaggcgaaggaggaataccatgtggtcatacaggcgaaggatatggggggtcacatgggtggcctctccggcactactaaggtcaccataaccctgactgacgtaaacgataatccgcccaagttcccacagagcgtgtatcagatgagcgtgtctgaggctgccgtgcccggagaagaagtcggaagagtcaaggctaaggaccccgatatcggcgagaatgggcttgtcacctataatattgtggacggcgatggcatggaatcatttgagataacgaccgactatgaaacccaggagggggtaattaaattgaaaaagcctgtcgactttgagaccaagcgtgcctactccttgaaggtggaggccgcaaacgtgcacatagacccaaagtttatttctaacggacctttcaaggatacggtcacagtgaaaattagtgtggaggatgcagatgagccacctatgttcctcgccccctcctatatacatgaggtccaagaaaatgctgcagcaggcaccgtggttgggcgggtgcatgctaaggaccccgatgccgcgaactcacccatccgttactccattgaccgccataccgatctcgaccggtttttcacaatcaatcccgaggacggattcatcaaaacaacaaagcctctcgaccgggaggaaactgcttggctgaatataactgtgttcgccgctgagatacacaatcgccaccaggaggctaaagtgccagttgccattagagtgcttgatgtgaatgacaatgctcccaaatttgccgccccgtacgaaggcttcatttgtgagtctgatcagacaaagccattgtctaaccagccgatcgtcactatctctgcggatgataaagatgacactgcaaatggaccgcggttcattttctctttgccacctgaaattattcacaaccctaacttcaccgtcagggacaaccgggacaacacagcaggcgtgtatgcgaggaggggtggctttagccgacagaagcaagacttatacctgctgcctattgtcattagcgacggggggatacctcctatgtcttccactaacacactcaccattaaggtctgcggatgtgatgtaaacggagcccttttgtcatgtaacgccgaggcttatattctgaatgctgggttgtccaccggagcactgatcgctatattagcctgtattgtcattctgcttggatgcccaagcctgatggaaccccctagccccagggaagatatgcggctgctgtaccttgggttccagctcatgctgttctcatatgtgaaagtgaatagacggttttgcctgcttggagtgttcatcaagctacctttcctgtacgtggtggccactgagtccccaaccaccctgacgtcattgtag

SEQ ID NO: 14197 - DNA, 516 bp, synthetic construct
  misc_feature 1..516: note = Description of Artificial Sequence: Synthetic coding sequence
  source 1..516: mol_type = other DNA
atgaaagaaaattactgtctgcaggccgcccttgtttgtctgggcatgctgtgccatagccatgctttcgcgcctgagagaagaggccacttacgcccgtcgttccatggtcatcacgagaaaggaaaagaaggacaggtcctccagcgtagcaaacgggggtgggtctggaatcagttcttcgttattgaggagtatactggcccagatcccgtattagtgggccgtctacatagcgacattgacagcggcgatgggaatatcaaatatatcctgtcaggcgagggcgcagggacgattttcgttatagacgacaagagtggcaatatacacgcaactaagacccttgatcgcgaagagagagcccaatatacgctaatggcacaggcagtagaccgggacacaaaccggaatagtctgtcacggtcgcgcactctgatgacaacgctgcgtagcagttgcacccggcccatcatgcccacttgtctccgcgggcccatgtgggtccggacttag

SEQ ID NO: 14198 - DNA, 2340 bp, synthetic construct
  misc_feature 1..2340: note = Description of Artificial Sequence: Synthetic coding sequence
  source 1..2340: mol_type = other DNA
atgggacccggtctggcagccagacgacttagacccccaagtagggcgcccgagattaccgtgttctcagctcagcgcccgtgcgatatcccctcttgttgtcacctcctatcagaccaaagcgatgggtggagcgttctgcaaaagcttgctgcaagcatccagtgggttaagaagctccactctgacatcgacagtggagacggaaatattaagtacatcctgtccggagaaggagccgggactattttcgtgatcgatgacaaatccggtaacatacacgcaacaaagacactagatagagaggaaagggctcagtatactctgatggcccaagctgtcgaccgtgacaccaataggccacttgagccacccagtgagttcattgttaaagtgcaggatatcaacgacaaccccccagagtttctccacgagacgtatcatgctaatgtgccggagagatctaatgtggggactagcgttatccaagtgactgccagtgatgccgacgaccccacatacgggaactctgccaagttggtgtactccatcttggagggccagccctacttctctgttgaggctcagacaggcataattcggactgccttacccaacatggatcgggaagccaaggaagagtaccacgtggtgatacaagccaaagacatggggggacacatgggggggctcagtggaaccacgaaggttactatcacattgaccgacgtcaatgataaccctcccaagttcccacaaagcgtttatcagatgtctgtgtcggaagccgcggttccaggcgaagaagtgggacgtgtgaaagccaaagatcccgatataggggaaaacgggctggttacttacaatatcgtggatggagatggcatggagagttttgaaatcactactgattatgaaactcaggagggcgtcattaagctgaaaaagcctgtggatttcgaaactaagagggcctacagcctgaaagtggaggccgctaacgtgcatatcgaccccaaatttatttctaatgggccattcaaggatacagtgacagtgaagatctcagtagaagacgccgatgaaccgcccatgtttctggccccctcctatatccacgaggttcaagagaacgctgctgctggaaccgttgtcgggcgtgtgcacgccaaggatcctgatgccgccaatagtccaattcgatactcgatagaccgccacaccgatcttgaccgcttctttactataaacccagaagatggattcatcaaaacgactaagcctcttgacagggaggaaacagcctggttaaacataactgttttcgcagccgaaatccataatagacatcaagaagcaaaggtgcccgtggccataagggtactggatgtgaatgataacgcgcccaaattcgctgcaccttacgaagggtttatctgcgagagtgaccagacgaagccactaagtaaccagccaatcgtgactatatccgccgatgacaaagacgatacagcgaacggacctcgatttatattttctttgccccctgagattatacacaaccctaatttcaccgtccgggacaatcgcgataataccgcaggcgtgtatgccagacgcggagggttcagccgacaaaaacaggatctgtatctactgccaatcgtcattagtgatggggggattccacccatgtcgtcaaccaatactctgacgatcaaggtgtgcggctgcgacgtgaacggggcccttcttagctgtaacgcagaggcctacatcttgaatgccggactgtctactggggccctgattgccattcttgcatgcatcgtaattctcctcgtcattgtggttctcttcgtgaccctcagacgacagaagaaggagcccctgatcgtattcgaggaagaagacgtcagagaaaatatcatcacatacgacgacgaaggaggaggcgaggaagacaccgaagccttcgacatcgccacactgcagaacccagacggcattaatggattcattcccaggaaagatatcaaaccagagtaccagtacatgccacgtccaggcttgcggcccgcccccaattctgtcgatgttgatgactttattaatactagaatacaagaggcggataatgatcctaccgctccgccatacgattcgatccagatctacggctacgaaggcagaggatcggtcgctggatcactgagctccctggagtccgccacaacagacagcgacctagactatgattaccttcaaaactggggacctcgctttaaaaaactcgctgatctgtatgggagcaaagataccttcgatgacgactcctag

SEQ ID NO: 14199 - DNA, 528 bp, synthetic construct
  misc_feature 1..528: note = Description of Artificial Sequence: Synthetic coding sequence
  source 1..528: mol_type = other DNA
atgcagccccgcacacctcttgtgctgtgtgttctgctcagtcaagttttactgctgacttcggcagaagacctggactgcacccctggcttccaacaaaaggtgttccacataaaccaaccagctgaatttatagaggaccagtctattctcaacctgacgtttagtgactgtaaaggtaacgataaactgaggtatgaggtttcttcaccctatttcaaagtaaacagtgatggaggcctggtggcgttaagaaacatcacagctgttggcaagacactgttcgttcacgcacgcacacctcacgcagaagatatggcggaactggttattgtcggcgggaaggacatacagggaagcttacaagacatcttcaagttcgcccgcacaagtcccgttcctcggcagaaaaggtcaatcgtcgtgtctcccattctgatccctgagaaccaacgccagccttttccgagggacgtaggcaagatgaaaatttggcaggtcctttgtctcgccaggtggcttacgtag

SEQ ID NO: 14200 - DNA, 2142 bp, synthetic construct
  misc_feature 1..2142: note = Description of Artificial Sequence: Synthetic coding sequence
  source 1..2142: mol_type = other DNA
atgcaaccccggaccccgcttgtcctgtgcgtcctactcagccaggtcctgctactgaccagtgctgaggacctcgactgcaccccaggcttccaacagaaggtgttccatatcaatcagcccgccgagttcatcgaggatcagtctatactcaacctcacctttagtgactgtaagggcaatgataagctgcgatacgaggtgagcagcccttattttaaggtcaactccgatggcggccttgtggccctcaggaatatcacagccgtggggaagaccctttttgtgcacgccagaactcctcacgcggaagacatggctgaactagtaattgtaggcggcaaggacatccaggggtctctgcaggacatctttaagtttgctagaaccagtccggtcccaagacaaaaaaggtctatcgtagtgagccccatcttgattcctgagaatcagaggcagccttttccaagagacgttgggaaggtagtggactctgataggcctgagcgcagtaaattccgtctgacaggcaaaggtgttgaccaagagcccaagggaatctttcgaatcaacgagaataccggttcggtttcagttacccggactctggacagagaagtaatcgccgtttaccagctcttcgtcgaaacaaccgatgtgaatggaaagaccctagaaggtcccgtgccattggaagtaatagttatcgaccagaatgacaaccgaccaatcttccgcgaaggaccctatattggacatgtaatggaggggagtcctacaggaaccaccgtcatgcgcatgacagcttttgatgcggacgatccggccactgataatgcattactgcggtataacattaggcagcagacaccagacaaacctagccccaatatgttctacatagatcccgaaaagggtgacatcgtcacggtagtgagtcccgcccttctggaccgcgaaaccctcgaaaacccgaaatatgagctaatcattgaagcccaagatatggccggattggacgtcggcctgaccggcaccgcgacggccaccataatgattgatgacaaaaatgaccattctcctaaatttaccaagaaggagtttcaggcaacagttgaagagggggcggtgggcgttattgtgaatctgaccgtggaggacaaggacgaccctactaccggagcctggcgcgctgcatacaccatcattaacggcaacccaggccagtcctttgagatacacacaaacccacagacaaatgagggcatgcttagcgtggtcaagcctctggactatgagatcagcgcattccacacactgcttatcaaggtcgagaacgaggatcccttggtgcctgacgtgtcatatgggccgtcctctacagcaaccgtgcacatcactgttctggatgtcaacgaggggcccgtgttctacccagaccctatgatggtaacacgacaggaagacctctctgtgggaagcgtgctcctgacagtgaatgctacagatccggactcgctgcagcaccaaacaattcgttactcggtgtataaggatcccgctggatggctgaacatcaacccaatcaacggcaccgtcgacactaccgctgttctggatcgggaatctccctttgtggataattcagtctacacagcgctgttcttggcgatcgattctggcaacccaccagccacgggcaccggaaccttgctgataaccctcgaggacgtgaacgacaacgcccccttcatctacccaactgtggctgaagtttgcgacgacgcaaaaaatctgtctgttgtaattctcggagcttctgacaaggacttgcatccaaacacggatccattcaagtttgaaatacataaacaggccgtgcctgataaggtgtggaaaataagcaagattaataatactcatgcactcgtgagcctgctgcaaaatctgaacaaggccaattataacttgccgatcatggtgacagattctggtaagccacccatgactaacattaccgacttgcgagtacaggtgtgtagttgccgcaattccaaggtggactgcaacgctgccggcgcactgcggttctcccttcccagcgtcctgcttctttccctcttcagtttggcctgtctgtag

SEQ ID NO: 14201 - DNA, 2283 bp, synthetic construct
  misc_feature 1..2283: note = Description of Artificial Sequence: Synthetic coding sequence
  source 1..2283: mol_type = other DNA
atgaaaacccctcccggggcaagcagcaggactaaatgttctcgcgagctaagatccttttgtgcattttcctgtcccagagcgaaacaacccacatgcacggcgtggtttcctcagcaggagcatccctccgagaacggtccgcagatgcctggtcgagacccccccgctgccagcaccatgcaggtgctgctcctcacatctgctgaggacctggactgcacacctgggtttcagcagaaggtgttccatattaatcagccagctgagttcattgaggaccagtcaattcttaatctcaccttctccgactgcaagggtaatgataaattgaggtacgaagtcagcagcccctacttcaaagttaacagtgatggcggcttggtagccctccgcaacatcactgctgtcggaaagactttgtttgtgcatgcacgaactcctcacgcggaggacatggcagagctagtcatcgtcggaggtaaagatattcagggttcactacaggatatatttaaatttgcccgaacttccccagtgccccgacagaaaaggagcattgtggtatctccaattctgattcctgaaaaccagcgtcagcccttcccaagagatgtgggcaaggtcgtcgatagcgacaggccggaacgcagtaaatttaggctgactgggaaaggcgtggatcaagaacccaagggaatatttcgcataaatgagaacaccggttctgttagtgtcacacgcactttagatagggaggtcatagccgtttaccagttatttgtcgaaacaaccgacgtgaacgggaaaaccctggaaggtccagttcctttggaagtgatcgtgatcgatcagaacgacaaccggccgatattccgtgaaggaccgtatatcggacatgttatggagggttccccaacaggcaccactgtgatgcggatgacagcatttgatgccgatgaccccgccacagataacgcacttctcagatacaatatcagacaacagacacctgacaaacctagtcctaatatgttttatatagacccggagaaaggcgatatagtgaccgtcgtcagtccggctttgcttgacagagaaactttagagaaccccaagtacgaactcatcatagaggctcaagacatggccggactagacgtgggccttacagggactgctactgcaacaattatgatcgatgataagaacgatcattcgccgaaattcaccaagaaagaattccaggcgaccgtggaggagggcgctgttggggtcatcgttaacctgaccgtggaggataaggacgatccgaccacgggcgcatggcgcgcagcctacaccatcataaacggtaacccaggccagtcgtttgagattcacaccaacccccagacaaacgaggggatgttaagtgtggtcaagcccctcgattacgagatcagtgcatttcacacacttctgattaaggtggaaaatgaggatcctttggtgcctgatgtgtcatatggtccctcctctacggctacagtccatatcacagtcctcgacgtgaatgagggaccggtgttctacccagaccccatgatggtgaccagacaagaagacctgtcggtgggttctgtgttgttgactgtaaatgcgacagatccagactccttacagcaccagaccatcagatattctgtgtacaaggaccctgccgggtggctgaatatcaatccaattaatggtacagtggatacaacagcagtgctggatagagagtcgccgttcgtggacaactcggtctacaccgccctgttcctcgcaatcgactctggcaatcctccggctactggtactggtactctgctcattaccctcgaagatgtgaacgacaatgcccctttcatttatcccactgtcgccgaggtttgtgacgatgccaagaacctaagtgtggtgatcctgggggcctctgacaaagaccttcaccctaataccgatccgttcaagttcgaaatccataagcaggctgtacctgataaggtgtggaagatatctaaaatcaacaatacacatgccctcgtgtctcttcttcagaacctcaataaggcgaattataacctacctatcatggtgactgactctgggaaacctccgatgaccaatattactgatctccgcgtgcaagtgtgctcctgccgcaacagcaaagtcgattgtaacgctgccggggctcttaggttcagcctacccagtgtcctgctgctgtctctcttttccctagcatgcaagtag

SEQ ID NO: 14202 - DNA, 2142 bp, synthetic construct
  misc_feature 1..2142: note = Description of Artificial Sequence: Synthetic coding sequence
  source 1..2142: mol_type = other DNA
atgcagccgagaacacctcttgtgctatgcgttctgctgagtcaagtgctactgctcactagtgccgaggatctggactgcacaccagggttccagcagaaggtgttccacattaatcaacctgccgaattcattgaggatcagtccattcttaatctgactttttccgactgcaaaggaaatgataagctgcgctatgaagtgagtagcccctatttcaaagtgaacagtgacggggggttggtggcgcttaggaacattaccgccgttgggaagaccctctttgtacacgccaggacgccccacgccgaggacatggcagagctggtaatcgttggggggaaggatattcagggaagtcttcaggatatctttaaattcgctaggacttctccagtgccccggcaaaagcgttcaatcgtagtgagccctatcctgatacccgaaaaccagagacagccattccctcgcgacgtgggcaaagtggttgactcagataggcctgagcgaagtaaattcaggttaaccggcaagggcgtcgatcaggaacccaagggcatcttcagaattaatgaaaacaccggctccgtctccgtgactcggacattggatcgcgaggtcattgcggtataccagttgtttgtggagaccactgatgtgaacgggaagaccctggaaggaccagtcccactggaggtaattgtgatagatcagaacgacaaccgcccaatcttcagggaggggccatacataggacatgtgatggaggggtcccccaccggaactacagtgatgcgaatgaccgcctttgatgcagatgaccctgcaaccgacaacgccctcctcagatataacatacgccagcagactcccgataagccaagtccaaacatgttctatatcgaccccgagaaaggtgatatcgtgactgtggtctcccccgcactcctcgatcgagagactttggagaatccaaagtacgagttgattatagaggctcaggacatggccggcctggacgtgggcctcactggcacggccaccgccacaatcatgattgatgacaaaaacgaccattctcctaaattcaccaagaaggagtttcaggccaccgtcgaagagggggctgtaggggtgattgttaacctaaccgttgaagacaaagacgaccctaccacaggggcctggcgggctgcctataccataatcaacggcaaccccggccagagcttcgagattcacacaaatccacaaacgaacgagggcatgctttcagttgtgaaacccttagactacgaaatttccgcctttcacaccttattgattaaggtggaaaatgaagatccgctcgtaccagacgtatcctacggcccctccagcaccgccacggtgcatataaccgttttagacgttaatgagggccccgtattttatccagacccgatgatggtgacacggcaagaagatctctcggtcggctctgtgctcctcactgtcaacgcaacggatcctgacagtttgcagcatcagactatcaggtacagcgtgtataaagaccccgccggatggctaaatatcaatcctataaatggaaccgtcgacaccactgcagtgcttgatagagagagtccttttgtggacaattccgtctacactgctttgtttcttgctatcgattcaggcaatccgccagcgaccgggacgggtacgttgctgattaccctagaagacgtgaatgataacgccccctttatttatcccacagtggctgaggtctgcgatgatgcaaaaaatttgagtgtggttatacttggggccagcgataaggacctccatcccaacactgatccctttaagtttgaaattcataagcaggccgtgccggacaaggtttggaagatatctaagatcaataatacccacgccctcgtgagtcttctgcagaatctgaacaaggccaactataatctgccaattatggtaacagattctggaaaaccgccaatgactaacattacggacctgagggtgcaggtctgttcctgcagaaacagtaaggttgattgtaatgctgctggcgctttgaggttttcactgccgtctgtcctccttctgagcctcttttcactcgcatgtaagtag

SEQ ID NO: 14203 - DNA, 573 bp, synthetic construct
  misc_feature 1..573: note = Description of Artificial Sequence: Synthetic coding sequence
  source 1..573: mol_type = other DNA
atgcaaccccgcacaccactggttttgtgtgtgcttctctcccaggtgttattactcacctcggcggaagatttagactgtactccggggttccaacaaaaggtgtttcatataaatcagcctgctgaatttatcgaggaccagtccattttgaacctgacatttagtgactgtaaggggaacgataagctaagatatgaagtctcgtccccttatttcaaggtgaatagtgatgggggccttgtggcactgaggaatattacggcagttgggaaaacattgtttgtgcatgctcggactccccacgccgaagacatggccgagctcgtaattgtaggaggtaaggacattcagggaagtctgcaggacatatttaagtttgccaggacctcccctgttcctcgccagaaacgttctattgtcgtgtcacccatcctcatcccagagaatcaacggcaacctttccctcgggacgtaggtaaacgcactcataacccaattaactcagagcttctgttaaatgaaggcatcacagccgacctaaatccttgtataactatactcgcaatttag

SEQ ID NO: 14204 - DNA, 528 bp, synthetic construct
  misc_feature 1..528: note = Description of Artificial Sequence: Synthetic coding sequence
  source 1..528: mol_type = other DNA
atgcaacccagaaccccactggtgttgtgtgtcttattgtcgcaagtgctgttactgacctctgcagaggatctggattgcacccctggatttcagcagaaagtgtttcatatcaatcaaccagctgaatttattgaggaccagagtatcctgaaccttacattttccgactgcaaaggcaacgacaaacttcggtatgaggttagctctccttacttcaaggtgaattcagacgggggcctcgtcgccctgcgcaatataactgccgtaggcaagactctgttcgtgcacgcgaggacaccgcacgctgaagacatggccgaactggtaattgtaggagggaaggatattcagggttcgctccaggatattttcaagttcgcccgcaccagccctgtgcctaggcagaagcgttctatcgtcgtctcccctatactgattcccgagaaccagaggcaaccctttcccagggacgtgggcaagatgaagatctggcaggtgctttgcctggcccggtggttgacatag

SEQ ID NO: 14205 - DNA, 2025 bp, synthetic construct
  misc_feature 1..2025: note = Description of Artificial Sequence: Synthetic coding sequence
  source 1..2025: mol_type = other DNA
atgcagcccaggacccctctcgtcctgtgtgtgctcctgtcccaggtcttgctgcttacatcagctgaagacctggattgcaccccaggcttccagcagaaggtgttccacattaaccaaccagccgagtttatcgaagaccaaagtatcctgaacctgaccttcagtgattgtaaggggaatgacaagctgcgctacgaagtctcaagcccctattttaaggttaactctgatggagggctggttgcactgagaaatataacagccgtcggcaaaaccctgttcgtccacgcgagaactccgcatgctgaggacatggcagagctggtcattgtcggggggaaagacatccagggttctctgcaggtcgtagattctgatagaccagagcgtagcaagtttaggctgaccgggaaaggagtggatcaggagcctaagggcattttccgaatcaatgaaaataccgggagcgtctcagttacgaggacactggatagggaggtgatcgccgtgtatcagctgtttgtcgaaacaaccgatgtcaacggtaaaacgctggaaggtccagtgccactcgaggtgatagtcatcgatcagaacgacaatcggcctatttttagggaaggcccttacatagggcacgttatggaaggttctcccaccggcactacagtgatgcgcatgacagcattcgacgcagatgacccggccacagataatgccctgctgagatataatattcgacagcagactccagacaagccgagtcccaacatgttctacatcgatccagagaagggcgacattgtgaccgtcgtctcccccgcacttctggatcgggaaactttggagaacccaaaatacgaactgataattgaagcacaggacatggccggacttgacgtaggcttgactggaacagcaacagccactattatgatcgatgacaaaaacgatcacagtcccaaattcacaaagaaagagtttcaggctacggtggaggagggcgctgtgggtgtcatcgtcaatctgaccgtggaagataaagacgaccctaccacaggtgcctggagagccgcctacacaatcatcaatggaaatcctggccagagcttcgaaatccacacgaacccacagactaacgaaggaatgttatcagtagtcaaacccctggactatgagatcagtgcgtttcacacactgctcattaaggtggaaaacgaggatcctttggttcccgacgtttcatacggcccttccagtactgctactgtgcatatcactgtccttgatgttaacgaaggaccagttttctacccagaccctatgatggtgactcgtcaagaggatctttccgtgggctcggtcctgctgacggtaaatgcaacagatcccgactcattgcagcatcagacgatccgttactccgtgtacaaagacccagcaggctggctaaacattaacccaattaacggaactgtcgataccacggcagtccttgatcgagaatctcccttcgtggacaattccgtttacacagcactgttcctggcaatcgactcaggaaacccgcctgccaccgggaccggcacgttgctgattaccctggaagatgtgaatgacaacgcgccgtttatatacccaaccgtggctgaggtctgcgacgatgccaaaaacttgtccgtggtgatccttggcgcgtccgataaagacttgcatccaaacacagaccctttcaaattcgaaatacacaagcaggcagtgcctgacaaggtctggaaaatcagcaagattaataatacgcatgccctggtgtccctcctgcaaaacctcaataaggcgaattataacctgcctattatggtcaccgactccggcaagcctcctatgaccaacatcaccgatcttcgcgttcaggtatgcagctgcagaaatagcaaggtcgactgcaacgccgccggagcacttcgcttctccttaccctctgtgctcttgctgagcttattcagtttggcctgtaagtag

SEQ ID NO: 14206 - DNA, 1248 bp, synthetic construct
  misc_feature 1..1248: note = Description of Artificial Sequence: Synthetic coding sequence
  source 1..1248: mol_type = other DNA
atgcagcctcgaactccattggtgctttgcgtgctcctctctcaggtcgccctgcttgatcgggaaactctggaaaatcctaagtatgagctgatcatcgaagctcaggacatggctgggctggatgtgggactcactggcactgcaactgccacgatcatgatcgacgataagaatgaccatagccctaaatttacaaaaaaggaattccaagcgacagttgaggaaggtgccgtgggtgtgattgtgaatttgacagttgaagataaggatgaccctaccactggagcctggcgagcagcgtatacaattatcaacggaaatcccgggcagtcattcgaaattcacaccaaccctcaaacaaacgagggcatgttatccgtggttaagcccctggactatgagatctctgcctttcacacactattgattaaagtggagaatgaagatccattagtccctgacgttagctatggtccttcatccactgccactgtccacatcacagtgcttgacgtaaatgaggggcccgttttctaccctgacccgatgatggtcactcgccaggaagacctgagcgtgggctccgtgctgctgacagtaaacgcgactgatccggacagtctgcagcaccaaacaattcgatattccgtgtacaaagatcctgcagggtggttgaacattaacccaattaacggaaccgtggatacgacagccgtcctggatagggagtccccttttgtcgataactccgtgtataccgcccttttcttggccatcgactccggcaatcccccggccactggtactggcaccctgctcattactctggaggacgtaaatgacaacgcgcccttcatctaccctacggtcgccgaagtgtgcgatgacgccaagaatctctcagtagttatcctcggggcaagtgataaggatcttcatcctaacacagacccctttaaatttgaaatccacaagcaggccgttcctgacaaggtctggaagattagtaagatcaataatacacacgccctggtgtcgctgctccagaatctgaacaaagcaaactacaacctaccaatcatggtgactgattcagggaaaccacccatgaccaacatcacggacctccgggtccaggtttgttcctgcaggaacagtaaagtagattgtaatgctgctggagctctcagattctctctgccgtctgtgctgttgttgtccttgttttccttagcgtgcaaatag

SEQ ID NO: 14207 - DNA, 819 bp, synthetic construct
  misc_feature 1..819: note = Description of Artificial Sequence: Synthetic coding sequence
  source 1..819: mol_type = other DNA
atgcaaccccgtacacccctagtgctgtgcgtcttgctatcccaggtactcctcctcacatctgctgaggacctagactgtactcccggttttcagcaaaaagtgtttcacattaaccaaccagccgagttcatcgaagaggatctgtcagtagggtccgtcttgctgaccgtgaatgccaccgatccggatagcctgcagcaccagaccatacgatattccgtttacaaggaccccgccggctggttgaatatcaaccctatcaatggtacggttgacactacagctgtgctggatagggagagcccctttgtggataacagtgtttatactgccctctttctggccattgatagtgggaacccacctgccacaggaacaggcacccttctaattacattagaggatgtaaatgataacgccccctttatctatcctacggtggccgaggtgtgcgacgacgcaaaaaatttgtcagttgtgattttgggtgcgtctgataaagacctccatcccaatacagatccattcaagttcgagattcataaacaggccgtgccggataaggtttggaaaatctctaaaatcaacaacacccacgcgctggtgagtctgctgcaaaatctgaacaaggctaattacaatcttccgatcatggttactgactccggtaagccacccatgaccaacattaccgaccttagagttcaggtatgcagttgccggaactctaaagtcgattgtaacgcggctggggcactgagattctcactgcccagtgtgttactgctgagcttgttcagcttggcttgcaagtag

SEQ ID NO: 14208 - DNA, 1212 bp, synthetic construct
  misc_feature 1..1212: note = Description of Artificial Sequence: Synthetic coding sequence
  source 1..1212: mol_type = other DNA
gtagtgagtcctgctttgttggatcgggagacactcgagaatcccaagtatgaactgattatagaagcacaagacatggccgggctggacgtgggtctgacaggcacggccacagccaccattatgatcgatgataagaacgaccacagccctaagtttacaaagaaggagtttcaagcaactgtggaggagggggccgtaggcgtgatagtcaacctgacagtcgaagacaaagatgaccccactaccggggcctggagagccgcctacacaatcattaacggcaaccccggccagtcgtttgagattcatacgaatcctcagacgaacgaaggtatgctctctgtagttaagcccttagattacgaaatcagcgcgttccacacattgctgataaaggtcgaaaatgaggaccctttggtgccggatgtttcgtatggccctagcagtaccgccaccgtgcatatcaccgttcttgacgttaacgagggtcccgtattttatcccgaccctatgatggtgacaaggcaggaggatctgtctgtgggctccgtgctccttactgtcaatgccaccgatcctgactccttacaacaccaaacaattcgctattccgtgtacaaggacccggccggatggctcaatataaacccaatcaatgggacagttgatacaactgccgtgctcgatagggagagcccttttgtggataactccgtgtataccgcgcttttcctggccatcgactctggaaacccacccgccactggaaccggaactctcctcatcaccctggaagacgtaaatgataatgcacccttcatctaccccactgtcgcagaggtttgcgacgatgccaaaaacctgagcgtagtcattttgggggctagtgacaaggacctacaccctaatacagaccctttcaagttcgagatacataagcaggcagttccagacaaggtctggaaaataagtaaaatcaacaacactcacgccctggtttccctgcttcagaacctcaataaagcgaactataatcttcctattatggtgacagatagcggtaaacctcccatgacgaatatcactgacctccgcgtccaggtgtgttcatgccggaattctaaggtggactgtaacgccgccggagcgctcagattctcgctgcccagcgtgctgttactatccctgtttagcttagcatgtctgtag

SEQ ID NO: 14209 - DNA, 2721 bp, synthetic construct
  misc_feature 1..2721: note = Description of Artificial Sequence: Synthetic coding sequence
  source 1..2721: mol_type = other DNA
atgtgtagaatcgctggggccttgcgaactctcttacctctcttggctgccctgctccaggcgtccgtggaagcaagcggggagattgccctgtgtaagaccggattcccggaggacgtatactccgctgtgctcagcaaggatgtgcatgagggccaaccactgttgaacgtgaagttcagcaattgtaacggcaagagaaaagttcaatatgaatcttccgagccagccgattttaaagtggacgaagacggtatggtctacgccgtacgctctttccctctttcctcggaacacgcgaaattccttatctatgcacaagataaggagacccaggagaaatggcaggtggccgttaaactgtccttaaagcctaccctgacggaagagagtgttaaagagtcagccgaggtagaggagattgtgttcccacggcagttttctaagcacagcggccatctgcagaggcagaagagagactgggtcatccccccaattaacttaccggaaaattctcgcggtccatttcctcaggagctcgttcgcatcagaagcgatagagacaagaatctgagtctaaggtactctgtgaccggacctggggccgaccagccccccactggcatttttatcattaatccgataagcggccagctgtctgttactaaacctctggatagagaacagatcgcccgatttcatctgcgagctcacgcggtggatattaacggcaaccaggtggagaaccctattgacattgtgatcaacgtgattgatatgaatgacaaccggcccgaattcctgcatcaggtctggaatgggaccgtgcccgagggctccaagcccggaacctacgtgatgactgtaacggctatcgacgccgacgatcccaatgcattgaacgggatgctgcggtatagaatcgtctctcaagcccccagcaccccctcccctaatatgttcaccatcaacaatgagacgggagacataattacagtcgcggcaggccttgaccgggaaaaggttcagcaatacactctaatcatccaggcgacagatatggaaggcaaccccacgtacgggctatctaataccgcaacagcggttatcaccgttaccgacgtaaacgacaatccgccagaattcactgcaatgaccttctacggggaagtcccagaaaacagagtggatatcatcgtcgcaaatctcaccgtgaccgataaggatcaaccccatacccctgcctggaatgcggtgtacagaatatccggcggagacccaacgggaagattcgcaattcaaactgatcctaacagcaatgatggtttagttacggtggttaaaccaattgacttcgaaacaaatcgaatgtttgtcctgactgtcgctgctgagaaccaggtacctctcgctaaggggatacagcacccccctcagagcaccgctaccgtttcggtcacagttattgatgtgaatgaaaatccatatttcgccccaaaccctaagatcattagacaggaagaaggcctgcatgcaggaactatgctcactacattcactgcgcaagaccctgaccgctatatgcagcagaacatccgctacaccaaacttagcgaccccgctaactggttgaagatcgatccagttaacggccagattacgaccattgcggtgctggatcgggaaagtccgaacgtgaagaacaatatttataacgccactttcctcgcatccgataacggaatccctcccatgtctgggaccggcacgctgcagatttatctgttggacattaacgataacgctccccaggtgctgcctcaggaggccgaaacctgcgaaactccagacccgaactctattaatataacagcattggactatgacatcgatcccaatgctggcccctttgcctttgatctgcctctcagccccgtaactatcaaacgtaactggaccatcacccggcttaatggcgattttgctcagctaaacctgaaaataaagtttctggaggcaggcatttacgaggtgcctattatcatcaccgactctggtaatccacccaagtctaatatatccatcctcagggtgaaagtgtgtcaatgcgatagcaatggcgattgtacagacgtggatcggatagttggcgccggcctcggaaccggcgccattatcgcaattctgctgtgcatcattattctgttaattttggtgctcatgtttgttgtttggatgaagagacgcgataaggaaagacaggccaaacagctgctcatagaccccgaggatgatgtgagggataacattctaaaatacgatgaggagggggggggagaggaagaccaggactacgatctaagtcagctccaacagccagacacagtggagccggacgctattaaacccgtcggcattagacgcatggacgaacgacctattcacgctgagccccagtaccccgtgagatcggccgctccccacccaggagatatcggcgacttcattaatgaaggcctgaaagccgccgataatgacccaaccgccccaccttacgacagcttgcttgtattcgattatgaaggctctggctcaaccgccggcagcctttcgtcactgaattcctcgagttccggcggggagcaagattatgactatcttaatgactggggtccacgtttcaaaaaattggctgatatgtacggaggcggggacgactag

SEQ ID NO: 14210 - DNA, 2628 bp, synthetic construct
  misc_feature 1..2628: note = Description of Artificial Sequence: Synthetic coding sequence
  source 1..2628: mol_type = other DNA
atgtttttgctccgaagatacgtttgcatttttaccgagaagttaaagaaccaggcggagctttatgtgttcttatcagtgaagtttagtaactgcaacggcaaaaggaaagtccagtatgagtcctctgagcccgcggatttcaaagtggacgaagacggcatggtttacgctgtgcgaagctttcccttatctagcgagcatgccaagtttctcatttatgcccaagataaagaaacccaggaaaagtggcaggtggccgttaagctgtcgcttaagccaaccctcacagaggagagcgtcaaggagtccgcagaagtcgaggagattgtgttccctcgccaatttagtaagcactccggccacctgcagagacagaagcgagattgggtcatcccccccatcaacctgcccgaaaatagccggggaccttttccccaagagctcgtgaggattagatctgacagagataagaatctcagtctgcgctatagcgtcaccggaccgggggccgatcagcctcccactgggatcttcattataaatcctatatccggacagctttccgtgacaaagcccctagatcgggagcaaatagccagattccacctgagggcccatgcagtcgatataaatggcaaccaggttgagaacccaatcgatattgtgatcaatgtaatcgatatgaatgacaatcgacccgagtttcttcatcaagtgtggaatggcaccgtgcctgaaggctctaagcccgggacctacgtgatgactgttaccgctatcgatgctgatgatcccaatgcactcaatggcatgctgcgctatagaattgtctcgcaggcaccctcgactccatcccctaatatgttcaccattaacaacgagactggcgacataataacagtggccgccggacttgaccgggagaaagtccagcaatacacactcataatccaagctaccgatatggagggtaaccctacatacggtcttagcaacaccgccacggccgttatcactgtcactgacgtcaatgacaatcctcccgaattcacagcaatgaccttctatggtgaagtgccagagaatcgcgtggacattatcgtcgccaaccttactgtcacagacaaggaccagccgcatactccagcctggaacgccgtgtacagaataagcggcggtgaccctaccggacggttcgcgattcagactgaccccaacagcaacgacggattggtgacggtggttaagccaatcgactttgaaacaaatagaatgtttgtgcttacggtggctgcagaaaaccaggtgcctctcgccaagggaatacagcatccaccccaatctacggctaccgtgtctgtcacggtcattgatgtaaacgaaaatccctacttcgcgcccaaccccaaaatcataaggcaggaagagggtttacacgccggcacaatgcttacgaccttcacagcacaagatcccgataggtacatgcagcaaaacataagatacactaagctgtccgaccctgcaaactggctgaagatcgatccagtgaatggccaaatcacaacaatcgcggtcttagacagggaatctcccaacgtcaaaaacaatatttacaacgctacctttctggcttctgacaatggtattccccctatgtcaggaaccgggaccctgcaaatatatctcctagacatcaacgacaacgccccgcaggtcttgccccaagaggcagagacttgcgaaacccccgatcccaacagtattaacattaccgcacttgactatgatatagacccgaatgctggaccatttgcattcgaccttccactctctccagtcacgattaaacgaaactggaccatcaccaggttgaatggcgactttgcccagctgaacctcaagataaaattcctcgaagctggcatatatgaggtccccataatcattaccgactccggtaatccacccaagagcaatatctctatactccgtgtcaaggtatgtcagtgtgactctaacggtgactgtaccgacgtcgataggattgtgggggctggcctgggtactggggccataattgccatactattatgtattataattctattgattttggtacttatgtttgtggtttggatgaaaaggagggataaggaaaggcaagccaagcaattactgatcgaccccgaggatgatgtccgcgacaatatcctgaagtatgacgaggagggcggaggcgaggaggaccaagactatgacctctcacagctgcagcaaccggatactgtagagccggatgctatcaagcccgtagggattcgtcgaatggatgagcgaccgatccatgccgagccccagtaccccgtgcggtctgctgccccccacccaggggatatcggcgattttatcaacgagggcctaaaggcagctgataacgaccctacggctcctccatacgattcattgctggtcttcgattacgaggggtcggggagcactgcaggtagcctcagcagcctgaattccagctccagcggaggagagcaggactacgactacctcaacgattgggggccacgcttcaagaaactcgctgacatgtatgggggaggagatgactag

SEQ ID NO: 14211 - DNA, 2355 bp, synthetic construct
  misc_feature 1..2355: note = Description of Artificial Sequence: Synthetic coding sequence
  source 1..2355: mol_type = other DNA
atgcagcgtttaatgatgttactggccacttccggagcgtgcctgggtctgctggcggttgctgcggtcgcggcagctggcgctaatccagcccagcgggatacacatagccttcttccaacccaccgtcggcaaaagagagactggatttggaatcagatgcacatcgatgaggaaaaaaacacctccttaccccatcatgttggcaagatcaagtcaagcgtgagccggaaaaatgcaaagtacctgctgaagggtgagtatgtgggcaaagtattccgggtagacgccgagaccggtgacgtcttcgcaattgagaggctggaccgggagaatatttctgaataccacctgacggccgtgatcgtcgacaaggatactggggagaacctggagactcccagttcctttacaatcaaggtacacgatgtgaacgataactggccagtgttcactcatcggctctttaatgctagtgtgccagaatcttccgctgttggtactagcgtgatctcagtgaccgccgtagatgctgacgacccgacagttggcgatcatgcctctgttatgtaccagatcctgaagggcaaggagtactttgcaatagataattcgggccggataattactataacaaaaagccttgacagagagaagcaggcccgctacgagatcgttgttgaggctcgtgacgctcagggtcttcgcggtgactccggaaccgccacagtgctggtaacgttgcaagacatcaacgataattttcccttcttcactcaaactaaatacacctttgttgtgcccgaggatactcgggtagggacatccgtcggtagtctattcgtcgaggaccccgatgagccacagaatcggatgacaaagtacagtattttacggggcgattaccaggacgcgttcactatcgaaacgaaccccgcacataatgaaggcattattaagcccatgaagccactcgattacgagtacattcaacaatattccttcattgtggaggcaaccgaccctaccatagatctgcgatatatgagtccccccgcaggaaaccgtgctcaggtcatcatcaatatcactgacgtagatgaacccccaatttttcagcaacctttttatcatttccaattaaaggaaaatcagaagaaacccctcatagggacagtactggccatggaccccgatgccgcccgacactctatagggtactcaattagacgaacctcggataagggccagttttttcgggtgacaaagaaaggagacatctataatgagaaggagttggatcgtgaagtgtacccctggtataatttgaccgttgaggccaaggaactggatagtacagggacaccaactggtaaagagagcatcgtccaagtccatattgaggttttagatgaaaacgataacgcaccagagtttgcaaaaccctatcagccaaaagtgtgtgagaacgccgtacatggacagctagtgctgcaaatatccgccattgacaaggacatcactccccggaatgtgaagttcaagttcattctgaataccgagaataatttcaccctaactgataatcatgataacactgccaacataacggtaaaatacggccagttcgatagagaacacacaaaggtccacttcctcccggtcgtgatctctgacaatgggatgccatccagaaccggcacgtctactctgacagtggccgtgtgcaaatgcaacgaacagggcgaattcactttttgcgaggacatggcagcccaggtgggcgtaagtattcaggcagtcgtggcaatcctgctgtgtatcctgacgataactgtgattacgctgctgatcttcctcagacggcgccttaggaagcaagcccgtgcccatgggaagagcgtaccagaaatccatgagcagttggtaacatacgacgaggaaggagggggagagatggacaccacctcgtatgatgtctctgtcctgaacagcgtgcggagagggggcgcaaaacctccacggcccgccctagatgcccgtccaagcctttacgctcaggttcaaaagccaccaagacatgcgcccggcgcccacggaggccccggagaaatggcggccatgattgaggtgaaaaaggatgaagcagaccatgatggggatgggcccccctatgacacactacacatctacgggtatgaaggttccgagagcattgccgaaagcctgagtagcttaggcacggattcctctgatagcgatgtcgattatgattttttaaatgattgggggccacgttttaagatgcttgccgagctctacggctccgaccccagggaagagttgctgtattag

SEQ ID NO: 14212 - DNA, 2010 bp, synthetic construct
  misc_feature 1..2010: note = Description of Artificial Sequence: Synthetic coding sequence
  source 1..2010: mol_type = other DNA
atgcagcgacttatgatgctgctcgctacatccggggcatgtcttggcttactggctgttgccgctgtcgccgcggcgggggctaatcccgcacagagagatacccacagtctccttccaactcacagaaggcagaaacgcgactggatctggaatcagatgcatattgacgaggaaaagaatacaagtctgccacaccatgtgggaaagatcaaaagctctgttagtcgcaaaaatgccaaataccttctcaaaggtgagtacgtagggaaggtttttagggttgatgcagagacaggggacgtctttgcaatcgaaaggctggatagagaaaacatctccgagtaccacctgacagccgtgattgtcgataaggatactggggaaaatttagagaccccaagttctttcactataaaggtgcatgacgttaatgataattggccagtgttcactcaccgtctgttcaacgcatctgtgcccgaatctagtgccgtagggacctcagtaatttcagtgacagccgtggacgctgacgacccaactgtgggcgaccatgccagtgtcatgtatcagatactgaagggaaaggaatactttgccattgacaactctggccggattataacgataactaagagcctggatagggagaagcaggcgagatacgaaatagtcgtggaagctcgcgacgcccaagggttaagaggggactctggaaccgccacggtgctcgtcacactacaggacatcaacgacaatttcccttttttcacccaaaccaaatatactttcgtggtgcccgaagacactcgtgttggcacatctgtcggctctctgttcgtagaagaccctgacgagccgcagaaccgaatgacaaagtactctatcctcagaggcgactatcaggacgcgtttacaatcgagaccaacccagcacacaatgaagggatcataaagcctatgaagcctttggactacgagtatattcaacaatactcctttatcgtggaagctactgacccaaccatagatttaaggtacatgtccccaccagcaggtaatagggcgcaggtgattataaatattacagatgtagacgagcctcctatcttccaacagcctttctatcatttccagctagtgctgcagataagtgctatcgacaaagatataacccctcggaacgtgaagtttaaatttattctcaacactgaaaataattttaccctgactgacaatcacgataataccgccaatattacagttaagtacgggcagttcgaccgggagcacaccaaggtccactttttgcctgtggtaatcagcgacaatggaatgccatcccgcactggcacgtctaccctcacagttgcagtgtgtaaatgcaacgagcaaggtgagtttaccttttgtgaagatatggcagcccaagtaggggtatcaattcaggccgtggtcgccattctcctctgtattctgacaatcactgtcataaccttgctcattttcctcaggagaagactgcgcaagcaggccagggcacatggtaaatcagtgcctgaaatacacgagcagcttgtgacttacgatgaggaaggaggaggcgagatggatactacttcatatgacgtctctgttcttaacagtgtgcggcgcgggggtgccaaaccccctcggccagccctggacgccaggccatctttatatgcacaagtgcaaaaaccacctcggcatgcccccggggcccacgggggacctggagagatggctgcaatgatcgaagtgaagaaagatgaggcggatcatgatggggatggacccccctacgacactctgcacatctatggatacgaaggcagcgaaagcatcgccgagtctctttccagcctaggcaccgatagttccgacagcgacgtggattatgactttctcaatgattggggcccacggtttaagatgttggccgagctttacggttctgatccgagggaagaactgctatattag

SEQ ID NO: 14213 - DNA, 672 bp, synthetic construct
  misc_feature 1..672: note = Description of Artificial Sequence: Synthetic coding sequence
  source 1..672: mol_type = other DNA
atgccttcacgtactgggacctcgacactcacagtcgccgtgtgtaaatgcaatgagcagggggagttcaccttctgcgaagacatggcggcccaggtcggagtgtcaatccaggccgttgtagctatccttctttgcatcctcactatcacagtgatcactctcttgattttcctacggaggaggctgaggaaacaggccagggctcacggcaaaagtgtacctgagattcacgaacagctcgtcacctacgacgaggaggggggtggagaaatggatacaacctcctacgatgtttcagtgctaaattccgtcaggcggggaggagcgaagccacctcgccctgcccttgatgcccggccatcactgtacgcccaggtccagaaacccccccgccatgccccgggagcgcacggaggtccgggagaaatggcagcgatgatcgaggtcaaaaaagacgaagccgaccacgacggagatggcccgccctatgatacgcttcacatctatggttatgagggaagtgaaagcattgcagagagtctatccagtctcggcactgactcatcagacagcgacgttgattacgattttctcaatgactgggggccgaggttcaaaatgcttgccgaactttacggctccgaccccagggaagaacttctgtattag

SEQ ID NO: 14214 - DNA, 1578 bp, synthetic construct
  misc_feature 1..1578: note = Description of Artificial Sequence: Synthetic coding sequence
  source 1..1578: mol_type = other DNA
atgcccagtacttgctctaaagaaaacatgtgggcccggagttccgggtcaatgcagaggcaagaaacttgctctccactgcgcgcccagaatcggatgactaagtacagcatcctaagaggtgactatcaagatgctttcacaatcgagacaaatccagcgcacaacgaagggatcatcaaaccaatgaaacccttagattatgagtatattcaacagtattccttcattgtagaggctactgacccgaccatcgacctccgttatatgtcccctccggccggaaacagggcacaggtaataataaacattacagacgtcgacgaacctccaatctttcaacagcccttctatcacttccagttgaaggagaatcagaagaagccactgattggcactgtcctcgccatggatcctgatgccgcccgacactccatcgggtattcaattagacgaacttccgacaaggggcaattctttagagtgacaaaaaaaggtgacatatacaatgagaaggagttggatagggaagtgtacccctggtacaacctgaccgtcgaggccaaagagttggacagcacaggtacacccactggcaaagaaagtattgttcaggtgcatatagaggtgctcgacgaaaacgacaatgcccccgagtttgccaagccctaccagcctaaggtgtgtgagaacgctgtgcatgggcagttggtgctgcagatttcagcaatagataaagacataaccccaagaaatgtcaagtttaagtttattctgaacactgagaacaacttcacattgaccgacaaccatgataacacggcaaatatcactgtgaagtacggacaatttgatcgtgagcatacaaaggtacatttcctgcccgttgttattagcgacaacggcatgccctcccggaccggcacaagtacactcacagtagctgtctgcaaatgtaatgagcaaggggagtttacattttgcgaagatatggcggcgcaggtaggagtatctatccaagccgttgtcgccattctgctgtgtatactcaccataacagtgattaccctgctgatttttcttagacgaaggctaaggaagcaggccagagcccatggcaagagcgtaccagagatccatgagcagctggtgacttacgatgaagagggagggggcgagatggatactaccagctatgatgtgtccgtgcttaacagtgttaggaggggaggggccaagccccctcggcccgcgctggatgctcgtccctcattatatgcgcaggtgcagaagccccctcgtcatgctccaggtgctcatggcgggccgggggaaatggcagccatgatagaggtgaagaaagacgaagctgaccatgacggtgacggccctccctatgataccttgcatatctatggttatgaaggaagcgagtccattgccgagtctctcagttctctgggaaccgacagcagcgatagcgatgtggattacgatttccttaacgattggggacccaggttcaagatgctcgctgaactgtacgggtcagatccgcgcgaggagctgctttactag

SEQ ID NO: 14215 - DNA, 2373 bp, synthetic construct
  misc_feature 1..2373: note = Description of Artificial Sequence: Synthetic coding sequence
  source 1..2373: mol_type = other DNA
atgcgtacttaccgctactttctactgttgttttgggtgggtcagccttacccaaccctcagcaccccattgagcaagagaacaagtgggttccccgccaaaaaacgggctcttgagctgtccggcaactccaaaaatgagctgaaccgctctaagaggagctggatgtggaatcagtttttcctgcttgaggaatacactggtagtgattaccaatacgtgggcaagctgcactctgatcaggatcggggcgatggctccctcaaatatatactgagcggtgacggcgcaggagacctgttcatcatcaacgagaatacaggcgacatccaggcaaccaagaggctggatagagaagagaagcctgtgtatatactgagggcacaggccataaaccgacggacaggacgacctgttgaacccgagagcgaatttataatcaagatacacgacatcaatgataatgaacctatctttactaaagaggtgtacacagcgaccgtacccgagatgtccgatgtggggacctttgtggtccaagtgaccgccacggacgcagacgaccccacctacggaaacagtgcgaaggttgtgtactcgatcctgcagggtcaaccctacttctccgtggaaagcgaaactgggataataaaaaccgctttactgaatatggaccgggagaaccgcgagcagtaccaggtagtgatccaggccaaggatatggggggtcagatgggaggattatctggcacgacaaccgtaaacatcaccctcacagacgtcaatgacaatccgcctcggtttccccagtctacctaccagttcaaaacgccagagtcaagcccacctggaacacctatcggacggattaaagcctctgacgctgatgtgggcgagaacgcagagattgagtattccatcaccgatggcgagggcttagacatgtttgacgttattacagatcaagagactcaggagggcatcattactgtgaagaagttgctggacttcgagaagaaaaaggtctacacgttgaaagtagaagctagcaacccttacgtggagcctcgattcttatatctggggcccttcaaggactccgctacggttcgcattgtggtggaagacgtcgatgaaccgcccgtgttctccaagctggcttacatcctccagattagagaggacgcccagatcaacacaacgatcggttccgtgacagcacaggatcctgatgctgcacgtaacccagtgaagtacagtgtagacaggcataccgacatggaccggattttcaatatcgactccggtaatggtagcatttttacaagcaagcttttggatcgggagaccctgctgtggcacaatatcacagtgatagcgactgagattaacaaccccaaacagtccagccgtgttccattgtatattaaagtgcttgacgtaaatgacaacgccccagaattcgccgaattttacgagacatttgtctgcgaaaaggcaaaggcagaccagctaattcagacactgcacgcagtggataaagacgatccatacagcggtcaccagttctccttttcactcgctcctgaggccgcctccgggagcaatttcactattcaggacaacaaagataacacagccgggattctgacaaggaagaacggctacaatcggcacgagatgagcacatatctgctgccagtggtcattagtgataatgactaccccgttcagtcgtccaccgggactgtgacagtaagagtgtgcgcttgtgaccatcatggcaacatgcagtcatgccacgcagaagctctgatccacccgacgggactgtcaaccggagccttagtcgcgattctgctgtgcatagtgattttacttgtcacagtagttctgtttgcagcactgagacggcaacggaaaaaagagcctctcattataagcaaggaagatataagggataatattgtgtcttacaatgacgagggaggcggggaggaggacacccaggcattcgacataggtactctgagaaacccagaggcgattgaggacaataaactgcggagggatatcgtcccggaggctttgtttctacccagaagaacccctacagcgcgcgataataccgatgtccgggacttcataaaccagcggctgaaggagaacgacacagaccccactgccccgccctacgatagcctcgcaacgtacgcctacgaggggaccgggagcgttgccgactccctctcttcactcgagtctgttaccacagacgcagaccaggactacgattatctcagcgattggggcccgcgtttcaaaaaactcgctgacatgtacggcggggtagactcagataaagacagttag

SEQ ID NO: 14216 - DNA, 576 bp, synthetic construct
  misc_feature 1..576: note = Description of Artificial Sequence: Synthetic coding sequence
  source 1..576: mol_type = other DNA
atgggcggatcagggtctcggctcagtaaagaattgcttgctgaatatcaggatctgacctttctaacaaaacaagaaattctgcttgcacacagacggttctgtgagctgctgccccaagagcagagatcagttgagagctctctgcgcgcccaagttccattcgagcaaattctctcactccctgagctcaaggccaacccattcaaagaacgcatttgccgggtttttagtacttcacccgcgaaggactccctgagtttcgaggactttttggatttgctgtcagtcttctccgatactgctacccccgatataaagtctcactacgcattccgcattttcgactttgatgatgacggaaccctgaacagggaagatcttagtaggttagtgaattgcctgactggcgagggagaggatacacgactgtccgcatctgaaatgaagcaattgattgacaacatcctcgaggagagcgatatcgacagagacgggaccattaatctttcggaatttcagcacgtgattagtagaagcccagactttgcctcatctttcaaaattgtgctgtag

SEQ ID NO: 14217 - DNA, 237 bp, synthetic construct
  misc_feature 1..237: note = Description of Artificial Sequence: Synthetic coding sequence
  source 1..237: mol_type = other DNA
atgtcagaggtgctgccatacggagacgagaagctctcaccttatggcgacgggggcgatgtcggtcaaattttttcatgtagattgcaggacacaaataattttttcggcgccgggcagaataagcggccccccaaactgggccagatcggaagaagtaagcgtgtagtcatagaagacgataggattgacgacgttctaaagaacatgaccgacaaggcacctcctggagtctag

SEQ ID NO: 14218 - DNA, 1563 bp, synthetic construct
  misc_feature 1..1563: note = Description of Artificial Sequence: Synthetic coding sequence
  source 1..1563: mol_type = other DNA
atggagggtggacccgccgtgtgctgtcaggacccgcgagccgagctagtcgaaagggtggctgcaatcgatgtgacccatttggaagaggctgacggggggcctgaacctaccagaaatggtgtagacccaccaccccgggcccgagctgcatcagtaatccctggctccacttcacggctgttgccagcccgaccgagcctgtccgcacggaaactgtcactccaggagcgacctgccggatcttacctggaggcgcaggctggtccctacgctaccgggcctgcaagtcatatctctccacgcgcatggcggcggcctaccatagagtcccaccacgtggccatctctgatgccgaagattgcgtgcaattgaaccagtataagctgcagagcgaaattggaaaaggagcgtacggcgtagtgcggttggcctataatgaatccgaagaccgccactacgcaatgaaggtgctgtctaaaaagaagctgctaaagcaatatggttttcctaggcggccaccaccgcggggcagccaagccgctcagggcggaccagccaagcaattattgccactggagcgtgtgtaccaagaaatcgccattctgaaaaagctcgaccatgttaacgtcgtcaagctgatcgaagttcttgatgaccctgccgaagataatttgtacctagccttacagaaccaggctcagaacatccagttggacagcactaacatagccaagccccatagcctgcttccctctgaacagcaggattccgggtcaacatgggccgcacgcagtgtcttcgacctgctgcgaaaaggacctgtgatggaggtgccctgtgataaaccttttagcgaagaacaggcccgactgtatcttagggacgtgatccttggcctggagtacctgcattgccagaagatcgtccacagggatattaaacctagcaacctgttactcggcgacgacggccacgttaagatagcagactttggtgtttccaaccaattcgagggaaacgatgctcagttgagctccacagccggcacgcccgctttcatggcacctgaagcaattagcgattctggacagtcattcagtggaaaagccctagatgtgtgggccaccggcgtgacactttattgttttgtgtacgggaaatgcccattcattgacgatttcatacttgcacttcatagaaagatcaagaacgaacccgtggtattccctgaggagcctgagatttctgaggagttgaaggatttaatcctgaaaatgttagataagaatcccgagactcgaattggcgtgcccgatatcaagctacacccctgggttaccaaaaatggagaggaaccactgccaagcgaggaggagcactgctctgtcgtggaagttactgaagaggaggtgaaaaatagcgttaggcttatccccagctggaccactgtcatcctggtcaagtctatgctaagaaaacgctcttttgggaatcctttcgagcctcaggctaggagagaggaacggagcatgtccgccccaggtaacctgttagtgtag

SEQ ID NO: 14219 - DNA, 1518 bp, synthetic construct
  misc_feature 1..1518: note = Description of Artificial Sequence: Synthetic coding sequence
  source 1..1518: mol_type = other DNA
atggaggggggccctgcggtgtgctgccaggaccctcgggccgagctggtagaaagggttgccgccatcgacgtaacccacctggaggaggcagatggaggtcccgaacccactaggaatggggtcgatcctccgccacgggccagggcagcaagcgttatcccaggatcgacctccagactgctgccagcccggccttctctgagtgcccggaaattaagcttgcaggagagacccgcaggaagctaccttgaagctcaggcaggcccctatgccactggtcctgcaagtcatattagtccccgggcctggagaagaccaacaatagagtcccatcacgtcgcgatctccgacgcggaagactgtgtccagctgaatcagtacaaattgcagtcagagatcggcaaaggcgcctacggcgtcgtgagactggcatacaatgaaagcgaggacagacattatgccatgaaggtgctgagtaagaaaaagctccttaagcagtacggcttccctagacgccctccacctagaggcagtcaggccgcccaagggggcccggccaaacagctgctgccgcttgagcgggtgtaccaggaaatcgccatcttgaagaaactcgatcatgtgaacgtggttaagctaattgaagttcttgatgaccccgctgaagacaacctttatctcgttttcgatctactgcggaaggggcctgttatggaggtgccctgcgacaaaccattctcagaagaacaagccaggctgtacctaagagacgtcattctggggctagaatacctgcactgtcagaagatcgtacatcgggatattaagccttcaaacctgctgctgggtgatgatggacatgtgaaaatagctgatttcggcgtatcaaaccagtttgaaggaaatgatgctcaactgagttccacagcaggcaccccagcattcatggctcccgaagccatttccgattccggccagtcattcagcggcaaggctcttgacgtctgggctactggggtgacactttactgcttcgtatacggcaagtgtcctttcatcgacgatttcatcttggctctgcaccgcaagattaaaaacgaacctgttgtgttccctgaagagccagaaatttccgaagagctgaaggatctcattttgaagatgctggacaaaaatccggagactcggataggagtgcctgatataaagctacatccttgggtgactaaaaacggagaagaaccgctcccatccgaagaagaacactgctcagtagtggaagtaacggaggaagaagtaaagaatagcgtgcgtttgatcccttcctggacaaccgtcatcctggtgaaaagtatgttaagaaaacgctcctttgggaacccctttgagccacaagccagaagggaagagcgttccatgtccgcaccaggcaacctcctggttaaagagggttttggggagggggggaaatctcctgagctgcccggcgtgcaggaagacgaggccgctagttag

SEQ ID NO: 14220 - DNA, 1599 bp, synthetic construct
  misc_feature 1..1599: note = Description of Artificial Sequence: Synthetic coding sequence
  source 1..1599: mol_type = other DNA
atgcagtttggaaaactctggtgtggctgttctggcgaattccctactcgtctgcgtcgtcgcacgcctttaacggaagccatggagggcgggcccgccgtgtgctgtcaagacccccgcgcggagctggtggagcgggtggctgccatagatgtcacccacctcgaagaggccgacgggggccccgaacccacccgcaacggcgtcgatcctccccctcgggcgagagctgcctcagtgattccaggaagcaccagccggttgctccctgcgcggcctagcttgagtgcccgtaagctgagcttacaggaacggcctgcaggatcatatctggaggctcaagcaggcccatatgctactggaccagcaagccacatcagccctcgagcctggagacgccccaccatcgagtcccatcacgtggccatatcggacgcagaggactgtgttcagttgaaccagtataagctccagtcagaaatcggaaagggagcttacggcgtggtgagattggcatacaatgagtcagaggatagacactacgcaatgaaggtgctgtccaagaagaaacttcttaaacaatatgggtttcctcgccggccccctccccggggcagtcaggccgcccagggcggcccggctaagcagctgctgcccctggaacgggtgtaccaggagatcgcaatcctgaagaaactggaccatgtgaacgtcgttaagcttattgaggtcctagatgatccagccgaagataatttgtacctggttttcgatctgctgagaaagggcccagtgatggaggtaccttgcgacaagcccttctccgaggagcaagccaggctttacctcagagatgttattttaggtctcgagtatctgcactgccagaaaattgtgcatcgggatattaagccgtcaaatctgctgctaggcgatgatggccacgtgaagatcgcggatttcggcgtttctaatcagtttgagggaaacgacgctcagctgagttccactgctggcactcccgcctttatggcaccagaagcaattagtgacagcgggcagagtttctctgggaaagctctagacgtgtgggccaccggcgtgacactgtactgctttgtctacggaaagtgcccgttcatagacgatttcattctggctttgcatagaaaaatcaagaacgaaccagtggtttttccagaagagccggagatcagcgaagaactgaaggacctgattctcaagatgctggacaaaaatccggagactcgcataggtgtccccgatataaaactccacccatgggtgaccaagaatggagaggagccactgccttccgaagaagaacactgttcagtcgtggaggttaccgaagaagaagtcaagaactcagtgcggctcattcctagctggaccaccgttatcctagtaaaatccatgctcaggaagcgctcattcgggaacccctttgagccacaggcccggagagaggaaaggtccatgagcgcgccaggcaatctactcgtgaaggagggctttggtgagggtggaaaatcccccgagctgcccggagtgcaagaggatgaagctgccagttag

SEQ ID NO: 14221 - DNA, 1632 bp, synthetic construct
  misc_feature 1..1632: note = Description of Artificial Sequence: Synthetic coding sequence
  source 1..1632: mol_type = other DNA
atggaggggggccccgccgtttgctgccaggatcccagggcagagctcgtggaacgggtggccgctatagacgtgacccaccttgaagaagctgacggcggacctgaaccgacacggaacggggtcgacccccctccgagggcgagggccgcgtcggtgatacccgggtccacctctcggctcctgcccgcgaggccatccctgtccgcacgaaaactctctctgcaggagaggcctgctgggagttatcttgaagcccaggctggcccatatgcgacgggcccggcctctcatatcagccctagggcctggcgccgcccaactattgagagccaccacgtggctatttcggatgcggaggactgtgtgcaactgaatcagtacaagctgcaatccgaaatcggaaaaggcgcatacggagtggtgcggctggcgtacaatgagagcgaggatcgtcattacgctatgaaagtcctgagcaagaagaaactgttgaaacagtatgggttcccaaggcggccccccccccgtggttcccaggctgcccagggcggacctgctaagcagcttcttcctctggaacgtgtgtatcaagagattgccatcttgaaaaagctcgaccacgtcaacgtggtaaagctcattgaggttttggatgaccctgcagaagacaatctgtatctggccctgcagaatcaggcccaaaacattcagctcgattcaacaaacatagcgaagccccatagtctgttaccttccgaacaacaggactctggatctacatgggccgccagaagcgtattcgacctgctgcgtaaaggtcccgtgatggaagtgccttgtgacaagcccttttccgaagaacaagccaggctctatctgagagacgtgattttgggactcgagtatctgcattgccagaagattgtgcatcgggacatcaagccttcgaacttactgcttggggatgatggccacgtgaaaatcgcagattttggggtgtcaaaccagtttgaaggcaatgatgcacagctgtctagcactgccggcacacccgccttcatggcacccgaagctatctctgactcaggtcagagtttttctgggaaggcattggatgtatgggccaccggggttactttgtattgctttgtttatgggaagtgcccctttattgatgacttcatcctggcacttcacaggaaaatcaagaacgagcctgtggtgttccctgaggaaccggaaatctccgaggagctgaaagatcttattctcaaaatgctcgataagaacccagagactcgcattggggtgccagatattaaactgcatccgtgggtaaccaaaaatggagaggagcctctccctagcgaggaggagcattgctcggtagtggaagttacggaagaggaagtaaagaacagtgtccgcctaattccctcctggactacagtgatcttggtgaaatccatgttgcggaagcgtagtttcggtaatccctttgagccacaggccaggcgtgaagaacggagcatgtccgccccaggcaacctgctggtgaaagagggtttcggagagggaggcaaatcccccgagttacccggcgttcaagaagatgaagctgcgtcttag

SEQ ID NO: 14222 - DNA, 1695 bp, synthetic construct
  misc_feature 1..1695: note = Description of Artificial Sequence: Synthetic coding sequence
  source 1..1695: mol_type = other DNA
atggatgactttgagcggcgccgcgaacttaggcgtcaaaagcgcgaggagatgcgtctggaggctgagcgaattgcctatcagcgcaacgatgatgacgaagaagaagcagccagagaaaggcgcagaagagcaaggcaggagcggctccgacagaaacaggaggaagagtccctgggccaggtgacagatcaggtcgaggtaaacgcccagaacagcgtccctgatgaagaagcgaaaaccaccaccaccaatacgcaggtggaaggcgatgacgaggctgcctttctggaacggctagcaagaagggaggaacggcgccagaaaagacttcaagaggccctcgaaaggcagaaggagtttgaccccacaattaccgacgcctcgttgtcattgccatccaggcgtatgcaaaacgataccgctgaaaacgagactacggagaaggaggagaaaagcgagtcgagacaggagcgctatgagattgaagagactgagaccgtgaccaaatcttatcagaagaatgactggagggatgctgaggagaacaaaaaagaggataaagagaaggaggaagaggaagaggaaaaaccaaaacgcggttctattggggagaaccagggtgaagagaaagggactaaagtgcaggcaaaacgcgagaaactgcaggaagacaaacctacatttaagaaggaagaaatcaaggacgagaaaatcaagaaagacaaggagccgaaggaggaggtcaaaagctttatggacaggaaaaagggttttacagaggtgaaatctcagaacggagaatttatgacccataagctgaagcataccgaaaacaccttttctcgacccggaggtagagcctccgtggacactaaggaggctgaaggggcgcctcaggtggaagcggggaagcgacttgaagaactacgtaggaggcgcggagagactgagagcgaggagtttgagaaactcaagcaaaagcaacaggaagccgccctcgagctggaagaactgaaaaaaaaacgggaggaacggagaaaagtattggaggaagaggaacagcgacgcaaacaggaagaagccgatcgcaagcttcgggaggaggaagagaaaaggcgtctgaaggaagaaatagagagaagacgagccgaggcggcggaaaagcgtcagaagatgccggaagacggcctgtcagatgataagaaaccatttaagtgttttaccccaaagggctcgtcactcaagattgaagaacgagccgagtttcttaataagagcgtacagaagagctctggtgtgaagtctacccaccaggccgcaatcgtttccaaaatagattctcggctggaacagtacacctcagctatcgagggtacaaagagcgccaaacccaccaagcctgccgcctcggatctgccagttcccgccgaaggcgtgagaaatattaagtctatgtgggaaaaggggaatgtgttttcgagcccaaccgctgctgggacgccaaataaggagaccgccgggctaaaggtgggcgtatcttcacgcattaatgagtggctgacaaaaacccctgacggcaataaatcccctgcacccaaaccgagcgacctccgaccaggcgacgtatccagcaaaagaaacctctgggagaaacagtcggttgacaaagtgacttcccctactaaggtttag

SEQ ID NO: 14223 - DNA, 2382 bp, synthetic construct
  misc_feature 1..2382: note = Description of Artificial Sequence: Synthetic coding sequence
  source 1..2382: mol_type = other DNA
atggatgatttcgagcggcgcagggagctcaggagacagaaaagagaagaaatgcggctggaagcggagaggattgcctaccaaaggaacgatgatgatgaagaggaggcagcaagagaacggaggagacgagccaggcaggagcgcttgcggcagaagcaggaggaggaaagcctcggccaggttaccgatcaggttgaagtaaatgcacaaaattctgtgcccgacgaggaagccaagactactactactaatacacaggtagagggagatgacgaggcagcttttctggagcgcctcgcccggcgggaggagcgacgtcaaaagaggctgcaggaggccttagaacggcagaaagagtttgatccgaccattactgacgctagcctgtcactcccttcaaggcgtatgcagaacgataccgccgaaaatgaaaccacggaaaaagaagagaagtcggagtctcgccaggagagatatgaaatcgaagagaccgaaacagtaaccaaatcgtaccagaaaaacgattggagggacgcggaggagaacaaaaaagaagataaggagaaagaagaggaggaagaggaaaaaccaaaacgaggatccattggtgaaaatcaggttgaggtgatggtggaagaaaagactaccgaaagtcaggaagaaacagtggtaatgagtctgaagaacggccagatcagctcagaggaacctaagcaggaagaagagagggaacaaggaagcgatgaaatctcccatcacgaaaaaatggaagaagaagacaaggagcgagcagaagccgaacgcgctcgcctggaggcagaagagagggagagaatcaaagctgaacaggacaaaaaaatcgccgacgagagggcccgaatcgaagccgaagagaaagcagcggctcaggaacgggagcgtcgggaggctgaagagagggaaaggatgcgggaagaagagaaacgcgcagcagaggagcggcaacggattaaggaagaagagaagagagccgccgaagaaagacaaaggatcaaggaggaagagaaacgagctgccgaagaacgtcaaaggattaaggaggaggaaaagcgggcggctgaggagcgacagcgggctcgggccgaggaggaggagaaggccaaagttgaagagcaaaagaggaataagcagctcgaagagaaaaaacatgcgatgcaagaaactaagatcaagggcgagaaagtcgaacagaaaatcgagggaaaatgggtgaatgaaaaaaaggcccaagaggacaaactccagacagccgttttaaaaaaacaaggggaagagaagggtacaaaagtgcaggccaaaagggagaagctgcaggaggataagcctacattcaagaaggaggagatcaaggacgaaaagattaagaaagacaaggagcccaaggaggaagtgaaatcgtttatggaccgaaagaaaggcttcacagaggtgaaatcccagaacggggagttcatgacacacaagctgaaacacaccgagaatacattctccagacctgggggtagagcgtcagtggacacaaaggaggcagagggagccccccaagtcgaggccgggaaacgtctggaagaattgcgtcgccgcaggggagagacggaatcagaggagttcgaaaaactaaagcagaagcaacaggaggccgcactggagctcgaggagcttaagaagaaacgagaggagcggcggaaagtactggaggaagaagagcaacgccggaagcaggaggaggccgacaggaagctccgagaggaagaggaaaaaaggcgcctgaaagaagagattgagcgaaggagagccgaggctgctgagaagaggcagaagatgcccgaggatgggctgagtgatgacaaaaagcctttcaagtgttttacccccaaagggtcatcactaaaaatagaggaaagagccgagtttctcaacaagtccgttcagaagtcttctggtgtcaagagcacccaccaggccgctatcgtaagtaaaatcgattcccggcttgagcagtacacctctgccatcgagggtacgaaatccgctaaacccacaaaaccagcagcttctgatctgcctgtacctgctgagggggtgcgcaacataaaaagcatgtgggaaaaggggaatgtgttcagcagccctaccgctgccgggacacctaacaaggagaccgccggcctgaaggtcggcgtaagctctagaataaatgaatggctcacgaagaccccggacggaaataaaagccccgcccctaagcccagcgacctgcggcccggggacgtgtctagcaaacgcaatttatgggaaaaacagagtgtggataaggtgacctcacctaccaaagtgtag

SEQ ID NO: 14224 - DNA, 1617 bp, synthetic construct
  misc_feature 1..1617: note = Description of Artificial Sequence: Synthetic coding sequence
  source 1..1617: mol_type = other DNA
atggatgactttgaaaggcgccgtgagctcagaagacaaaaacgtgaggagatgagactcgaagccgaaagaattgcctatcagagaaatgacgacgacgaggaagaagcagctcgcgaaaggcgaaggagggcccggcaggagcgcctcaggcaaaagcaagaagaagagtccctgggacaagttacggatcaggtggaggtcaacgcacaaaattccgttcccgacgaggaggccaagaccacaacaaccaacacacaggtggaaggcgatgacgaggcggctttcctggagaggctggcccggagagaggagcgccgccaaaaaaggcttcaggaagctttagagaggcaaaaagaattcgacccaaccattactgatgcttccttgtcccttccaagccgccgaatgcagaacgacacagcagagaacgagactacagaaaaagaagagaagagcgagagtaggcaagaaaggtacgagatcgaggaaaccgaaaccgtgaccaaaagctatcagaagaacgactggcgcgacgctgaagagaataaaaaagaggataaagaaaaggaggaggaagaggaggagaagccaaagcgcggctcaatcggcgagaaccaaataaaggacgagaagatcaagaaggataaagaacccaaagaggaggtgaaatcttttatggaccgcaaaaaggggtttacagaggttaaatcacaaaatggagagtttatgactcataagctcaagcacactgaaaataccttcagtcgccccggcggaagggccagtgttgataccaaagaagccgagggcgctcctcaagtggaggctggaaaacgtctggaagagctcagaagacgacgcggcgagactgagagcgaggagtttgaaaagctgaagcaaaagcagcaagaagctgcactggagctggaagagttaaagaagaagagggaagaacgccgaaaggtgttggaggaagaagagcaacggcggaagcaagaggaagccgacaggaaactgcgggaagaggaggagaagcgaagactgaaggaagaaatcgaacgccgccgggccgaggcagccgagaagagacagaaaatgcccgaggatggtctttcggatgacaaaaaacccttcaaatgttttaccccgaagggctcatccctaaagatcgaggaacgcgccgaattcttaaacaaaagcgttcagaagtcatcaggcgtgaaaagcacccaccaagcggctattgtgagtaagattgacagccggttggagcagtacaccagcgcgatagagggtacaaaatcggccaagccaaccaaaccagctgcctccgacttgccggtgccagcggaaggcgttaggaatatcaagagcatgtgggagaaggggaatgtctttagctcacccactgctgctggtaccccaaataaggaaactgccggactaaaggtgggggtgtcttcaaggatcaacgagtggcttactaaaacacctgacggaaataaaagtcctgctcccaaaccatccgatctgagacctggagacgtgtccagtaaacgcaacctgtgggaaaagcagtctgtcgataaagtaacatccccaactaaagtctag

SEQ ID NO: 14225 - DNA, 1677 bp, synthetic construct
  misc_feature 1..1677: note = Description of Artificial Sequence: Synthetic coding sequence
  source 1..1677: mol_type = other DNA
atgcttggagggagtggcagtcacgggcggcgcagtctcgctgccctgtcccagattgcttaccagcggaatgacgatgacgaggaggaagccgcgcgagaaaggaggcgccgggcaagacaggagaggctcagacagaagcaagaagaggaatcattgggccaggtgaccgaccaggtggaggtgaacgcgcagaacagtgtgccagatgaggaggcaaagacgacaaccacgaacacacaggtggaaggcgacgatgaagctgcattccttgagcggctcgcgagaagggaagaaaggcgccagaagaggttgcaggaggctctggagagacagaaggagttcgaccccacgataactgacgcttctttgtccttgccttctcgaaggatgcagaatgatactgccgagaatgagacaacggagaaggaggagaaatccgaaagccgccaggagcgttatgagatcgaggagactgagaccgtaaccaagagctaccagaagaatgactggagagatgccgaggagaacaaaaaggaggataaggagaaggaagaagaagaagaagaaaaaccaaagagaggaagcataggggagaaccagggagaagaaaaggggacgaaagttcaggctaagcgcgagaagctgcaagaagacaagccaactttcaagaaagaagagatcaaagatgagaagataaaaaaggacaaagagccgaaggaggaagtcaagtccttcatggaccgtaagaagggtttcacagaggtgaagtcccagaatggagaattcatgacccacaagcttaaacacacagagaatacctttagtcggccagggggccgcgcttccgtagacaccaaggaagctgagggagcacctcaagtcgaggctggtaaaaggctggaggagttacgcaggcggcgcggagagactgagagtgaagagttcgagaaattgaaacagaagcagcaggaagcggccctcgaactggaggaactcaaaaaaaagagagaagagcgacggaaagtcctggaagaggaagagcagagacggaagcaggaggaggcagaccggaagttaagggaagaggaagagaaaagacggctcaaagaggaaattgagcggcggcgtgccgaggccgctgagaagaggcagaagatgccagaggatggcttgtctgacgacaaaaaaccctttaaatgcttcactccaaaaggtagctcactcaaaatagaggagcgggccgagtttcttaacaagtcagtacagaaatcctccggagtgaagagcacccaccaagccgcaattgtatctaagatcgatagtcggttggagcaatatacttcggctatcgaaggcaccaaaagcgctaaacctaccaagcccgcggctagcgatctgcctgtacccgccgaaggagtgaggaatatcaaatccatgtgggagaaaggaaacgttttctccagtccaaccgctgccggcaccccgaataaagagacagcgggtctgaaggttggggtgagtagtcgcataaatgagtggctaactaagactcccgacggcaataagtcgccggcccctaaaccatctgacctccgtccaggcgatgtcagttctaagaggaatctatgggaaaagcagtctgtagacaaagtgacctccccaacgaaggtgtag

SEQ ID NO: 14226 - DNA, 1617 bp, synthetic construct
  misc_feature 1..1617: note = Description of Artificial Sequence: Synthetic coding sequence
  source 1..1617: mol_type = other DNA
atggacgactttgaaaggagaagggaactgagaaggcagaaaagagaggagatgaggctcgaggccgaaagaatcgcgtaccaaaggaacgacgacgatgaggaagaagccgctcgggaaagacgaagaagggccagacaagagcgactcagacagaagcaggaagaggaatcactgggacaggttaccgatcaggtggaagtaaacgcccaaaactctgtgcctgacgaagaagctaaaactacaactactaatacacaggtcgaaggcgatgacgaggcagcattcctcgagagactcgctcgcagggaggaacgcaggcagaaacggcttcaagaggctctggagcgtcagaaagagtttgacccaacgattacagacgccagtctgagtcttccgtcccggcgcatgcaaaatgacactgccgagaatgaaactaccgaaaaagaagagaaatccgagagccgacaggagcgctacgagattgaggaaaccgagaccgtaacaaaaagttaccagaaaaatgattggagagatgctgaggagaataagaaagaagataaggaaaaagaagaggaggaggaggagaaacccaaaagaggatctattggagagaatcaaattaaagacgagaagatcaagaaggataaagagcctaaggaggaagtgaaatctttcatggataggaagaaagggtttacagaagtcaagtctcaaaatggcgagtttatgacgcataaactcaagcacacggagaacaccttcagccggcccggcggacgcgcctctgttgatactaaggaggccgagggggctccgcaggtcgaagctggaaagcggcttgaagagctaagaagacgcaggggcgaaacagaatcagaggaattcgaaaaactgaaacagaaacagcaggaggcggcgcttgagctggaggagctcaaaaaaaaaagggaagaaagacggaaagtgctggaggaagaagagcagaggaggaagcaggaagaggctgaccggaaactccgggaggaagaagaaaagcgaagattgaaggaggagatagaaaggcgcagggccgaggcagctgaaaaaagacaaaagatgcctgaggatggcttatccgatgataaaaagcccttcaagtgcttcactcccaaggggtcgtccctgaagatagaagaacgagccgaattcttgaacaagtccgtccaaaaatcctcaggcgttaagtcaacccaccaggccgctatcgtgagcaaaattgatagcaggcttgagcaatacacaagtgcaatcgaagggacaaaatccgctaaacccacaaagccggctgccagcgacctgcctgtacccgcagaaggagtgcggaacatcaaaagcatgtgggagaaaggtaacgttttctcttcgccgactgccgctggcacgccaaacaaagaaactgcgggactaaaggtcggagtcagcagtcgaataaacgagtggctaacaaagactcctgatggcaacaagagtcccgcacccaaaccttccgacctgcgccctggcgatgtttcttccaaacggaacctctgggagaaacagtccgtcgacaaggttacttcacccaccaaggtatag

SEQ ID NO: 14227 - DNA, 1692 bp, synthetic construct
  misc_feature 1..1692: note = Description of Artificial Sequence: Synthetic coding sequence
  source 1..1692: mol_type = other DNA
atggacgactttgaaaggaggagggaactgagaaggcaaaagcgcgaagaaatgaggctggaggcagagagaatagcttatcagagaaatgacgatgatgaggaggaagccgctcgcgaacgtcgcagacgggctcggcaagagaggctccgacaaaaacaggaggaggagtcgctagggcaggtgaccgaccaggttgaggtgaatgcacagaattctgtccctgacgaggaggccaaaacgaccacaacaaacacccaggtcgagggcgacgatgaagcagccttcctcgaacggcttgcccggagggaggagaggcggcagaaacgactgcaggaggctctggaaagacagaaagagtttgaccctacaattacggacgcaagtctgagtctgccatcccgtagaatgcagaatgataccgccgagaatgagaccactgaaaaggaggaaaagagcgagtcgagacaggagcgctacgagatcgaggaaacggagactgtgaccaagagttatcaaaagaacgattggcgggacgcggaagagaacaagaaggaagacaaggaaaaggaagaggaagaagaagaaaaacctaagagaggttccattggtgaaaatcagggggaggagaaaggcactaaggtgcaggccaaacgcgaaaaactgcaagaagataaacctacttttaaaaaagaagagattaaagatgaaaaaattaaaaaagataaggagccaaaggaggaggtcaaatcgttcatggataggaagaagggcttcaccgaggtaaagtcccagaacggagaattcatgactcacaagctgaagcacactgaaaacaccttctctcgacccggcggtcgggccagtgtggacacaaaagaagctgagggggccccgcaggtggaggccgggaaacgcctcgaggaactgcgcaggagacgaggcgaaactgaatccgaggaattcgaaaagctgaaacagaagcagcaagaagccgccctggaactggaggagttaaagaagaaacgggaggaacgacgaaaagttcttgaagaagaggagcagaggaggaagcaggaagaggccgaccggaagctgagggaagaagaggagaagcggcgtctcaaagaagaaattgaacgacgaagagcggaagccgctgagaagaggcaaaaaatgccagaagatgggctgagcgatgacaaaaagcccttcaaatgttttactcctaaaggtagcagcctgaagattgaagaacgcgcagaatttctcaacaagagtgtgcaaaagtctggtgttaagagcacccatcaagccgcgatagtttccaagattgacagcaggctggagcagtacacctctgccatcgaaggaaccaagtcagcaaagccgactaaaccagcagcgtcagacctgcccgtgcccgcggaaggagtgcggaacatcaaatcaatgtgggaaaaaggtaacgtcttttcctcacccaccgctgcagggactcctaataaggagacggctgggctcaaagtcggtgttagttcgcgaatcaacgaatggctcaccaaaaccccagatggaaacaagagcccagcccccaagccatctgacctgaggcccggcgatgtgtcgagcaaaaggaacctgtgggaaaagcagtccgtagataaggtgaccagcccgactaaagtatag

SEQ ID NO: 14228 - DNA, 1599 bp, synthetic construct
  misc_feature 1..1599: note = Description of Artificial Sequence: Synthetic coding sequence
  source 1..1599: mol_type = other DNA
atgctaggaggctctggtagtcacgggaggcgcagtttagcagccttatcacagatcgcgtatcagcgcaacgacgacgatgaagaggaggctgcccgggagcggaggcgacgggcccggcaggagaggctgcgacagaagcaggaggaggaaagcctgggacaggttaccgaccaggtggaagtcaacgcccagaactctgttcctgacgaggaagctaagacaacaacaaccaatacacaggtggagggtgatgatgaagctgcttttttggaacggctcgcacgccgcgaggaacgtaggcagaagcgcctgcaggaggcgttggaacgacagaaagagtttgaccccaccataactgacgcgagcctttctctacccagtcgccgtatgcagaatgataccgctgagaacgaaacgaccgagaaggaggagaaatccgaatctcggcaggagcggtatgaaattgaggaaacagagacagtgaccaagtcctaccagaaaaacgactggcgtgatgccgaggaaaataaaaaagaggacaaagagaaagaagaagaagaggaggagaagcccaagcggggatccatcggcgagaatcaaattaaagacgaaaaaataaagaaagacaaagagccaaaggaggaggttaagagttttatggaccgtaaaaaaggctttaccgaagttaaatcccagaatggggaattcatgacacacaaactgaaacacactgaaaacaccttctctagacccgggggccgcgcgagcgttgataccaaagaagctgagggggcccctcaggtggaggcaggaaagcgcctggaggagttacgacgccgcagaggcgagaccgaatccgaggagttcgaaaagctgaaacagaaacagcaggaagccgccctagaactggaagagctgaagaagaagcgagaggaacgtcgaaaagttctagaagaggaagagcaaaggcgaaagcaggaggaggccgataggaaactgagggaggaggaggagaagcggcgactaaaggaggagatcgaacgaaggcgcgcagaggctgccgagaagcgacaaaagatgccagaagacggcctgtctgacgacaaaaagccatttaagtgtttcacccctaaaggatcttcactgaagattgaggagcgagcagagtttctgaacaaatctgtgcagaagagctctggcgtcaagtccactcatcaggccgctatcgtgagcaaaatcgacagccgattagagcagtatacttcggccattgaagggactaaatccgctaagccaacaaagccggcggcctctgacctgcctgtgcctgcagaaggagtgcggaacatcaagtcaatgtgggaaaaggggaatgtgttcagttcaccgactgcagcaggcacgcctaacaaggaaactgcagggctgaaggtgggtgtaagtagcaggattaacgagtggttaactaagacaccagacggcaataaatccccagccccaaaacccagcgatctccgtcccggggatgtctcttcaaagagaaatctgtgggaaaaacagtcggtggacaaggtaactagtcccaccaaagtctag

SEQ ID NO: 14229 - DNA, 528 bp, synthetic construct
  misc_feature 1..528: note = Description of Artificial Sequence: Synthetic coding sequence
  source 1..528: mol_type = other DNA
atgccagaggacggcctctctgatgataaaaaacccttcaagtgtttcacacctaaagggagctccctgaaaatagaggagagagccgagttcttgaataagtccgtacagaaaagcggtgtcaaatctacccaccaggccgcaattgtgagcaagatcgatagtaggctagagcagtacacttctgccattgagggcaccaaatctgccaaacctacaaaacctgccgcatcggacctgcctgtccctgcagagggcgtacgcaatattaagtctatgtgggaaaagggaaacgtgttttcttccccaaccgcagccggaaccccaaataaagaaactgcgggacttaaagtgggcgtgagctcaaggattaatgaatggttgaccaagacccctgatgggaacaagtcaccggcacccaaaccgtctctgacattctgcagtagcctgttcggcttgtggttaataggtaacctcctgctcctccctagctttctgccactgctgcccgagtgggtcttcctgtag

SEQ ID NO: 14230 - DNA, 219 bp, synthetic construct
  misc_feature 1..219: note = Description of Artificial Sequence: Synthetic coding sequence
  source 1..219: mol_type = other DNA
atggatgacttcgagcgcagacgggagctacggaggcaaaagcgggaggagatgcgcttagaagccgagcgcatcgcataccagcggaatgatgacgatgaggaagaggctgcccgcgaaaggcgccgcagggcacgccaggagcgcttgcgtcagaagcaggaggaggaatccctggggcaggttacagatcaggttgaagtcaacgcccagaactag

SEQ ID NO: 14231 - DNA, 1380 bp, synthetic construct
  misc_feature 1..1380: note = Description of Artificial Sequence: Synthetic coding sequence
  source 1..1380: mol_type = other DNA
atggatgatttcgaaaggagaagagaactgcgccggcagaaacgagaggaaatgcggttggaggccgagaggatcgcataccaaaggaacgacgacgatgaggaagaagcagccagagagcgtcgtcggcgggcccgacaggaacgtttaagacagaagcaagaggaagagagtctaggtcaagtcactgatcaggtagaggtgaacgcgcaaaattccgtgccagacgaggaagctaagaccacaacaaccaatacccaagtcgagggagatgacgaggccgcattcctggagcgactggcccgaagggaagagcggcggcaaaagagacttcaggaggcccttgagcggcagaaggagttcgaccctaccattaccgacgcctcattgtccctgccctctcgcagaatgcagaacgacactgcagagaacgagactaccgaaaaggaagagaaatcggaatcccgtcaggagaggtacgagatagaagaaactgagacagtgactaaatcctatcaaaaaaacgactggagagatgccgaggaaaataagaaagaggacaaagagaaagaagaggaagaggaagaaaaaccgaagcgggggtctatcggagagaatcagatcaaagatgagaagataaaaaaggacaaagaacccaaggaggaagtcaagagctttatggaccggaagaaggggtttactgaggtgaaatcccagaacggcgaattcatgacccacaaactgaagcacacggagaacacgttctctagacccggtggcagggcttccgttgatacaaaagaggcggaaggtgctccacaggttgaagccgggaaacggctggaagagctgcgcagacgccgcggggaaacggagagtgaagagttcgagaagctgaagcaaaagcaacaggaagcagctctggagttggaggagctgaagaagaagagggaggaaagacgcaaggtgctagaggaggaagagcagaggaggaagcaggaggaagccgatcgaaagctgcgggaggaagaggaaaaaagacgactgaaggaggagatcgagcgcagacgtgccgaggctgctgagaagagacagaagatgcctgaggatggcctgagcgacgataaaaaaccctttaagtgctttactccgaaaggctctagtctgaagatagaggagcgagctgagttccttaacaagagcgtacaaaagtcaagcggtgtcaaatctactcaccaggcggccattgtgagcaaaatcgactccaggcttgagcaatatacctctgctattgagggaacgaaaagtgccaaaccaactaagcccgccgcctctgatcttcccgttcccgccgagggagtgaggaatatcaaatcttag

SEQ ID NO: 14232 - DNA, 219 bp, synthetic construct
  misc_feature 1..219: note = Description of Artificial Sequence: Synthetic coding sequence
  source 1..219: mol_type = other DNA
atggacgacttcgaaaggcgtcgcgagctcaggcggcagaaaagagaagagatgcgattggaggccgagaggattgcctatcagcgcaacgacgatgacgaggaggaggcggcaagggagaggagacgccgggcccggcaagagcggctgaggcagaagcaggaagaggaaagcttaggacaagtgacagatcaagtggaagtgaatgcgcagaactag

SEQ ID NO: 14233 - DNA, 1632 bp, synthetic construct
  misc_feature 1..1632: note = Description of Artificial Sequence: Synthetic coding sequence
  source 1..1632: mol_type = other DNA
atgaccagctatatgaaagttgaccggcagtggaatgcagaaattctggagctgatcctcgggaccggccaattgagcactggccagattgcgtatcagcgaaatgatgacgatgaggaggaggcggctcgagaacgacggaggagagctagacaagagagacttagacaaaaacaggaggaggagagtctaggacaagtgactgatcaggtggaggtgaatgcccaaaacagcgtgcctgacgaggaggccaagaccaccacgaccaatacccaggtggaaggcgatgacgaagccgcctttcttgagcgtctggcgcgccgggaggagcgtcggcagaagcgacttcaagaagctctggagagacaaaaggagtttgaccctaccataactgatgcctcattgagccttccatcccgccggatgcagaatgataccgccgagaacgagaccaccgaaaaggaggagaagagtgagagccggcaggaacgctatgaaatagaagaaaccgaaactgtcaccaagtcgtatcagaaaaacgactggagggatgcggaagagaataagaaagaggacaaagaaaaagaggaggaagaagaagagaagcctaagagaggcagtatcggcgaaaatcagattaaggacgagaaaatcaagaaggataaggaacctaaggaagaagtcaagtcatttatggaccggaagaaaggctttacggaggtgaaatctcagaatggtgaattcatgactcataagctgaaacatactgagaatacattcagcaggccaggaggacgtgctagcgtggatactaaggaggcagagggcgctcctcaggtggaggccggaaaaagactggaagaactccgtcgcagacgcggcgagacagagtccgaggaatttgaaaaactgaagcagaaacagcaggaagctgctctggagctcgaggaacttaaaaaaaagagggaagaacgccgcaaggtactggaagaagaagagcaacggcgcaaacaggaggaggcggacagaaagctgcgggaagaagaggaaaagagacgcttaaaagaggagatcgagaggagacgcgccgaggctgccgagaagaggcagaaaatgcctgaagacgggctgagtgacgacaagaaaccatttaagtgctttacacctaagggttcctctctcaaaatcgaggagcgcgccgagttcctgaataagagtgtgcagaagtcgtccggggtcaagtctacccaccaggccgcaattgtgagcaagatcgatagccgccttgagcagtatactagcgctatagagggaacgaagagtgctaaacctaccaagcctgccgcaagtgacctgcccgtaccagcagagggagtgagaaatattaagagcatgtgggagaaaggtaatgtgttttccagccccaccgccgccggaaccccaaataaagaaactgcgggcctgaaggtcggggtgtctagtagaatcaatgaatggcttacaaaaacacctgacggtaacaagtcccccgcccctaaacccagtgatttgcgccctggtgacgtgtcctctaagcgaaacctctgggaaaagcaatccgtggacaaggtcactagtccaactaaggtgtag

SEQ ID NO: 14234 - DNA, 3975 bp, synthetic construct
  misc_feature 1..3975: note = Description of Artificial Sequence: Synthetic coding sequence
  source 1..3975: mol_type = other DNA
atggccgatagcctgtacaacatccggctactgagggagttttcaaacgaatatttgaataaatgcttctacctgacactcgaagatatgctatatgcacccttggtgctgaaacctaacgtgatggtgttcattgccgaactcttctggtggtttgagaacgtgaagccagattttgtgcaacctagagatgtccaagaactgaaggacgccaagaccgtgcttcatcagaaatcaagcagaccaccagttcccatctcaaacgctaccaaacgcagtttcctcggcagtcctgccgcaggcaccctggccgagcttcagcctcccgttcagctgccagcagaggggtgtcacagacattacctgcatccagaggagccagagtatttgggcaaaggcactgctgccttctcgccaagccatccgttgttgcctttacgccagaagcaacagaaaagcatccagggcgaagacatacctgatcagaggcaccgcagcaattctttgacaagagtggatgggcagcctcgtggcgcggccattgcctggcccgaaaaaaaaacaagaccggcctctcagcctacaccctttgcgctccaccacgccgcctcttgtgaggtggacccttcctccggggactcaatatcactggccaggagtatctccaaagacagcctggcatcaaacatagtgaatctcacacctcagaatcagccacatccaaccgcgacgaaaagtcatggcaagagcctcctgtccaacgtgagcatagaggatgaggaggaggagctggtggcgatcgtcagagccgacgtggttcctcagcaggccgatcccgagtttcctcgtgcctctcctcgtgctctcggccttaccgctaatgccaggtcacctcagggccaactggacacctcggagtctaaacctgattccttctttctcgaaccccttatgcctgcggtactgaagcctgccaaggaaaaacaggtcataacaaaagaggacgagcgcggggaaggcagacctcggagcatcgtctcgaggcggccctccgagggaccacagcctctggtgaggaggaaaatgactggctctagagacctaaaccgaacatttactcccatcccctgcagcgaatttcctatgggtatcgatccaacagaaaccggaccgctgtcagttgagactgccggcgaggtttgtggcgggcctctcgcgctgggtgggtttgatccctttcctcagggccccagcactgatgggttcttcttacatgtggggcgtgcagacgaggataccgagggacggctatacgtcagctgcagcaagtctcctaacagtcacgactccgagccttggaccttacttagacaggattcagactctgatgtggtcgacatagaagaagccgaacacgatttcatgggggaggcccacccagtggtcttcagcagatacattggagaggaagagagcgcaaaattacaggaggacatgaaggtaaaagagcatgaggacaaagacgacgcctctggccgctcatctccttgtctgtccaccgctagtcagatgagctccgtgagtatggccagtggcagtgtgaagatgaccagctttgccgagcgtaagctgcagcgcttgaacagctgtgagactaagagctctacatcctcctcccagaaaactacaccagacgcctccgagagctgtccggctcctcttacgacctggcgtcagaaaagagaacagtccccctctcagcatggcaaggaccctgcatctctgctggcctccgagctggtccagctgcacatgcagctggaggaaaaacggcgggccatagaggctcaaaaaaaaaagatggaggccttgtcggccagacagcgtctgaagttgggaaaggccgccttcctgcacgtggtgaaaaaggggaaagcggaagctgccccgccactgaggcccgaacattttgcaaaggagtatagccagcataatggcgaagattgtggggacgctgtctcaaagactgaggattttctcgtgaaggaagagcaacgggaggagctgctccatgagccgcaggacgtggacaaggaatccttggccttcgcccagcagcacaaagcaaaggatcccgttgctttacatgagcttgagaggaataaggtcatctctgcagctctcctcgaggacacagtgggggaggtggttgatgtgaatgaatgtgacctgagtattgagaagctcaacgaaaccatctctacacttcagcaagctatcttgaaaatttctcagcagcaggaacaactgctgatgaagtccccaactgtcccagtgcctgggagcaagaataactcacaggaccacaaggtgaaggcaccagtccactttgtcgaacccttgagcccaaccggcgttgctggacacaggaaagctcctcgtctggggcagggccgaaattcgcgatctggcaggcctgccgagctgaaagtacccaaggaccggcctcagggttcctcccggtctaaaacccccacaccatcagtggagacattgccgcacttgcggccgttccccgcctcaagtcaccccagaacacctacggacccgggcttggactccgccctggaacctagcggcgacccccacggcaagtgcctgtttgacagctatcgactacacgacgagagtaatcaacgaaccctgactctgagttcctctaaagacgcaaacatattgtctgagcagatgtcccttaaggaggtgcttgacgcctccgtgaaagaagtcggatcatcaagttctgatgtgagcggaaaagagtcagtgccagtggaagagcccctgagatctcgagcttccttgatcgaggtcgacctgtcagatcttaaggctccagatgaggacggcgaactagtgtcactcgacggttccgctgacctggtttcagaaggagaccagaagccaggcgtcggctttttctttaaagacgagcaaaaggccgaggatgagcttgctaagaaacgggctgcctttctgctgaagcagcagcgcaaggccgaagaagcccgagttagaaaacagcagctagaggcggaagtcgagttaaaacgggacgaagcacgacgaaaggcagaagaagatcgcgttcgcaaggaagaggagaaggctcgtagagagctaattaagcaggaatatctgcggcgcaagcagcagcaaatcttagaggagcagggtttgggcaagccgaagtctaagccaaaaaaaccgcggccaaaaagtgtgcatcgggaggagagttgttccgattcagggaccaaatgctcctcgactcccgacaatctcagccggacccagtccggctcctcactctccttagcctctgctgctactaccgaaccagagtccgtgcactccggcggtacgcctagtcagcgcgtggaatccatggaggcgttgccgattctgagccgcaatccgtccagaagcacagatagagattgggagaccgcctccgctgccagcagcctggctagtgtcgccgaatataccggccccaagctctttaaagagcccagctcaaagtccaataagccgatcattcataacgctatcagtcattgttgcctcgctggtaaggtgaatgagccccacaagaacagcattctcgaagagctggagaagtgtgacgccaaccactatattatcctgtttcgcgatgctggctgccagtttcgcgccctttactgttattatcccgacaccgaggagatctataaactgactggaactgggcccaaaaacattaccaagaagatgatcgacaaattatacaagtatagttccgatcgaaagcaattcaatctaatccccgccaagactatgagtgtgtcagttgacgctttgaccatccataaccacctatggcagcccaagcggccagcggtccctaaaaaggcccagaccaggaaatag

SEQ ID NO: 14235 - DNA, 4809 bp, synthetic construct
  misc_feature 1..4809: note = Description of Artificial Sequence: Synthetic coding sequence
  source 1..4809: mol_type = other DNA
atggtcgacgcatctggcagggcggccgctgaagggtggagaaaaatggaagccccccccgacggggctgctgatttagtgcccctggaccggtatgatgcagcccgagcaaagatcgccgcaaacctgcagtggatatgcgccaaagcctacggccgggataatatccccgaagatctccgcgatccgttctatgttgaccaatacgagcaggaacacatcaagccaccggttatcaagcttctcttgtcatccgagttatactgcagggtttgctccttgatcttaaaaggggaccaagtcgcggctctccaagggcatcagtccgtgatccaagctctcagtcgcaaggggatttacgtgatggaaagtgatgacacgcctgtaacagagagcgacctcagcagggcccccatcaagatgtccgcccatatggctatggttgatgcattgatgatggcttataccgttgaaatgatctccatcgagaaggtagtggcctccgtaaagagattctcgaccttcagcgcttcaaaggaattaccgtatgatctggaagacgctatggttttctggatcaacaaagttaatttgaagatgagggaaattacagaaaaggaggtcaagctgaagcaacaactgttggagtcccccgctcaccagaaagtacgttacaggcgggagcacctgtctgcaaggcaaagcccgtatttcccactgttggaggacttgatgagagatggctccgatggcgctgccctgctggcggtgattcactattactgtcccgaacagatgaaactcgacgacatatgcctcaaagaagtgacctccatggcagacagtctgtacaatatacgcctgctccgcgaattctctaacgagtaccttaacaagtgtttctacctcaccctggaagacatgctctatgctcctctggtgctgaagcctaatgttatggtgtttattgctgagctcttctggtggtttgaaaatgtaaaacctgacttcgtgcagcctagagacgttcaggagctcaaggacgcgaagacagtgctgcatcagaagtcatccaggcctcccgtgccaatctccaatgcaacgaagcgctcattcttgggcagcccggccgccggtacattagccgaattacagcctcctgtgcaactaccggccgaaggttgccatagacactacctgcaccccgaggagccggagtatctgggcaagggaaccgccgcattttcaccctctcacccattattgcctctgcgtcagaagcagcagaagtccattcagggagaggatataccagatcagaggcatcggtctaactccctgaccagagtggatggtcagccaaggggggccgctatcgcttggccagagaagaaaactagacccgcatctcagcctacacccttcgccctgcatcacgctgcgagctgcgaggtggatccaagtagcggtgattccatctctctggcaaggtcaatcagcaaagattctctggcttcaaatattgttaacttgacgcctcagaatcagcctcatcctaccgcgacaaagtcccatgggaaatccctcttgagcaatgtgagcatcgaagacgaagaggaggagcttgtcgccatcgtgagggccgatgtagtccctcagcaggcagatcccgagtttccaagagcttcacccagggctctggggttgacagcgaacgccagaagcccacagggacagctggataccagcgagagcaaacctgattcttttttcctcgaacccttgatgcctgcggtcctgaagcccgccaaagaaaagcaggttattaccaaggaagacgagaggggtgaaggacgccctagatcaattgtgtcccgccggccatcggaaggcccacagccacttgttagacggaagatgacagggtctcgtgatctgaaccgcactttcacccccatcccgtgcagtgagttccccatggggatagatccaactgagactggcccccttagcgtggaaactgccggcgaagtgtgcggcggacctctggccctgggtgggttcgatccatttcctcagggcccatcgaccgacggattctttctacacgtgggtagagccgatgaggatacagagggaagattatacgtcagctgttccaagtctcccaacagtcatgacagcgaaccctggaccctgctccgccaagattcggactcagacgttgtagacatcgaggaagccgagcacgacttcatgggcgaggcacatcccgtggtgttctcacgctacatcggcgaggaagaatctgccaagctccaggaggacatgaaagtaaaggaacatgaggataaggatgacgctagcggacggtccagcccttgcctatcgacagcgagtcagatgtctagcgtttccatggcctctggatcagttaagatgacctcattcgccgagaggaagttacagcggctgaattcctgcgaaacaaagagctccacgtcatcctcccaaaaaacaacccctgacgcatctgagagttgccccgcccctcttactacttggagacagaagcgggagcagtcaccgagccaacatgggaaagacccagccagtttactggcgagcgagttggtgcagttgcacatgcagctcgaggagaagaggagggctatcgaagctcagaagaaaaaaatggaggccctgtctgcccgccagcgcctgaagctaggtaaggccgcctttctccacgtggtcaagaaggggaaggccgaggccgcgcctcccttgcgcccagagcattttgcgaaagaatatagtcagcacaatggggaagattgtggcgacgccgtaagcaagaccgaagactttttggtcaaggaggaacagcgggaagagctgttgcacgaaccacaggacgtggataaagagagtttggcgtttgcccaacagcacaaggccaaagacccagtcgccctccacgaactggaaaggaacaaggtgatctcagctgcattgcttgaggataccgttggcgaggtggtggatgttaatgagtgcgacctatccatcgagaagcttaacgaaaccatcagtaccttgcagcaggctatccttaagatatcccagcagcaagaacagcttttgatgaaatcacccacggtccctgtgcccggatccaagaacaacagtcaagaccacaaggtgaaagcccctgtgcacttcgtcgagccattatctcccacaggggtagctggtcacagaaaagccccaaggctaggacaaggtaggaatagccgttctggccgacctgctgaactcaaggtgccgaaagacagaccacaaggtagttcgaggagtaaaacacctacccctagcgtagagacccttccccacctgagaccttttccggcatcctctcacccccgcacccctactgaccccgggttagatagcgcacttgaaccttctggcgacccgcacggaaagtgcctgtttgactcgtacagactgcatgacgaaagcaatcagagaacgctcacactttcatcctcaaaggatgccaatatcctgagtgagcaaatgagccttaaagaagtcctcgatgccagtgtcaaagaggtgggtagcagctcttctgacgttagcggaaaagaatccgtgcccgtagaagagccgttgcggtctcgagcctcactgatcgaggtggatctgtcagaccttaaggcccccgatgaagacggagaactggtgtccctagacggaagcgccgacctggtctccgaaggggaccagaaacccggcgtaggattcttcttcaaggatgagcagaaagcagaggatgaattggctaaaaagcgcgcagcctttttgttgaagcagcagagaaaggctgaagaggcccgggtaaggaaacagcagctggaggcagaggtggaactgaaacgagatgaggcgaggcgcaaggcagaagaggatagagttcgcaaagaggaagagaaggcgcggcgggaactgataaaacaggagtatctcagaaggaagcagcaacagatccttgaggagcagggactaggcaaaccaaagagtaaaccaaaaaagccccggcccaagtctgtgcaccgagaggagtcatgctctgactcaggcactaagtgcagctcaactcccgacaatctgtcccgtacgcaatccggctcttccctgtccctggcttccgctgctaccactgagcccgagtcagtccatagtggcggcactccttcccaacgggtggagtccatggaggctctccccattctgtcgcggaacccttctaggtccactgatcgcgattgggaaaccgcatccgcagctagctctttggcatccgtggctgaatatacagggcccaagctgtttaaggagccctccagcaagtcaaacaaacctatcatacacaatgcaatctctcattgttgcctggcagggaaagttaatgagcctcacaagaactcaattcttgaggagctggagaagtgcgacgccaatcattacattatcctcttccgagacgcaggctgtcaattcagggccctatactgttactaccccgatacagaagagatctacaaactgaccgggaccgggcctaaaaacatcaccaaaaaaatgattgacaagctgtacaagtactcttcggataggaaacaattcaacctgatccctgcgaagacaatgtccgtctctgtcgacgccctgaccattcataatcacctctggcagcccaaacgccccgcagtgcccaaaaaagcacagactcggaagtag
